(19) United States
(12) Patent Application Publication
(10) Pub. No.: US 2024/0301379 A1
(43) Pub. Date: Sep. 12, 2024

(54) EFFECTOR PROTEINS AND USES THEREOF

(71) Applicant: Mammoth Biosciences, Inc., Brisbane, CA (US)

(72) Inventors: Lucas Benjamin HARRINGTON, San Francisco, CA (US); David PAEZ-ESPINO, Concord, CA (US); Benjamin Julius RAUCH, San Francisco, CA (US); Stepan TYMOSHENKO, Sacramento, CA (US)

(73) Assignee: Mammoth Biosciences, Inc., Brisbane, CA (US)

(21) Appl. No.: 18/676,562

(22) Filed: May 29, 2024

Related U.S. Application Data
(63) Continuation of application No. PCT/US2022/080258, filed on Nov. 21, 2022.
(60) Provisional application No. 63/371,023, filed on Aug. 10, 2022.
(60) Provisional application No. 63/284,339, filed on Nov. 30, 2021.

(51) Int. Cl. C12N 9/22; C12N 15/11; C12N 15/90; C12Q 1/6844

(52) U.S. Cl. CPC C12N 9/22; C12N 15/11; C12N 15/907; C12Q 1/6844; C12N 2310/20

(57) ABSTRACT

Provided herein are compositions, systems, and methods comprising effector proteins and uses thereof. These effector proteins may be characterized as CRISPR-associated (Cas) proteins. Various compositions, systems, and methods of the present disclosure may leverage the activities of these effector proteins for the modification, detection, and engineering of nucleic acids.

### CROSS-REFERENCE TO RELATED APPLICATIONS

[0001] This application is a continuation of International Patent Application No. PCT/US2022/080258, filed Nov. 21, 2022, which claims priority to U.S. Provisional Application No. 63/284,339, filed Nov. 30, 2021, and U.S. Provisional Application No. 63/371,023, filed Aug. 10, 2022, each of which are incorporated herein by reference in their entireties.

### DESCRIPTION OF THE TEXT FILE SUBMITTED ELECTRONICALLY

[0002] The contents of the electronic sequence listing (MABI_020_02 US_SeqList_ST26.xml; Size: 63,840,257 bytes; and Date of Creation: May 28, 2024) are herein incorporated by reference in its entirety.

### BACKGROUND

[0003] Programmable nucleases are proteins that bind and cleave nucleic acids in a sequence-specific manner. A programmable nuclease may bind a target region of a nucleic acid and cleave the nucleic acid within the target region or at a position adjacent to the target region. In some embodiments, a programmable nuclease is activated when it binds a target region of a nucleic acid to cleave regions of the nucleic acid that are near, but not adjacent to the target region. A programmable nuclease, such as a CRISPR-associated (Cas) protein, may be coupled to a guide nucleic acid that imparts activity or sequence selectivity to the programmable nuclease. In general, guide nucleic acids comprise a CRISPR RNA (crRNA) that is at least partially complementary to a target nucleic acid. In some cases, guide nucleic acids comprise a trans-activating crRNA (tracrRNA), at least a portion of which interacts with the programmable nuclease. In some cases, a tracrRNA is provided separately from the crRNA and hybridizes to a portion of the crRNA that does not hybridize to the target nucleic acid. In other cases, the tracrRNA and crRNA are linked as a single guide RNA.

[0004] Programmable nucleases may cleave nucleic acids, including single stranded RNA (ssRNA), double stranded DNA (dsDNA), and single-stranded DNA (ssDNA). Programmable nucleases may provide cis cleavage activity, nickase activity, or a combination thereof. Cis cleavage activity is cleavage of a target nucleic acid that is hybridized to a guide nucleic acid, wherein cleavage occurs within or directly adjacent to the region of the target nucleic acid that is hybridized to guideRNA.

[0005] Programmable nucleases may be modified to have reduced nuclease or nickase activity relative to its unmodified version, but retain their sequence selectivity. For instance, amino acid residues of the programmable nuclease that impart catalytic activity to the programmable nuclease may be substituted with an alternative amino acid that does not impart catalytic activity to the programmable nuclease. The term, “effector protein,” is used herein and throughout to encompass both programmable nucleases and modified versions thereof that may not necessarily have nuclease activity.

[0006] While certain programmable nucleases may be used to edit and detect nucleic acid molecules in a sequence specific manner, challenging biological and sample conditions (e.g., high viscosity, metal chelating) may limit their accuracy and effectiveness. There is thus a need for systems and methods that employ programmable nucleases having specificity and efficiency across a wide range of biological and sample conditions.

### SUMMARY

[0007] The present disclosure provides polypeptides, such as effector proteins, compositions, systems, and methods comprising effector proteins and uses thereof. In some instances, compositions, systems, and methods comprise guide nucleic acids or uses thereof. Compositions, systems and methods disclosed herein may leverage nucleic acid modifying activities such as nucleic acid editing (e.g., cis cleavage activity) of these effector proteins for the modification, detection and engineering of target nucleic acids. Editing may comprise: insertion, deletion, substitution, or a combination thereof of one or more nucleotides or amino acids. Modification activities also includes cleavage activity, such as cis cleavage activity, nicking activity, and/or nuclease activity. In some instances, compositions, systems and methods are useful for the editing the sequence of target nucleic acids. In some instances, compositions, systems and methods are useful for the detection of target nucleic acids. In some instances, compositions, systems and methods are useful for the treatment of a disease or disorder. The disease or disorder may be associated with one or more mutations in the target nucleic acid.

### I. Certain Embodiments

[0008] In some embodiments, the disclosure provides a composition comprising an effector protein and a guide nucleic acid, wherein the effector protein comprises an amino acid sequence that is at least 75%, at least 80%, at least 85%, at least 90%, at least 95%, at least 98%, at least 99% or 100% identical to any one of SEQ ID NOS: 1-10,484 or 15,022-24,165. In some embodiments, the disclosure provides a composition comprising an effector protein and a guide nucleic acid, wherein the amino acid sequence of the effector protein is at least 75%, at least 80%, at least 85%, at least 90%, at least 95%, at least 98%, at least 99% or 100% identical to any one of SEQ ID NOS: 1-10,484 or 15,022-24,165.

[0009] In some embodiments, the disclosure provides a composition comprising an effector protein and a guide nucleic acid, wherein the effector protein comprises about 100, about 120, about 140, about 160, about 180, about 200, about 220, about 240, about 260, about 280, about 300, about 320, about 340, about 360, about 380, about 400, about 420, about 440, about 460, about 480, about 500, about 520, about 540, about 560, about 580, about 600, about 620, about 640, about 660, about 680, about 700, about 720, about 740, about 760, about 780, about 800, about 820, about 840, about 860, about 880, about 900, about 920, about 940, about 960, about 980, about 1000, about 1020, about 1040, about 1060, about 1080, about 1100, about 1120, about 1140, about 1160, about 1180, about 1200, about 1220, about 1240, about 1260, about 1280, about 1300, about 1320, about 1340, about 1360, about 1380, about 1400, about 1420, about 1440, about 1460, about 1480, about 1490, about 1500, about 1520, about 1540, about 1560, about 1580, about 1600, about 1620, about 1640, about 1660, about 1680, about 1700, about 1720, about 1740, about 1760, about 1780, about 1800, about 1820, about 1840, about 1860, about 1880, about 1900, or about 1920 contiguous amino acids of a sequence selected from SEQ ID NOS: 1-10,484 or 15,022-24,165.

[0010] In some embodiments, the disclosure provides a composition comprising an effector protein and a guide nucleic acid, wherein the effector protein comprises the amino acid sequence located at positions 1-100, 150-250, 101-200, 250-350, 201-300, 350-450, 301-400, 350-450, 401-500, 450-550, 501-600, 550-650, 601-700, 650-750, 701-800, 750-850, 801-900, 850-950, 901-1000, 950-1050, 1001-1100, 1050-1150, 1101-1200, 1150-1250, 1201-1300, 1250-1350, 1301-1400, 1350-1450, 1401-1500, 1450-1550, 1501-1600, 1550-1650, 1601-1700, 1650-1750, 1701-1800, 1850-1950, 1801-1900, or 1850-1950 of a sequence selected from SEQ ID NOS: 1-10,484 or 15,022-24,165.

[0011] In some embodiments, the disclosure provides a composition comprising an effector protein and a guide nucleic acid, wherein the effector protein comprises an amino acid sequence that is at least 90%, at least 95%, or 100% identical to a portion of a sequence selected from SEQ ID NOS: 1-10,484 or 15,022-24,165, and wherein the length of the portion is at least about 100, at least about 200, at least about 300, at least about 400, at least about 500, or at least about 600 linked amino acids in length. In some embodiments, the portion of the sequence is about 30%, about 40%, about 50%, about 60%, about 70%, about 80%, or about 90% of a sequence selected from SEQ ID NOS: 1-10,484 or 15,022-24,165.

[0012] In some embodiments, the disclosure provides a composition comprising an effector protein, and a guide nucleic acid, wherein a) the amino acid sequence of the effector protein is at least 50%, at least 55%, at least 60%, at least 65%, at least 70%, at least 75%, at least 80%, at least 85%, at least 90%, at least 95%, at least 97%, at least 98%, at least 99% or 100% identical to a sequence selected from Column A1 of TABLE 1; and b) at least a portion of the engineered guide nucleic acid comprises a nucleobase sequence that is: i) at least 50%, at least 55%, at least 60%, at least 65%, at least 70%, at least 75%, at least 80%, at least 85%, at least 90%, at least 95%, or 100% identical to a sequence selected from Column B1 of TABLE 1, wherein the sequence from Column A1 and the sequence from Column B1 are in the same row of TABLE 1, or ii) at least 50%, at least 55%, at least 60%, at least 65%, at least 70%, at least 75%, at least 80%, at least 85%, at least 90%, at least 95%, or 100% reverse complementary to a sequence selected from Column B1 of TABLE 1, wherein the sequence from Column A1 and the sequence from Column B1 are in the same row of TABLE 1.

[0013] In some embodiments, the disclosure provides a composition comprising an effector protein, and an engineered guide nucleic acid, wherein a) the amino acid sequence of the effector protein is at least 50%, at least 55%, at least 60%, at least 65%, at least 70%, at least 75%, at least 80%, at least 85%, at least 90%, at least 95%, at least 97%, at least 98%, at least 99% or 100% identical to a sequence selected from Column A2 of TABLE 1; and b) at least a portion of the engineered guide nucleic acid comprises a nucleobase sequence that is: i) at least 50%, at least 55%, at least 60%, at least 65%, at least 70%, at least 75%, at least 80%, at least 85%, at least 90%, at least 95%, or 100% identical to a sequence selected from Column B2 of TABLE 1, wherein the sequence from Column A2 and the sequence from Column B2 are in the same row of TABLE 1, or ii) at least 50%, at least 55%, at least 60%, at least 65%, at least 70%, at least 75%, at least 80%, at least 85%, at least 90%, at least 95%, or 100% reverse complementary to a sequence selected from Column B2 of TABLE 1, wherein the sequence from Column A2 and the sequence from Column B2 are in the same row of TABLE 1.

[0014] In some embodiments, the disclosure provides a composition comprising an effector protein, and an engineered guide nucleic acid, wherein a) the amino acid sequence of the effector protein is at least 50%, at least 55%, at least 60%, at least 65%, at least 70%, at least 75%, at least 80%, at least 85%, at least 90%, at least 95%, at least 97%, at least 98%, at least 99% or 100% identical to a sequence selected from Column A3 of TABLE 1; and b) at least a portion of the engineered guide nucleic acid comprises a nucleobase sequence that is: i) at least 50%, at least 55%, at least 60%, at least 65%, at least 70%, at least 75%, at least 80%, at least 85%, at least 90%, at least 95%, or 100% identical to a sequence selected from Column B3 of TABLE 1, wherein the sequence from Column A3 and the sequence from Column B3 are in the same row of TABLE 1, or ii) at least 50%, at least 55%, at least 60%, at least 65%, at least 70%, at least 75%, at least 80%, at least 85%, at least 90%, at least 95%, or 100% reverse complementary to a sequence selected from Column B3 of TABLE 1, wherein the sequence from Column A3 and the sequence from Column B3 are in the same row of TABLE 1.

[0015] In some embodiments, the disclosure provides a composition comprising an effector protein, and an engineered guide nucleic acid, wherein the amino acid sequence of the effector protein is at least 50% identical to a sequence selected from Column A1 of TABLE 1, and wherein at least a portion of the engineered guide nucleic acid comprises a nucleobase sequence that is at least 50% identical or at least 50% reverse complementary to a sequence selected from Column B1 of TABLE 1, wherein the sequence from Column A1 and the sequence from Column B1 are in the same row of TABLE 1.

[0016] In some embodiments, the disclosure provides a composition comprising an effector protein, and an engineered guide nucleic acid, wherein the amino acid sequence of the effector protein is at least 60% identical to a sequence selected from Column A1 of TABLE 1, and wherein at least a portion of the engineered guide nucleic acid comprises a nucleobase sequence that is at least 60% identical or at least 60% reverse complementary to a sequence selected from Column B1 of TABLE 1, wherein the sequence from Column A1 and the sequence from Column B1 are in the same row of TABLE 1. In some embodiments, the disclosure provides a composition comprising an effector protein, and an engineered guide nucleic acid, wherein the amino acid sequence of the effector protein is at least 70% identical to a sequence selected from Column A1 of TABLE 1, and wherein at least a portion of the engineered guide nucleic acid comprises a nucleobase sequence that is at least 70% identical or at least 70% reverse complementary to a sequence selected from Column B1 of TABLE 1, wherein the sequence from Column A1 and the sequence from Column B1 are in the same row of TABLE 1. In some embodiments, the disclosure provides a composition comprising an effector protein, and an engineered guide nucleic acid, wherein the amino acid sequence of the effector protein is at least 80% identical to a sequence selected from Column A1 of TABLE 1, and wherein at least a portion of the engineered guide nucleic acid comprises a nucleobase sequence that is at least 80% identical or at least 80% reverse complementary to a sequence selected from Column B1 of TABLE 1, wherein the sequence from Column A1 and the sequence from Column B1 are in the same row of TABLE 1.

[0017] In some embodiments, the disclosure provides a composition comprising an effector protein, and an engineered guide nucleic acid, wherein the amino acid sequence of the effector protein is at least 90% identical to a sequence selected from Column A1 of TABLE 1, and wherein at least a portion of the engineered guide nucleic acid comprises a nucleobase sequence that is at least 90% identical or at least 90% reverse complementary to a sequence selected from Column B1 of TABLE 1, wherein the sequence from Column A1 and the sequence from Column B1 are in the same row of TABLE 1.

[0018] In some embodiments, the disclosure provides a composition comprising an effector protein, and an engineered guide nucleic acid, wherein the amino acid sequence of the effector protein is at least 95% identical to a sequence selected from Column A1 of TABLE 1, and wherein at least a portion of the engineered guide nucleic acid comprises a nucleobase sequence that is at least 95% identical or at least 95% reverse complementary to a sequence selected from Column B1 of TABLE 1, wherein the sequence from Column A1 and the sequence from Column B1 are in the same row of TABLE 1.

[0019] In some embodiments, the disclosure provides a composition comprising an effector protein, and an engineered guide nucleic acid, wherein the amino acid sequence of the effector protein is 100% identical to a sequence selected from Column A1 of TABLE 1, and wherein at least a portion of the engineered guide nucleic acid comprises a nucleobase sequence that is 100% identical or 100% reverse complementary to a sequence selected from Column B1 of TABLE 1, wherein the sequence from Column A1 and the sequence from Column B1 are in the same row of TABLE 1. In some embodiments, the disclosure provides a composition comprising an effector protein, and an engineered guide nucleic acid, wherein the amino acid sequence of the effector protein is at least 50% identical to a sequence selected from Column A2 of TABLE 1, and wherein at least a portion of the engineered guide nucleic acid comprises a nucleobase sequence that is at least 50% identical or at least 50% reverse complementary to a sequence selected from Column B2 of TABLE 1, wherein the sequence from Column A2 and the sequence from Column B2 are in the same row of TABLE 1. In some embodiments, the disclosure provides a composition comprising an effector protein, and an engineered guide nucleic acid, wherein the amino acid sequence of the effector protein is at least 60% identical to a sequence selected from Column A2 of TABLE 1, and wherein at least a portion of the engineered guide nucleic acid comprises a nucleobase sequence that is at least 60% identical or at least 60% reverse complementary to a sequence selected from Column B2 of TABLE 1, wherein the sequence from Column A2 and the sequence from Column B2 are in the same row of TABLE 1. In some embodiments, the disclosure provides a composition comprising an effector protein, and an engineered guide nucleic acid, wherein the amino acid sequence of the effector protein is at least 70% identical to a sequence selected from Column A2 of TABLE 1, and wherein at least a portion of the engineered guide nucleic acid comprises a nucleobase sequence that is at least 70% identical or at least 70% reverse complementary to a sequence selected from Column B2 of TABLE 1, wherein the sequence from Column A2 and the sequence from Column B2 are in the same row of TABLE 1. In some embodiments, the disclosure provides a composition comprising an effector protein, and an engineered guide nucleic acid, wherein the amino acid sequence of the effector protein is at least 80% identical to a sequence selected from Column A2 of TABLE 1, and wherein at least a portion of the engineered guide nucleic acid comprises a nucleobase sequence that is at least 80% identical or at least 80% reverse complementary to a sequence selected from Column B2 of TABLE 1, wherein the sequence from Column A2 and the sequence from Column B2 are in the same row of TABLE

[0020] In some embodiments, the disclosure provides a composition comprising an effector protein, and an engineered guide nucleic acid, wherein the amino acid sequence of the effector protein is at least 90% identical to a sequence selected from Column A2 of TABLE 1, and wherein at least a portion of the engineered guide nucleic acid comprises a nucleobase sequence that is at least 90% identical or at least 90% reverse complementary to a sequence selected from Column B2 of TABLE 1, wherein the sequence from Column A2 and the sequence from Column B2 are in the same row of TABLE 1. In some embodiments, the disclosure provides a composition comprising an effector protein, and an engineered guide nucleic acid, wherein the amino acid sequence of the effector protein is at least 95% identical to a sequence selected from Column A2 of TABLE 1, and wherein at least a portion of the engineered guide nucleic acid comprises a nucleobase sequence that is at least 95% identical or at least 95% reverse complementary to a sequence selected from Column B2 of TABLE 1, wherein the sequence from Column A2 and the sequence from Column B2 are in the same row of TABLE 1. In some embodiments, the disclosure provides a composition comprising an effector protein, and an engineered guide nucleic acid, wherein the amino acid sequence of the effector protein is 100% identical to a sequence selected from Column A2 of TABLE 1, and wherein at least a portion of the engineered guide nucleic acid comprises a nucleobase sequence that is 100% identical or 100% reverse complementary to a sequence selected from Column B2 of TABLE 1, wherein the sequence from Column A2 and the sequence from Column B2 are in the same row of TABLE 1. In some embodiments, the disclosure provides a composition comprising an effector protein, and an engineered guide nucleic acid, wherein the amino acid sequence of the effector protein is at least 50% identical to a sequence selected from Column A3 of TABLE 1, and wherein at least a portion of the engineered guide nucleic acid comprises a nucleobase sequence that is at least 50% identical or at least 50% reverse complementary to a sequence selected from Column B3 of TABLE 1, wherein the sequence from Column A3 and the sequence from Column B3 are in the same row of TABLE 1. In some embodiments, the disclosure provides a composition comprising an effector protein, and an engineered guide nucleic acid, wherein the amino acid sequence of the effector protein is at least 60% identical to a sequence selected from Column A3 of TABLE 1, and wherein at least a portion of the engineered guide nucleic acid comprises a nucleobase sequence that is at least 60% identical or at least 60% reverse complementary to a sequence selected from Column B3 of TABLE 1, wherein the sequence from Column A3 and the sequence from Column B3 are in the same row of TABLE 1. In some embodiments, the disclosure provides a composition comprising an effector protein, and an engineered guide nucleic acid, wherein the amino acid sequence of the effector protein is at least 70% identical to a sequence selected from Column A3 of TABLE 1, and wherein at least a portion of the engineered guide nucleic acid comprises a nucleobase sequence that is at least 70% identical or at least 70% reverse complementary to a sequence selected from Column B3 of TABLE 1, wherein the sequence from Column A3 and the sequence from Column B3 are in the same row of TABLE 1.

[0021] In some embodiments, the disclosure provides a composition comprising an effector protein, and an engineered guide nucleic acid, wherein the amino acid sequence of the effector protein is at least 80% identical to a sequence selected from Column A3 of TABLE 1, and wherein at least a portion of the engineered guide nucleic acid comprises a nucleobase sequence that is at least 80% identical or at least 80% reverse complementary to a sequence selected from Column B3 of TABLE 1, wherein the sequence from Column A3 and the sequence from Column B3 are in the same row of TABLE 1. In some embodiments, the disclosure provides a composition comprising an effector protein, and an engineered guide nucleic acid, wherein the amino acid sequence of the effector protein is at least 90% identical to a sequence selected from Column A3 of TABLE 1, and wherein at least a portion of the engineered guide nucleic acid comprises a nucleobase sequence that is at least 90% identical or at least 90% reverse complementary to a sequence selected from Column B3 of TABLE 1, wherein the sequence from Column A3 and the sequence from Column B3 are in the same row of TABLE 1. In some embodiments, the disclosure provides a composition comprising an effector protein, and an engineered guide nucleic acid, wherein the amino acid sequence of the effector protein is at least 95% identical to a sequence selected from Column A3 of TABLE 1, and wherein at least a portion of the engineered guide nucleic acid comprises a nucleobase sequence that is at least 95% identical or at least 95% reverse complementary to a sequence selected from Column B3 of TABLE 1, wherein the sequence from Column A3 and the sequence from Column B3 are in the same row of TABLE 1. In some embodiments, the disclosure provides a composition comprising an effector protein, and an engineered guide nucleic acid, wherein the amino acid sequence of the effector protein is 100% identical to a sequence selected from Column A3 of TABLE 1, and wherein at least a portion of the engineered guide nucleic acid comprises a nucleobase sequence that is 100% identical or 100% reverse complementary to a sequence selected from Column B3 of TABLE 1, wherein the sequence from Column A3 and the sequence from Column B3 are in the same row of TABLE 1.

[0022] In some embodiments, at least a portion of the guide nucleic acid binds the effector protein. In some embodiments, the guide nucleic acid comprises a crRNA. In some embodiments, the guide nucleic acid comprises a tracrRNA. In some embodiments, the composition does not comprise a tracrRNA. In some embodiments, the guide nucleic acid comprises a crRNA covalently linked to a tracrRNA. In some embodiments, the guide nucleic acid comprises a first sequence and a second sequence, wherein the first sequence is heterologous with the second sequence. In some embodiments, the first sequence comprises at least five amino acids and the second sequence comprises at least five amino acids. In some embodiments of the compositions provided herein, at least one of the effector protein, the guide nucleic acid, and the combination thereof, are not naturally occurring.

[0023] In some embodiments of the compositions provided herein, at least one of the effector protein and the guide nucleic acid is recombinant or engineered. In some embodiments of the compositions provided herein, the guide nucleic acid comprises a nucleotide sequence that is at least 80%, at least 85%, at least 90%, at least 95%, at least 98% or 100% identical to a nucleotide sequence selected from SEQ ID NOS: 10,485-15,015 or 24,166-31,319. In some embodiments of the compositions provided herein, the guide nucleic acid comprises at least 8, at least 9, at least 10, at least 11, at least 12, at least 13, at least 14, at least 15, at least 16, at least 17, at least 18, at least 19, or at least 20 contiguous nucleotides of a nucleotide sequence selected from SEQ ID NOS: 10,485-15,015 or 24,166-31,319. In some embodiments of the compositions provided herein, the guide nucleic acid comprises at least 20, at least 30, at least 40, at least 50, at least 60, at least 70, at least 80, at least 90, at least 100, at least 110, at least 120, at least 130, at least 140, at least 150, at least 160, at least 170, at least 180, at least 190, at least 200, or at least 220 contiguous nucleotides of a nucleotide sequence selected from SEQ ID NOS: 10,485-15,015 or 24,166-31,319. In some embodiments of the compositions provided herein, the guide nucleic acid comprises a sequence that hybridizes to a target sequence of a target nucleic acid, and wherein the target nucleic acid comprises a protospacer adjacent motif (PAM). In some embodiments of the compositions provided herein, the PAM is located within 1, 5, 10, 15, 20, 40, 60, 80 or 100 nucleotides of the 5′ end of the target sequence. In some embodiments of the compositions provided herein, the effector protein comprises a nuclear localization signal. In some embodiments of the compositions provided herein, the composition further comprises a donor nucleic acid.

[0024] In some embodiments of the compositions provided herein, the composition further comprises a fusion partner protein linked to the effector protein. In some embodiments of the compositions provided herein, the fusion partner protein is directly fused to the N terminus or C terminus of the effector protein via an amide bond. In some embodiments of the compositions provided herein, the fusion partner protein is directly fused to the N terminus or C terminus of the effector protein via a peptide linker. In some embodiments of the compositions provided herein, the fusion partner protein comprises a polypeptide selected from a deaminase, a transcriptional activator, a transcriptional repressor, or a functional domain thereof. In some embodiments of the compositions provided herein, the effector protein comprises at least one mutation that reduces its nuclease activity relative to the effector protein without the mutation as measured in a cleavage assay, optionally wherein the effector protein is a catalytically inactive nuclease. In some embodiments, any one of the compositions provided herein comprise a nucleic acid expression vector, wherein the nucleic acid vector encodes at least one of the effector protein and the guide nucleic acid of the compositions described herein. In some embodiments, any one of the compositions provided herein comprise a donor nucleic acid, optionally wherein the donor nucleic acid is encoded by the nucleic acid expression vector or an additional nucleic acid expression vector. In some embodiments, the nucleic acid expression vector is a viral vector. In some embodiments, the viral vector is an adeno associated viral (AAV) vector. In some embodiments, the virus comprises any one of the compositions herein.

[0025] In some embodiments, provided herein is a pharmaceutical composition, comprising any one of the compositions herein, and a pharmaceutically acceptable excipient. In some embodiments, provided herein is a system comprising any of the compositions described herein, and at least one detection reagent for detecting a target nucleic acid. In some embodiments, the at least one detection reagent is selected from a reporter nucleic acid, a detection moiety, an additional effector protein, or a combination thereof, optionally wherein the reporter nucleic acid comprises a fluorophore, a quencher, or a combination thereof. In some embodiments, the system further comprises at least one amplification reagent for amplifying a target nucleic acid. In some embodiments, the at least one amplification reagent is selected from the group consisting of a primer, a polymerase, a deoxynucleoside triphosphate (dNTP), a ribonucleoside triphosphate (rNTP), and combinations thereof. In some embodiments, the system further comprises a device with a chamber or solid support for containing the composition, target nucleic acid, detection reagent or combination thereof. In some embodiments, provided herein is a method of detecting a target nucleic acid in a sample, comprising the steps of: a) contacting the sample with: i) any one of the compositions described herein or any one of the systems described herein; and ii) a reporter nucleic acid comprising a detectable moiety that produces a detectable signal in the presence of the target nucleic acid and the composition or system, and b) detecting the detectable signal.

[0026] In some embodiments of the method, the reporter nucleic acid comprises a fluorophore, a quencher, or a combination thereof, and wherein the detecting comprises detecting a fluorescent signal. In some embodiments of the method, the method further comprises reverse transcribing the target nucleic acid, amplifying the target nucleic acid, in vitro transcribing the target nucleic acid, or any combination thereof. In some embodiments of the method, the method further comprises reverse transcribing the target nucleic acid and/or amplifying the target nucleic acid before contacting the sample with the composition. In some embodiments of the method, the method further comprises reverse transcribing the target nucleic acid and/or amplifying the target nucleic acid after contacting the sample with the composition. In some embodiments of the method, amplifying comprises isothermal amplification. In some embodiments of the method, the target nucleic acid is from a pathogen. In some embodiments of the method, the pathogen is a virus. In some embodiments of the method, the target nucleic acid comprises RNA. In some embodiments of the method, the target nucleic acid comprises DNA. In some embodiments, provided herein is a method of modifying a target nucleic acid, the method comprising contacting the target nucleic acid with any one of the compositions herein, or any one of the systems described herein, thereby modifying the target nucleic acid. In some embodiments of the method modifying the target nucleic acid comprises cleaving the target nucleic acid, deleting a nucleotide of the target nucleic acid, inserting a nucleotide into the target nucleic acid, substituting a nucleotide of the target nucleic acid with an alternative nucleotide or an additional nucleotide, or any combination thereof. In some embodiments, the method comprises contacting the target nucleic acid with a donor nucleic acid.

[0027] In some embodiments of the method, the target nucleic acid comprises a mutation associated with a disease. In some embodiments of the method, the disease is selected from an autoimmune disease, a cancer, an inherited disorder, an ophthalmological disorder, a metabolic disorder, or a combination thereof. In some embodiments of the method, the disease is cystic fibrosis, thalassemia, Duchenne muscular dystrophy, myotonic dystrophy Type 1, or sickle cell anemia. In some embodiments of the method, contacting the target nucleic acid comprises contacting a cell, wherein the target nucleic acid is located in the cell. In some embodiments of the method, the contacting occurs in vitro. In some embodiments of the method, the contacting occurs in vivo. In some embodiments of the method, the contacting occurs ex vivo.

[0028] In some embodiments, provided herein is a cell comprising any one of the compositions described herein. In some embodiments, provided herein is a cell modified by any one of the compositions described herein. In some embodiments, provided herein is a cell modified by any one of the embodiments of the systems described herein. In some embodiments, provided herein is a cell comprising a modified target nucleic acid, wherein the modified target nucleic acid is a target nucleic acid modified according to any one of the embodiments of the methods herein. In some embodiments, the cell is a eukaryotic cell. In some embodiments, the cell is a mammalian cell. In some embodiments, the cell is a prokaryotic cell. In some embodiments, the cell is a plant cell. In some embodiments, the cell is an animal cell. In some embodiments, the cell is a T cell, optionally wherein the T cell is a natural killer T cell (NKT). In some embodiments, the cell is a chimeric antigen receptor T cell (CAR T-cell). In some embodiments, the cell is an induced pluripotent stem cell (iPSC). In some embodiments, provided herein is a population of cells comprising any one of the compositions herein or generated using any of the methods described herein.

[0029] In some embodiments, provided herein is a method of producing a protein, the method comprising i) contacting a cell comprising a target nucleic acid with the any one of the compositions herein, thereby editing the target nucleic acid to produce a modified cell comprising a modified target nucleic acid; and ii) producing a protein from the cell that is encoded, transcriptionally affected, or translationally affected by the modified nucleic acid. In some embodiments, the method comprises administering to a subject in need thereof a composition described herein, or a cell according to any one of the compositions herein or produced using any of the methods herein.

### INCORPORATION BY REFERENCE

[0030] All publications, patents, and patent applications mentioned in this specification are herein incorporated by reference to the same extent as if each individual publication, patent, or patent application was specifically and individually indicated to be incorporated by reference.

### DETAILED DESCRIPTION OF THE INVENTION

[0031] It is to be understood that both the foregoing general description and the following detailed description are exemplary, and explanatory only, and are not restrictive of the disclosure.

[0032] The section headings used herein are for organizational purposes only and are not to be construed as limiting the subject matter described.

[0033] All documents, or portions of documents, cited in this application, including, but not limited to, patents, patent applications, articles, books, and treatises, are hereby expressly incorporated by reference in their entirety for any purpose.

### II. Definitions

[0034] Unless otherwise indicated, all technical terms used herein have the same meaning as commonly understood by one of ordinary skill in the art to which this invention belongs. Unless otherwise indicated or obvious from context, the following terms have the following meanings:

[0035] As used in this specification and the appended claims, the singular forms “a,” “an,” and “the,” as used herein, include plural references unless the context clearly dictates otherwise.

[0036] Any reference to “or” herein is intended to encompass “and/or” unless otherwise stated. As used herein, the term “and/or” includes any and all combinations of one or more of the associated listed items.

[0037] Use of the term “including” as well as other forms, such as “includes” and “included,” is not limiting.

[0038] As used herein, the term “comprise” and its grammatical equivalents specifies the presence of stated features, integers, steps, operations, elements, and/or components, but does not preclude the presence or addition of one or more other features, integers, steps, operations, elements, components, and/or groups thereof.

[0039] As used herein, the term “about” in reference to a number or range of numbers, is understood to mean the stated number and numbers +/−10% thereof, or 10% below the lower listed limit and 10% above the higher listed limit for the values listed for a range.

[0040] The terms, “percent identity,” “% identity,” and % “identical,” grammatical equivalents thereof, as used herein refer to the extent to which two sequences (nucleotide or amino acid) have the same residue at the same positions in an alignment. For example, “an amino acid sequence is X % identical to SEQ ID NO: Y” can refer to % identity of the amino acid sequence to SEQ ID NO: Y and is elaborated as X % of residues that are identical between respective positions of two sequences when the two sequences are aligned for maximum sequence identity. The % identity is calculated by dividing the total number of the aligned residues by the number of the residues that are identical between the respective positions of the at least two sequences and multiplying by 100. Generally, computer programs can be employed for such calculations. Illustrative programs that compare and align pairs of sequences, include ALIGN (Myers and Miller, Comput Appl Biosci. 1988 March; 4(1):11-7), FASTA (Pearson and Lipman, Proc Natl Acad Sci USA. 1988 April; 85(8):2444-8; Pearson, Methods Enzymol. 1990; 183:63-98) and gapped BLAST (Altschul et al., Nucleic Acids Res. 1997 Sep. 1; 25(17):3389-40), BLASTP, BLASTN, or GCG (Devereux et al., Nucleic Acids Res. 1984 Jan. 11; 12(1 Pt 1):387-95).

[0041] The term, “amplification” and “amplifying,” as used herein refers to a process by which a nucleic acid molecule is enzymatically copied to generate a plurality of nucleic acid molecules containing the same sequence as the original nucleic acid molecule or a distinguishable portion thereof.

[0042] The term, “base editing enzyme,” as used herein refers to a protein, polypeptide or fragment thereof that is capable of catalyzing the chemical modification of a nucleobase of a deoxyribonucleotide or a ribonucleotide. Such a base editing enzyme, for example, is capable of catalyzing a reaction that modifies a nucleobase that is present in a nucleic acid molecule, such as DNA or RNA (single stranded or double stranded). Non-limiting examples of the type of modification that a base editing enzyme is capable of catalyzing includes converting an existing nucleobase to a different nucleobase, such as converting a cytosine to a guanine or thymine or converting an adenine to a guanine, hydrolytic deamination of an adenine or adenosine, or methylation of cytosine (e.g., CpG, CpA, CpT or CpC). A base editing enzyme itself may or may not bind to the nucleic acid molecule containing the nucleobase.

[0043] The term, “base editor,” as used herein, refers to a fusion protein comprising a base editing enzyme fused to or linked to an effector protein. The base editing enzyme may be referred to as a fusion partner. The base editing enzyme can differ from a naturally occurring base editing enzyme. It is understood that any reference to a base editing enzyme herein also refers to a base editing enzyme variant. The base editor is functional when the effector protein is coupled to a guide nucleic acid. The guide nucleic acid imparts sequence specific activity to the base editor. By way of non-limiting example, the effector protein may comprise a catalytically inactive effector protein (e.g., a catalytically inactive variant of an effector protein described herein). Also, by way of non-limiting example, the base editing enzyme may comprise deaminase activity. Additional base editors are described herein.

[0044] The term, “catalytically inactive effector protein,” as used herein, refers to an effector protein that is modified relative to a naturally-occurring effector protein to have a reduced or eliminated catalytic activity relative to that of the naturally-occurring effector protein, but retains its ability to interact with a guide nucleic acid. The catalytic activity that is reduced or eliminated is often a nuclease activity. The naturally-occurring effector protein may be a wildtype protein. In some instances, the catalytically inactive effector protein is referred to as a catalytically inactive variant of an effector protein, e.g., a Cas effector protein.

[0045] The term, “cis cleavage,” as used herein, refers to cleavage (hydrolysis of a phosphodiester bond) of a target nucleic acid by a complex of an effector protein and a guide nucleic acid (e.g., an RNP complex), wherein at least a portion of the guide nucleic acid is hybridized to at least a portion of the target nucleic acid. Cleavage may occur within or directly adjacent to the portion of the target nucleic acid that is hybridized to the portion of the guide nucleic acid.

[0046] The terms, “complementary” and “complementarity,” as used herein, in the context of a nucleic acid molecule or nucleotide sequence, refer to the characteristic of a polynucleotide having nucleotides that can undergo cumulative base pairing with their Watson-Crick counterparts (C with G; or A with T) in a reference nucleic acid in antiparallel orientation. For example, when every nucleotide in a polynucleotide or a specified portion thereof forms a base pair with every nucleotide in an equal length sequence of a reference nucleic acid, that polynucleotide is said to be 100% complementary to the sequence of the reference nucleic acid. In a double stranded DNA or RNA sequence, the upper (sense) strand sequence is, in general, understood as going in the direction from its 5′- to 3′-end, and the complementary sequence is thus understood as the sequence of the lower (antisense) strand in the same direction as the upper strand. Following the same logic, the reverse sequence is understood as the sequence of the upper strand in the direction from its 3′- to its 5′-end, while the “reverse complement” sequence or the “reverse complementary” sequence is understood as the sequence of the lower strand in the direction of its 5′- to its 3′-end. Each nucleotide in a double stranded DNA or RNA molecule that is paired with its Watson-Crick counterpart can be referred to as its complementary nucleotide. The complementarity of modified or artificial base pairs can be based on other types of hydrogen bonding and/or hydrophobicity of bases and/or shape complementarity between bases.

[0047] The term, “cleavage assay,” as used herein, refers to an assay designed to visualize, quantitate or identify cleavage of a nucleic acid. In some instances, the cleavage activity may be cis-cleavage activity. In some instances, the cleavage activity may be trans-cleavage activity.

[0048] The term, “clustered regularly interspaced short palindromic repeats (CRISPR),” as used herein, refers to a segment of DNA found in the genomes of certain prokaryotic organisms, including some bacteria and archaea, that includes repeated short sequences of nucleotides interspersed at regular intervals between unique sequences of nucleotides derived from the DNA of a pathogen (e.g., virus) that had previously infected the organism and that functions to protect the organism against future infections by the same pathogen.

[0049] The terms, “CRISPR RNA” and “crRNA,” as used herein, refer to a type of guide nucleic acid that is RNA comprising a first sequence, often referred to as a “spacer sequence,” that is capable of hybridizing to a target sequence of a target nucleic acid and a second sequence that is capable of interacting with an effector protein either directly (by being bound by an effector protein) or indirectly crRNA (e.g., by hybridization with a second nucleic acid molecule that can be bound by an effector).

[0050] The first sequence and the second sequence are directly connected to each other or by a linker.

[0051] The term, “detectable signal,” as used herein, refers to a signal that can be detected using optical, fluorescent, chemiluminescent, electrochemical or other detection methods known in the art.

[0052] The term, “donor nucleic acid,” as used herein, refers to a nucleic acid that is (designed or intended to be) incorporated into a target nucleic acid or target sequence.

[0053] The term, “effector protein,” as used herein, refers to a protein, polypeptide, or peptide that is capable of interacting with a nucleic acid, such as a guide nucleic acid, to form a complex that contacts a target nucleic acid, wherein at least a portion of the guide nucleic acid hybridizes to a target sequence of the target nucleic acid. In some embodiments, the complex comprises multiple effector proteins. In some embodiments, the effector protein modifies the target nucleic acid when the (e.g., a RNP complex contacts the target nucleic acid. In some embodiments, the effector protein does not modify the target nucleic acid, but it is fused to a fusion partner protein that modifies the target nucleic acid. A non-limiting example of modifying a target nucleic acid is cleaving (hydrolysis) of a phosphodiester bond. Additional examples of modifying target nucleic acids are described herein.

[0054] The term “functional domain,” as used herein, refers to a region of one or more amino acids in a protein that is required for an activity of the protein, or the full extent of that activity, as measured in an in vitro assay. Activities include, but are not limited to nucleic acid binding, nucleic acid editing, nucleic acid modifying, nucleic acid cleaving, protein binding. The absence of the functional domain, including mutations of the functional domain, would abolish or reduce activity.

[0055] The term “functional fragment,” as used herein, refers to a fragment of a protein that retains some function relative to the entire protein. Non-limiting examples of functions are nucleic acid binding, nucleic acid editing, protein binding, nuclease activity, nickase activity, deaminase activity, demethylase activity, or acetylation activity. A functional fragment may be a recognized functional domain, e.g., a catalytic domain such as, but not limited to, a RuvC domain.

[0056] The term, “fusion effector”, “fusion protein,” and “fusion polypeptide,” as used herein, refer to a protein comprising at least two heterologous polypeptides. The fusion protein may comprise one or more effector protein and fusion partner. In some instances, an effector protein and fusion partner are not found connected to one another as a native protein or complex that occurs together in nature.

[0057] As used herein, the terms “fusion partner protein” or “fusion partner,” refer to a protein, polypeptide or peptide that is fused, or linked by a linker, to one or more effector protein. The fusion partner can impart some function to the fusion protein that is not provided by the effector protein. The fusion partner may provide a detectable signal. The fusion partner may modify a target nucleic acid, including changing a nucleobase of the target nucleic acid and making a chemical modification to one or more nucleotides of the target nucleic acid. The fusion partner may be capable of modulating the expression of a target nucleic acid. The fusion partner may inhibit, reduce, activate or increase expression of a target nucleic acid via additional proteins or nucleic acid modifications to the target sequence.

[0058] The term, “guide nucleic acid,” as used herein, refers to a nucleic acid that, when in a complex with one or more polypeptides described herein (e.g., an RNP complex) can impart sequence selectivity to the complex when the complex interacts with a target nucleic acid. A guide nucleic acid may be referred to interchangeably as a guide RNA, however it is understood that guide nucleic acids may comprise deoxyribonucleotides (DNA), ribonucleotides (RNA), a combination thereof (e.g., RNA with a thymine base), biochemically or chemically modified nucleobases (e.g., one or more engineered modifications described herein), or combinations thereof.

[0059] The term, “heterologous,” as used herein, refers to at least two different polypeptide or nucleic acid sequences that are not found similarly connected to one another in a native nucleic acid or protein, respectively. In some embodiments, fusion proteins comprise an effector protein and a fusion partner protein, wherein the fusion partner protein is heterologous to an effector protein. These fusion proteins may be referred to as a “heterologous protein.” A protein that is heterologous to the effector protein is a protein that is not covalently linked by an amide bond to the effector protein in nature. In some instances, a heterologous protein is not encoded by a species that encodes the effector protein. In some embodiments, the heterologous protein exhibits an activity (e.g., enzymatic activity) when it is fused to the effector protein. In some embodiments, the heterologous protein exhibits increased or reduced activity (e.g., enzymatic activity) when it is fused to the effector protein, relative to when it is not fused to the effector protein. In some embodiments, the heterologous protein exhibits an activity (e.g., enzymatic activity) that it does not exhibit when it is fused to the effector protein. A guide nucleic acid may comprise “heterologous” sequences, e.g., a guide nucleic acid may comprise a first sequence and a second sequence, wherein the first sequence and the second sequence are not found covalently linked by a phosphodiester bond in nature. Thus, the first sequence is considered to be heterologous with the second sequence, and the guide nucleic acid may be referred to as a heterologous guide nucleic acid.

[0060] The term, “in vitro,” as used herein, refers to describing something outside an organism. An in vitro system, composition or method may take place in a container for holding laboratory reagents such that it is separated from the biological source from which a material in the container is obtained. In vitro assays can encompass cell-based assays in which living or dead cells are employed. In vitro assays can also encompass a cell-free assay in which no intact cells are employed. The term “in vivo” is used to describe an event that takes place within an organism. The term “ex vivo” is used to describe an event that takes place in a cell that has been obtained from an organism. An ex vivo assay is not performed on a subject. Rather, it is performed upon a sample separate from a subject.

[0061] The term, “linked amino acids” as used herein refers to at least two amino acids linked by an amide bond.

[0062] The term, “linker,” as used herein, refers to a covalent bond or molecule that links a first polypeptide to a second polypeptide (e.g., by an amide bond) or a first nucleic acid to a second nucleic acid (e.g., by a phosphodiester bond).

[0063] The term, “edited target nucleic acid,” as used herein, refers to a target nucleic acid, wherein the target nucleic acid has undergone an editing, for example, after contact with an effector protein. In some instances, the editing is an alteration in the sequence of the target nucleic acid. In some instances, the edited target nucleic acid comprises an insertion, deletion, or substitution of one or more nucleotides compared to the unedited target nucleic acid.

[0064] The terms, “mutation associated with a disease” and “mutation associated with a genetic disorder,” as used herein, refer to the co-occurrence of a mutation and the phenotype of a disease. The mutation may occur in a gene, wherein transcription or translation products from the gene occur at a significantly abnormal level or in an abnormal form in a cell or subject harboring the mutation as compared to a non-disease control subject not having the mutation.

[0065] The terms, “non-naturally occurring” and “engineered,” as used herein, refer to indicate involvement of the hand of man. The terms, when referring to a nucleic acid, nucleotide, protein, polypeptide, peptide or amino acid, refer to a molecule, such as but not limited to, a nucleic acid, nucleotide, protein, polypeptide, peptide or amino acid that is at least substantially free from at least one other feature with which it is naturally associated in nature and as found in nature, and/or contains or to a modification of that molecule (e.g., chemical modification, nucleotide sequence, or amino acid sequence) that is not present in the naturally occurring molecule. The terms, when referring to a composition or system described herein, refer to a composition or system having at least one component that is not naturally associated with the other components of the composition or system. By way of a non-limiting example, a composition may include an effector protein and a guide nucleic acid that do not naturally occur together. Conversely, and as a non-limiting further clarifying example, an effector protein or guide nucleic acid that is “natural,” “naturally-occurring,” or “found in nature” includes an effector protein and a guide nucleic acid from a cell or organism that have not been genetically modified by the hand of man.

[0066] The terms, “nuclease” and “endonuclease” as used herein, refer to an enzyme which possesses catalytic activity for nucleic acid cleavage.

[0067] The term, “nuclease activity,” as used herein, refers to catalytic activity that results in nucleic acid cleavage (e.g., ribonuclease activity (ribonucleic acid cleavage), or deoxyribonuclease activity (deoxyribonucleic acid cleavage), etc.).

[0068] The term, “nucleic acid expression vector,” as used herein, refers to a plasmid that can be used to express a nucleic acid of interest.

[0069] The term, “nuclear localization signal (NLS),” as used herein, refers to an entity (e.g., peptide) that facilitates localization of a nucleic acid, protein, or small molecule to the nucleus, when present in a cell that contains a nuclear compartment.

[0070] The term, “prime editing enzyme”, as used herein, refers to a protein, polypeptide, or fragment thereof that is capable of catalyzing the editing (insertion, deletion, or base-to-base conversion) of a target nucleotide or nucleotide sequence in a nucleic acid. A prime editing enzyme capable of catalyzing such a reaction includes a reverse transcriptase. A prime editing enzyme may require a prime editing guide RNA (pegRNA) to catalyze the modification. Such a pegRNA can be capable of identifying the nucleotide or nucleotide sequence in the target nucleic acid to be edited and encoding the new genetic information that replaces the targeted nucleotide or nucleotide sequence in the nucleic acid. A prime editing enzyme may require a prime editing guide RNA (pegRNA) and a single guide RNA to catalyze the modification.

[0071] The terms “protospacer adjacent motif” and “PAM,” as used herein, refer to a nucleotide sequence found in a target nucleic acid that directs an effector protein to edit the target nucleic acid at a specific location. In some instances, a PAM is required for a complex of an effector protein and a guide nucleic acid (e.g., an RNP complex) to hybridize to and edit the target nucleic acid. In some instances, the complex does not require a PAM to edit the target nucleic acid.

[0072] The term “recombinant,” as used herein, in the context of proteins, polypeptides, peptides and nucleic acids, refers to proteins, polypeptides, peptides and nucleic acids that are products of various combinations of cloning, restriction, and/or ligation steps resulting in a construct having a structural coding or non-coding sequence distinguishable from endogenous nucleic acids found in natural systems. Generally, DNA sequences encoding the structural coding sequence can be assembled from cDNA fragments and short oligonucleotide linkers, or from a series of synthetic oligonucleotides, to provide a synthetic nucleic acid which is capable of being expressed from a recombinant transcriptional unit contained in a cell or in a cell-free transcription and translation system. Such sequences can be provided in the form of an open reading frame uninterrupted by internal non translated sequences, or introns, which are typically present in eukaryotic genes. Genomic DNA comprising the relevant sequences can also be used in the formation of a recombinant gene or transcriptional unit. Sequences of non-translated DNA may be present 5′ or 3′ from the open reading frame, where such sequences do not interfere with manipulation or expression of the coding regions and may act to modulate production of a desired product by various mechanisms (see “DNA regulatory sequences”, below).

[0073] The term “recombinant” polynucleotide or “recombinant” nucleic acid refers to one which is not naturally occurring, e.g., is made by the artificial combination of two otherwise separated segments of sequence through human intervention. This artificial combination is often accomplished by either chemical synthesis means, or by the artificial manipulation of isolated segments of nucleic acids, e.g., by genetic engineering techniques. Such is usually done to replace a codon with a redundant codon encoding the same or a conservative amino acid, while typically introducing or removing a sequence recognition site. Alternatively, it is performed to join together nucleic acid segments of desired functions to generate a desired combination of functions. This artificial combination is often accomplished by either chemical synthesis means, or by the artificial manipulation of isolated segments of nucleic acids, e.g., by genetic engineering techniques. The term, “recombinant polypeptide,” refers to a polypeptide which is not naturally occurring, e.g., is made by the artificial combination of two otherwise separated segments of amino sequence through human intervention. Thus, e.g., a polypeptide that comprises a heterologous amino acid sequence is recombinant.

[0074] The terms, “reporter” and “reporter nucleic acid,” as used herein, refer to a non-target nucleic acid molecule that can provide a detectable signal upon cleavage by an effector protein. Examples of detectable signals and detectable moieties that generate detectable signals are provided herein.

[0075] The term, “sample,” as used herein, refers to something comprising a target nucleic acid. In some instances, the sample is a biological sample, such as a biological fluid or tissue sample. In some instances, the sample is an environmental sample. The sample may be a biological sample or environmental sample that is modified or manipulated. By way of non-limiting example, samples may be modified or manipulated with purification techniques, heat, nucleic acid amplification, salts and buffers.

[0076] The term, “subject,” as used herein can be a biological entity containing expressed genetic materials. The biological entity can be a plant, animal, or microorganism, including, for example, bacteria, viruses, fungi, and protozoa. The subject can be tissues, cells and their progeny of a biological entity obtained in vivo or cultured in vitro. The subject can be a mammal. The mammal can be a human. The subject may be diagnosed or suspected of being at high risk for a disease. In some embodiments, the subject is not necessarily diagnosed or suspected of being at high risk for the disease.

[0077] The term, “target nucleic acid,” as used herein, refers to a nucleic acid that is selected as the nucleic acid for editing, binding, hybridization or any other activity of or interaction with a nucleic acid, protein, polypeptide, or peptide described herein. A target nucleic acid may comprise RNA, DNA, or a combination thereof. A target nucleic acid may be single-stranded (e.g., single-stranded RNA or single-stranded DNA) or double-stranded (e.g., double-stranded DNA).

[0078] The term, “target sequence,” as used herein, in the context of a target nucleic acid, refers to a nucleotide sequence found within a target nucleic acid. Such a nucleotide sequence can, for example, hybridize to a respective length portion of a guide nucleic acid.

[0079] The term, “trans-activating RNA (tracrRNA)”, “transactivating RNA”, and “tracrRNA,” as used herein refers to a nucleic acid that comprises a first sequence that is capable of being non-covalently bound by an effector protein. TracrRNAs may comprise a second sequence that hybridizes to a portion of a crRNA, which may be referred to as a repeat hybridization sequence. In some embodiments, tracrRNAs are covalently linked to a crRNA.

[0080] The term, “transcriptional activator,” as used herein, refers to a polypeptide or a fragment thereof that can activate or increase transcription of a target nucleic acid molecule.

[0081] The term, “transcriptional repressor,” as used herein, refers to a polypeptide or a fragment thereof that is capable of arresting, preventing, or reducing transcription of a target nucleic acid.

[0082] The terms, “treatment” and “treating,” as used herein, refer to a pharmaceutical or other intervention regimen for obtaining beneficial or desired results in the recipient. Beneficial or desired results include but are not limited to a therapeutic benefit and/or a prophylactic benefit. A therapeutic benefit may refer to eradication or amelioration of symptoms or of an underlying disorder being treated. Also, a therapeutic benefit can be achieved with the eradication or amelioration of one or more of the physiological symptoms associated with the underlying disorder such that an improvement is observed in the subject, notwithstanding that the subject may still be afflicted with the underlying disorder. A prophylactic effect includes delaying, preventing, or eliminating the appearance of a disease or condition, delaying, or eliminating the onset of symptoms of a disease or condition, slowing, halting, or reversing the progression of a disease or condition, or any combination thereof. For prophylactic benefit, a subject at risk of developing a particular disease, or to a subject reporting one or more of the physiological symptoms of a disease may undergo treatment, even though a diagnosis of this disease may not have been made.

[0083] The term, “viral vector,” as used herein, refers to a nucleic acid to be delivered into a host cell by a recombinantly produced virus or viral particle. The nucleic acid may be single-stranded or double stranded, linear or circular, segmented or non-segmented. The nucleic acid may comprise DNA, RNA, or a combination thereof.

### III. Introduction

[0084] Disclosed herein are compositions, systems and methods comprising at least one of:
[0085] (a) a polypeptide or a nucleic acid encoding the polypeptide; and
[0086] (b) a guide nucleic acid or a nucleic acid encoding the guide nucleic acid.

[0087] Polypeptides described herein may bind and, optionally, cleave nucleic acids in a sequence-specific manner. The term “nucleic acid” refers to a polymer of nucleotides. A nucleic acid may comprise ribonucleotides, deoxyribonucleotides, combinations thereof, and modified versions of the same. A nucleic acid may be single-stranded or double-stranded, unless specified. Non-limiting examples of nucleic acids are double stranded DNA (dsDNA), single stranded (ssDNA), messenger RNA, genomic DNA, cDNA, DNA-RNA hybrids, and a polymer comprising purine and pyrimidine bases or other natural, chemically or biochemically modified, non-natural, or derivatized nucleotide bases. Accordingly, nucleic acids as described herein may comprise one or more mutations, one or more engineered modifications, or both. The terms “nucleotide(s)” and “nucleoside(s)” as used herein, in the context of a nucleic acid molecule having multiple residues, refer to describing the sugar and base of the residue contained in the nucleic acid molecule. Similarly, a skilled artisan could understand that linked nucleotides and/or linked nucleosides, as used in the context of a nucleic acid having multiple linked residues, are interchangeable and describe linked sugars and bases of residues contained in a nucleic acid molecule. When referring to a “nucleobase(s)”, or linked nucleobase, as used in the context of a nucleic acid molecule, it can be understood as describing the base of the residue contained in the nucleic acid molecule, for example, the base of a nucleotide, nucleosides, or linked nucleotides or linked nucleosides. A person of ordinary skill in the art when referring to nucleotides, nucleosides, and/or nucleobases would also understand the differences between RNA and DNA (generally the exchange of uridine for thymidine or vice versa) and the presence of nucleoside analogs, such as modified uridines, do not contribute to differences in identity or complementarity among polynucleotides as long as the relevant nucleotides (such as thymidine, uridine, or modified uridine) have the same complement (e.g., adenosine for all of thymidine, uridine, or modified uridine; another example is cytosine and 5-methylcytosine, both of which have guanosine or modified guanosine as a complement). Thus, for example, the sequence 5′-AXG where X is any modified uridine, such as pseudouridine, NI-methyl pseudouridine, or 5-methoxyuridine, is considered 100% identical to AUG in that both are perfectly complementary to the same sequence (5′-CAU).

[0088] The terms “polypeptide” and “protein” refer to a polymeric form of amino acids. A polypeptide may include coded and non-coded amino acids, chemically or biochemically modified or derivatized amino acids, and polypeptides having modified peptide backbones. Accordingly, polypeptides as described herein may comprise one or more mutations, one or more engineered modifications, or both. It is understood that when describing coding sequences of polypeptides described herein, said coding sequences do not necessarily require a codon encoding an N-terminal Methionine (M) or a Valine (V) as described for the effector proteins described herein. One skilled in the art would understand that a start codon could be replaced or substituted with a start codon that encodes for an amino acid residue sufficient for initiating translation in a host cell. In some embodiments, when a heterologous peptide, such as a fusion partner protein, protein tag or NLS, is located at the N terminus of the effector protein, a start codon for the heterologous peptide serves as a start codon for the effector protein as well. Thus, the natural start codon encoding an amino acid residue sufficient for initiating translation (e.g., Methionine (M) or a Valine (V)) of the effector protein may be removed or absent.

[0089] Polypeptides described herein may also cleave the target nucleic acid within a target sequence or at a position adjacent to the target sequence. In some embodiments, a polypeptide is activated when it binds a certain sequence of a nucleic acid described herein, allowing the polypeptide to cleave a region of a target nucleic acid that is near, but not adjacent to the target sequence. A polypeptide may be an effector protein, such as a CRISPR-associated (Cas) protein, which may bind a guide nucleic acid that imparts activity or sequence selectivity to the polypeptide.

[0090] The terms “cleave,” “cleaving,” and “cleavage” in the context of a nucleic acid molecule or nuclease activity of an effector protein, refer to the hydrolysis of a phosphodiester bond of a nucleic acid molecule that results in breakage of that bond. The result of this breakage can be a nick (hydrolysis of a single phosphodiester bond on one side of a double-stranded molecule), single strand break (hydrolysis of a single phosphodiester bond on a single-stranded molecule) or double strand break (hydrolysis of two phosphodiester bonds on both sides of a double-stranded molecule) depending upon whether the nucleic acid molecule is single-stranded (e.g., ssDNA or ssRNA) or double-stranded (e.g., dsDNA) and the type of nuclease activity being catalyzed by the effector protein . . .

[0091] In some embodiments, compositions, systems, and methods comprising effector proteins and guide nucleic acids comprise a first sequence, at least a portion of which interacts with a polypeptide. In some embodiments, the first sequence comprises a sequence that is similar or identical to a repeat sequence. The term “repeat sequence” refers to a sequence of nucleotides in a guide nucleic acid that is capable of, at least partially, interacting with an effector protein. In some embodiments, compositions, systems, and methods comprising effector proteins and guide nucleic acids comprise a second sequence that is at least partially complementary to a target nucleic acid, and which may be referred to as a spacer sequence. “Spacer sequence,” as used herein, refers to a nucleotide sequence in a guide nucleic acid that is capable of, at least partially, hybridizing to an equal length portion of a sequence (e.g., a target sequence) of a target nucleic acid.

[0092] Effector proteins disclosed herein may cleave nucleic acids, including single stranded RNA (ssRNA), double stranded DNA (dsDNA), and single-stranded DNA (ssDNA). Polypeptides disclosed herein may provide cis cleavage activity, nickase activity, nuclease activity, or a combination thereof. In some embodiments, the present disclosure provides a viral vector comprising a nucleic acid encoding an effector protein. Non-limiting examples of viral vectors include retroviral vectors (e.g., lentiviruses and γ-retroviruses), adenoviruses, arenaviruses, alphaviruses, adeno-associated viruses (AAVs), baculoviruses, vaccinia viruses, herpes simplex viruses and poxviruses. A viral vector may be replication competent, replication deficient or replication defective.

[0093] The compositions, systems and methods described herein are non-naturally occurring. In some embodiments, compositions, systems and methods comprise an engineered guide nucleic acid (also referred to herein as a guide nucleic acid) or a use thereof. In some embodiments, compositions, systems and methods comprise an engineered protein or a use thereof. In some embodiments, compositions, systems and methods comprise an isolated polypeptide or a use thereof. In general, compositions, methods and systems described herein are not found in nature. In some embodiments, compositions, methods and systems described herein comprise at least one non-naturally occurring component. For example, disclosed compositions, methods and systems may comprise a guide nucleic acid, wherein the sequence of the guide nucleic acid is different or modified from that of a naturally-occurring guide nucleic acid.

[0094] In some embodiments, compositions, systems, and methods comprise at least two components that do not naturally occur together. For example, disclosed compositions, systems and methods may comprise a guide nucleic acid comprising a first region, at least a portion of which, interacts with a polypeptide (e.g., a repeat sequence), and a second region that is at least partially complementary to a target nucleic acid (e.g., a spacer sequence), wherein the first region and second region do not naturally occur together. Also, by way of non-limiting example, disclosed compositions, systems, and methods may comprise a guide nucleic acid and an effector protein that do not naturally occur together. Likewise, by way of non-limiting example, disclosed compositions, systems, and methods may comprise a ribonucleotide-protein (RNP) complex comprising an effector protein and a guide nucleic acid that do not occur together in nature. Conversely, and for clarity, an effector protein or guide nucleic acid that is “natural,” “naturally-occurring,” or “found in nature” includes effector proteins and guide nucleic acids from cells or organisms that have not been genetically modified by a human or machine.

[0095] The terms, “ribonucleotide protein complex” and “RNP” as used herein, refer to a complex of one or more nucleic acids and one or more polypeptides described herein. While the term utilizes “ribonucleotides” it is understood that the one or more nucleic acid may comprise deoxyribonucleotides (DNA), ribonucleotides (RNA), a combination thereof (e.g., RNA with a thymine base), biochemically or chemically modified nucleobases (e.g., one or more engineered modifications described herein), or combinations thereof.

[0096] The terms, “% complementary”, “% complementarity”, “percent complementary”, “percent complementarity” and grammatical equivalents thereof in the context of two or more nucleic acid molecules, refer to the percent of nucleotides in two nucleotide sequences in said nucleic acid molecules of equal length that can undergo cumulative base pairing at two or more individual corresponding positions in an antiparallel orientation. Accordingly, the terms include nucleic acid sequences that are not completely complementary over their entire length, which indicates that the two or more nucleic acid molecules include one or more mismatches. A “mismatch” is present at any position in the two opposed nucleotides that are not complementary. The % complementary is calculated by dividing the total number of the complementary residues by the total number of the nucleotides in one of the equal length sequences, and multiplying by 100. Complete or total complementarity describes nucleotide sequences in 100% of the residues of a nucleotide sequence are complementary to residues in a reference nucleotide sequence. “Partially complementarity” describes nucleotide sequences in which at least 20%, but less than 100%, of the residues of a nucleotide sequence are complementary to residues in a reference nucleotide sequence. In some instances, at least 50%, but less than 100%, of the residues of a nucleotide sequence are complementary to residues in a reference nucleotide sequence. In some instances, at least 70%, 80%, 90% or 95%, but less than 100%, of the residues of a nucleotide sequence are complementary to residues in a reference nucleotide sequence. “Noncomplementary” describes nucleotide sequences in which less than 20% of the residues of a nucleotide sequence are complementary to residues in a reference nucleotide sequence.

[0097] In some embodiments, the guide nucleic acid comprises a non-natural nucleotide sequence. In some embodiments, the non-natural nucleotide sequence is a nucleotide sequence that is not found in nature. The non-natural nucleotide sequence may comprise a portion of a naturally-occurring sequence, wherein the portion of the naturally-occurring sequence is not present in nature absent the remainder of the naturally-occurring sequence. In some embodiments, the guide nucleic acid comprises two naturally-occurring sequences arranged in an order or proximity that is not observed in nature. In some embodiments, compositions and systems comprise a ribonucleotide complex comprising an effector protein and a guide nucleic acid that do not occur together in nature. Guide nucleic acids may comprise a first sequence and a second sequence that do not occur naturally together. For example, a guide nucleic acid may comprise a naturally-occurring repeat sequence and a spacer sequence that is complementary to a naturally-occurring eukaryotic sequence. The guide nucleic acid may comprise a repeat sequence that occurs naturally in an organism and a spacer sequence that does not occur naturally in that organism. A guide nucleic acid may comprise a first sequence that occurs in a first organism and a second sequence that occurs in a second organism, wherein the first organism and the second organism are different. The guide nucleic acid may comprise a third sequence disposed at a 3′ or 5′ end of the guide nucleic acid, or between the first and second sequences of the guide nucleic acid. In some embodiments, the guide nucleic acid comprises two heterologous sequences arranged in an order or proximity that is not observed in nature. Therefore, compositions and systems described herein are not naturally occurring.

[0098] In some embodiments, compositions, systems, and methods described herein comprise an effector protein that is similar to a naturally occurring effector protein. The effector protein may lack a portion of the naturally occurring effector protein. The effector protein may comprise a mutation relative to the naturally-occurring effector protein, wherein the mutation is not found in nature. The term “mutation” refers to an alteration that changes an amino acid residue or a nucleotide as described herein. Such an alteration can include, for example, deletions, insertions, and/or substitutions. The mutation can refer to a change in structure of an amino acid residue or nucleotide relative to the starting or reference residue or nucleotide. A mutation of an amino acid residue includes, for example, deletions, insertions and substituting one amino acid residue for a structurally different amino acid residue. Such substitutions can be a conservative substitution, a non-conservative substitution, a substitution to a specific sub-class of amino acids, or a combination thereof as described herein. A mutation of a nucleotide includes, for example, changing one naturally occurring base for a different naturally occurring base, such as changing an adenine to a thymine or a guanine to a cytosine or an adenine to a cytosine or a guanine to a thymine. A mutation of a nucleotide base may result in a structural and/or functional alteration of the encoding peptide, polypeptide or protein by changing the encoded amino acid residue of the peptide, polypeptide or protein. A mutation of a nucleotide base may not result in an alteration of the amino acid sequence or function of encoded peptide, polypeptide or protein, also known as a silent mutation. Methods of mutating an amino acid residue or a nucleotide are well known.

[0099] The effector protein may also comprise at least one additional amino acid relative to the naturally-occurring effector protein. In some embodiments, the effector protein may comprise a heterologous polypeptide. For example, the effector protein may comprise an addition of a nuclear localization signal relative to the natural occurring effector protein. In some embodiments, a nucleotide sequence encoding the effector protein is codon optimized (e.g., for expression in a eukaryotic cell) relative to the naturally occurring sequence.

[0100] The term “codon optimized” refers to a mutation of a nucleotide sequence encoding a polypeptide, such as a nucleotide sequence encoding an effector protein, to mimic the codon preferences of the intended host organism or cell while encoding the same polypeptide. Thus, the codons can be changed, but the encoded polypeptide remains unchanged. For example, if the intended target cell was a human cell, a human codon-optimized nucleotide sequence encoding an effector protein could be used. As another non-limiting example, if the intended host cell were a mouse cell, then a mouse codon-optimized nucleotide sequence encoding an effector protein could be generated. As another non-limiting example, if the intended host cell were a eukaryotic cell, then a eukaryote codon-optimized nucleotide sequence encoding an effector protein could be generated. As another non-limiting example, if the intended host cell were a prokaryotic cell, then a prokaryote codon-optimized nucleotide sequence encoding an effector protein could be generated. Codon usage tables are readily available, for example, at the “Codon Usage Database” available at www.kazusa.or.jp/codon.

### IV. Polypeptide Systems

### Effector Proteins

[0101] Provided herein are compositions, systems, and methods comprising one or more effector proteins or a use thereof. In some embodiments, provided herein are compositions that comprise a nucleic acid, wherein the nucleic acid encodes any of one the effector proteins described herein. The nucleic acid may be a nucleic acid expression vector. By way of non-limiting example, the nucleic acid expression vector may be a viral vector, such as an AAV vector. In general, effector proteins disclosed herein are CRISPR-associated (“Cas”) proteins.

[0102] An effector protein provided herein interacts with a guide nucleic acid to form a complex. In some embodiments, the complex interacts with a target nucleic acid. In some embodiments, an interaction between the complex and a target nucleic acid comprises one or more of: recognition of a protospacer adjacent motif (PAM) sequence within the target nucleic acid by the effector protein, hybridization of the guide nucleic acid to the target nucleic acid, modification of the target nucleic acid by the effector protein, or combinations thereof. In some embodiments, recognition of a PAM sequence within a target nucleic acid may direct the modification activity of an effector protein.

[0103] The terms, “hybridize,” “hybridizable” and grammatical equivalents thereof, refer to a nucleotide sequence that is able to noncovalently interact, i.e. form Watson-Crick base pairs and/or G/U base pairs, or anneal, to another nucleotide sequence in a sequence-specific, antiparallel, manner (i.e., a nucleotide sequence specifically interacts to a complementary nucleotide sequence) under the appropriate in vitro and/or in vivo conditions of temperature and solution ionic strength. Standard Watson-Crick base-pairing includes: adenine (A) pairing with thymidine (T), adenine (A) pairing with uracil (U), and guanine (G) pairing with cytosine (C) for both DNA and RNA. In addition, for hybridization between two RNA molecules (e.g., dsRNA), and for hybridization of a DNA molecule with an RNA molecule (e.g., when a DNA target nucleic acid base pairs with a guide RNA, etc.): guanine (G) can also base pair with uracil (U). For example, G/U base-pairing is at least partially responsible for the degeneracy (i.e., redundancy) of the genetic code in the context of tRNA anti-codon base-pairing with codons in mRNA. Thus, a guanine (G) can be considered complementary to both an uracil (U) and to an adenine (A). Accordingly, when a G/U base-pair can be made at a given nucleotide position, the position is not considered to be non-complementary, but is instead considered to be complementary. While hybridization typically occurs between two nucleotide sequences that are complementary, mismatches between bases are possible. It is understood that two nucleotide sequences need not be 100% complementary to be specifically hybridizable, hybridizable, partially hybridizable, or for hybridization to occur. Moreover, a nucleotide sequence may hybridize over one or more segments such that intervening or adjacent segments are not involved in the hybridization event (e.g., a bulge, a loop structure or hairpin structure, etc.). The conditions appropriate for hybridization between two nucleotide sequences depend on the length of the sequence and the degree of complementarity, variables which are well known in the art. For hybridizations between nucleic acids with short stretches of complementarity (e.g. complementarity over 35 or less, 30 or less, 25 or less, 22 or less, 20 or less, or 18 or less nucleotides) the position of mismatches may become important (see Sambrook et al., supra, 11.7-11.8). Typically, the length for a hybridizable nucleic acid is 8 nucleotides or more (e.g., 10 nucleotides or more, 12 nucleotides or more, 15 nucleotides or more, 20 nucleotides or more, 22 nucleotides or more, 25 nucleotides or more, or 30 nucleotides or more). Any suitable in vitro assay may be utilized to assess whether two sequences “hybridize”. One such assay is a melting point analysis where the greater the degree of complementarity between two nucleotide sequences, the greater the value of the melting temperature (Tm) for hybrids of nucleic acids having those sequences. The conditions of temperature and ionic strength determine the “stringency” of the hybridization. Temperature, wash solution salt concentration, and other conditions may be adjusted as necessary according to factors such as length of the region of complementation and the degree of complementation. Hybridization and washing conditions are well known and exemplified in Sambrook, J., Fritsch, E. F. and Maniatis, T. Molecular Cloning: A Laboratory Manual, Second Edition, Cold Spring Harbor Laboratory Press, Cold Spring Harbor (1989), particularly Chapter 11 and Table 11.1 therein; and Sambrook, J. and Russell, W., Molecular Cloning: A Laboratory Manual, Third Edition, Cold Spring Harbor Laboratory Press, Cold Spring Harbor (2001).

[0104] Modification activity of an effector protein or an engineered protein described herein may be cleavage activity, binding activity, insertion activity, substitution activity, and the like. Modification activity of an effector protein may result in: cleavage of at least one strand of a target nucleic acid, deletion of one or more nucleotides of a target nucleic acid, insertion of one or more nucleotides into a target nucleic acid, substitution of one or more nucleotides of a target nucleic acid with an alternative nucleotide, more than one of the foregoing, or any combination thereof. In some embodiments, an ability of an effector protein to edit a target nucleic acid may depend upon the effector protein being complexed with a guide nucleic acid, the guide nucleic acid being hybridized to a target sequence of the target nucleic acid, the distance between the target sequence and a PAM sequence, or combinations thereof. A target nucleic acid comprises a target strand and a non-target strand. Accordingly, in some embodiments, the effector protein may edit a target strand and/or a non-target strand of a target nucleic acid.

[0105] The terms, “bind,” “binding,” “interact” and “interacting,” refer to a non-covalent interaction between macromolecules (e.g., between two polypeptides, between a polypeptide and a nucleic acid; between a polypeptide/guide nucleic acid complex and a target nucleic acid; and the like). While in a state of noncovalent interaction, the macromolecules are said to be “associated” or “interacting” or “binding” (e.g., when a molecule X is said to interact with a molecule Y, it is meant the molecule X binds to molecule Y in a non-covalent manner). Non-limiting examples of non-covalent interactions are ionic bonds, hydrogen bonds, van der Waals and hydrophobic interactions. Not all components of a binding interaction need be sequence-specific (e.g., contacts with phosphate residues in a DNA backbone), but some portions of a binding interaction may be sequence-specific.

[0106] The modification of the target nucleic acid generated by an effector protein may, as a non-limiting example, result in modulation of the expression of the target nucleic acid (e.g., increasing or decreasing expression of the nucleic acid) or modulation of the activity of a translation product of the target nucleic acid (e.g., inactivation of a protein binding to an RNA molecule or hybridization). Accordingly, in some embodiments, provided herein are methods of editing a target nucleic acid using an effector protein of the present disclosure, or compositions or systems thereof. Also provided herein are methods of modulating expression of a target nucleic acid using an effector protein of the present disclosure, or compositions or systems thereof. Further provided herein are methods of modulating the activity of a translation product of a target nucleic acid using an effector protein of the present disclosure, or compositions or systems thereof.

[0107] In some embodiments, effector proteins disclosed herein may provide cleavage activity, such as cis cleavage activity, nickase activity, nuclease activity, or a combination thereof. In general, effector proteins described herein edit a target nucleic acid by cis cleavage activity on the target nucleic acid. Effector proteins disclosed herein may cleave nucleic acids, including single stranded RNA (ssRNA), double stranded DNA (dsDNA), and single-stranded DNA (ssDNA). An effector protein may be a modified effector protein having increased modification activity and/or increased substrate binding activity (e.g., substrate selectivity, specificity, and/or affinity). Alternatively, or in addition, an effector protein may be a catalytically inactive effector protein having reduced modification activity or no modification activity. An effector protein may recognize a protospacer adjacent motif (PAM) sequence present in the target nucleic acid, which may direct the modification activity of the effector protein. The term “nickase” refers to an enzyme that possess catalytic activity for single stranded nucleic acid cleavage of a double stranded nucleic acid. The term, “nickase activity” refers to catalytic activity that results in single stranded nucleic acid cleavage of a double stranded nucleic acid.

[0108] An effector protein may be a CRISPR-associated (“Cas”) protein. An effector protein may function as a single protein, including a single protein that is capable of binding to a guide nucleic acid and editing a target nucleic acid. Alternatively, an effector protein may function as part of a multiprotein complex, including, for example, a complex having two or more effector proteins, including two or more of the same effector proteins (e.g., dimer or multimer). An effector protein, when functioning in a multiprotein complex, may have only one functional activity (e.g., binding to a guide nucleic acid), while other effector proteins present in the multiprotein complex are capable of the other functional activity (e.g., modifying a target nucleic acid). The first and second effector proteins may be the same. The first and second effector proteins may be different. The sequences of the first and second effector proteins may be 15% to 20% identical, 20% to 25% identical, 25% to 30% identical, 30% to 35% identical, 35% to 40% identical, 40% to 45% identical, 45% to 50% identical, 50% to 55% identical, 55% to 60% identical, 60% to 65% identical, 65% to 70% identical, 70% to 75% identical, 75% to 80% identical, 80% to 85% identical, 85% to 90% identical, 90% to 95% identical, 95% to 99.9% identical, or 100% identical. An effector protein, when functioning in a multiprotein complex, may have differing and/or complementary functional activity to other effector proteins in the multiprotein complex. Multimeric complexes, and functions thereof, are described in further detail below.

[0109] Effector proteins may be a modified effector protein having reduced modification activity (e.g., a catalytically defective effector protein). Effector proteins may be a modified effector protein having no modification activity (e.g., a catalytically inactive effector protein). In some embodiments, the effector protein may have a mutation in a nuclease domain. In some embodiments, the nuclease domain is a RuvC domain. In some embodiments, the nuclease domain is an HNH domain. An HNH domain may be characterized as comprising two antiparallel β-strands connected with a loop of varying length, and flanked by an α-helix, with a metal (divalent cation) binding site between the two β-strands. A RuvC domain may be characterized by a six-stranded beta sheet surrounded by four alpha helices, with three conserved subdomains contributing catalytic to the activity of the RuvC domain.

[0110] The terms, “RuvC” and “RuvC domain,” as used herein, refer to a region of an effector protein that is capable of cleaving a target nucleic acid, and in certain instances, of processing a pre-crRNA. In some instances, the RuvC domain is located near the C-terminus of the effector protein. A single RuvC domain may comprise RuvC subdomains, for example a RuvCI subdomain, a RuvCII subdomain and a RuvCIII subdomain. The term “RuvC” domain can also refer to a “RuvC-like” domain. Various RuvC-like domains are known in the art and are easily identified using online tools such as InterPro (https://www.ebi.ac.uk/interpro/). For example, a RuvC-like domain may be a domain which shares homology with a region of TnpB proteins of the IS605 and other related families of transposons.

[0111] An effector protein may be brought into proximity of a target nucleic acid in the presence of a guide nucleic acid when the guide nucleic acid includes a nucleotide sequence that is complementary with a target sequence in the target nucleic acid. The ability of an effector protein to modify a target nucleic acid may be dependent upon the effector protein being bound to a guide nucleic acid and the guide nucleic acid being hybridized to a target nucleic acid. An effector protein may recognize a protospacer adjacent motif (PAM) sequence present in the target nucleic acid, which may direct the modification activity of the effector protein.

[0112] In some instances, effector proteins comprise an amino acid sequence selected from any one of SEQ ID NOS: 1-10,484 or 15,022-24,165. In some instances, effector proteins consist essentially of an amino acid sequence selected from any one of SEQ ID NOS: 1-10,484 or 15,022-24,165. In some instances, effector proteins consist of an amino acid sequence selected from any one of SEQ ID NOS: 1-10,484 or 15,022-24,165. In some instances, effector proteins comprise an amino acid sequence that is at least 65%, identical to a sequence selected from any one of SEQ ID NOS: 1-10,484 or 15,022-24,165. In some instances, effector proteins consist of an amino acid sequence that is at least 65% identical to a sequence selected from any one of SEQ ID NOS: 1-10,484 or 15,022-24,165. In some instances, effector proteins comprise an amino acid sequence that is at least 70%, identical to a sequence selected from any one of SEQ ID NOS: 1-10,484 or 15,022-24,165. In some instances, effector proteins consist of an amino acid sequence that is at least 70% identical to a sequence selected from any one of SEQ ID NOS: 1-10,484 or 15,022-24,165. In some instances, effector proteins comprise an amino acid sequence that is at least 75%, identical to a sequence selected from any one of SEQ ID NOS: 1-10,484 or 15,022-24,165. In some instances, effector proteins consist of an amino acid sequence that is at least 75% identical to a sequence selected from any one of SEQ ID NOS: 1-10,484 or 15,022-24,165. In some instances, effector proteins comprise an amino acid sequence that is at least 80%, identical to a sequence selected from any one of SEQ ID NOS: 1-10,484 or 15,022-24,165. In some instances, effector proteins consist of an amino acid sequence that is at least 80% identical to a sequence selected from any one of SEQ ID NOS: 1-10,484 or 15,022-24,165. In some instances, effector proteins comprise an amino acid sequence that is at least 85%, identical to a sequence selected from any one of SEQ ID NOS: 1-10,484 or 15,022-24,165. In some instances, effector proteins consist of an amino acid sequence that is at least 85% identical to a sequence selected from any one of SEQ ID NOS: 1-10,484 or 15,022-24,165. In some instances, effector proteins comprise an amino acid sequence that is at least 90%, identical to a sequence selected from any one of SEQ ID NOS: 1-10,484 or 15,022-24,165. In some instances, effector proteins consist of an amino acid sequence that is at least 90% identical to a sequence selected from any one of SEQ ID NOS: 1-10,484 or 15,022-24,165. In some instances, effector proteins comprise an amino acid sequence that is at least 95%, identical to a sequence selected from any one of SEQ ID NOS: 1-10,484 or 15,022-24,165. In some instances, effector proteins consist of an amino acid sequence that is at least 95% identical to a sequence selected from any one of SEQ ID NOS: 1-10,484 or 15,022-24,165. In some instances, effector proteins comprise an amino acid sequence that is at least 97%, identical to a sequence selected from any one of SEQ ID NOS: 1-10,484 or 15,022-24,165. In some instances, effector proteins consist of an amino acid sequence that is at least 97% identical to a sequence selected from any one of SEQ ID NOS: 1-10,484 or 15,022-24,165. In some instances, effector proteins comprise an amino acid sequence that is at least 98%, identical to a sequence selected from any one of SEQ ID NOS: 1-10,484 or 15,022-24,165. In some instances, effector proteins consist of an amino acid sequence that is at least 98% identical to a sequence selected from any one of SEQ ID NOS: 1-10,484 or 15,022-24,165. In some instances, effector proteins comprise an amino acid sequence that is at least 99%, identical to a sequence selected from any one of SEQ ID NOS: 1-10,484 or 15,022-24,165. In some instances, effector proteins consist of an amino acid sequence that is at least 99% identical to a sequence selected from any one of SEQ ID NOS: 1-10,484 or 15,022-24,165. In some instances, effector proteins comprise an amino acid sequence that is 100%, identical to a sequence selected from any one of SEQ ID NOS: 1-10,484 or 15,022-24,165. In some instances, effector proteins consist of an amino acid sequence that is 100% identical to a sequence selected from any one of SEQ ID NOS: 1-10,484 or 15,022-24,165.

[0113] TABLE 1 provides illustrative amino acid sequences of effector proteins that are useful in the compositions, systems and methods described herein.

[0114] In some embodiments, compositions, systems and methods described herein comprise an effector protein, or a nucleic acid encoding the effector protein, wherein the amino acid sequence of the effector protein comprises at least about 200 contiguous amino acids or more of any one of the sequences recited in TABLE 1. In some embodiments, the amino acid sequence of an effector protein provided herein comprises at least about 100, at least about 120, at least about 140, at least about 160, at least about 180, at least about 200, at least about 220, at least about 240, at least about 260, at least about 280, at least about 300, at least about 320, at least about 340, at least about 360, at least about 380, at least about 400 contiguous amino acids, at least about 420, at least about 440, at least about 460, at least about 480, at least about 500, at least about 520, at least about 540, at least about 560, at least about 580, at least about 600, at least about 620, at least about 640, at least about 660, at least about 680, at least about 700, at least about 720, at least about 740, at least about 760, at least about 780, at least about 800, at least about 820, at least about 840, at least about 860, at least about 880, at least about 900, at least about 920, at least about 940, at least about 960, at least about 980, at least about 1000, at least about 1020, at least about 1040, at least about 1060, at least about 1080, at least about 1100, at least about 1120, at least about 1140, at least about 1160, at least about 1180, or at least about 1200 contiguous amino acids of a sequence selected from any one of SEQ ID NOS: 1-10,484 or 15,022-24,165. In some instances, effector proteins comprise less than about 1900, less than about 1850, less than about 1800, less than about 1750, less than about 1700, or less than about 1650 contiguous amino acids of a sequence selected from any one of SEQ ID NOS: 1-10,484 or 15,022-24,165.

[0115] In some instances, effector proteins comprise about 100, about 120, about 140, about 160, about 180, about 200, about 220, about 240, about 260, about 280, about 300, about 320, about 340, about 360, about 380, about 400, about 420, about 440, about 460, about 480, about 500, about 520, about 540, about 560, about 580, about 600, about 620, about 640, about 660, about 680, about 700, about 720, about 740, about 760, about 780, about 800, about 820, about 840, about 860, about 880, about 900, about 920, about 940, about 960, about 980, about 1000, about 1020, about 1040, about 1060, about 1080, about 1100, about 1120, about 1140, about 1160, about 1180, about 1200, about 1220, about 1240, about 1260, about 1280, about 1300, about 1320, about 1340, about 1360, about 1380, or about 1400 contiguous amino acids of a sequence selected from any one of SEQ ID NOS: 1-10,484 or 15,022-24,165.

[0116] In some instances, compositions comprise an engineered guide nucleic acid (also referred to simply as a guide nucleic acid), wherein the guide nucleic acid comprises a nucleobase sequence selected from any one of SEQ ID NOS: 10,485-15,015 or 24,166-31,319. In some instances, guide nucleic acids comprise a sequence that is complementary to a nucleobase sequence selected from any one of SEQ ID NOS: 10,485-15,015 or 24,166-31,319. In some instances, guide nucleic acids comprise a sequence that is reverse complementary to a nucleobase sequence selected from any one of SEQ ID NOS: 10,485-15,015 or 24,166-31,319. In some instances, guide nucleic acids comprise a sequence that is at least 65% identical to a nucleobase sequence selected from any one of SEQ ID NOS: 10,485-15,015 or 24,166-31,319, the complement thereof, or the reverse complement thereof. In some instances, guide nucleic acids comprise a sequence that is at least 70% identical to a nucleobase sequence selected from any one of SEQ ID NOS: 10,485-15,015 or 24,166-31,319, the complement thereof, or the reverse complement thereof. In some instances, guide nucleic acids comprise a sequence that is at least 75% identical to a nucleobase sequence selected from any one of SEQ ID NOS: 10,485-15,015 or 24,166-31,319, the complement thereof, or the reverse complement thereof. In some instances, guide nucleic acids comprise a sequence that is at least 80% identical to a nucleobase sequence selected from any one of SEQ ID NOS: 10,485-15,015 or 24,166-31,319, the complement thereof, or the reverse complement thereof. In some instances, guide nucleic acids comprise a sequence that is at least 85% identical to a nucleobase sequence selected from any one of SEQ ID NOS: 10,485-15,015 or 24,166-31,319, the complement thereof, or the reverse complement thereof. In some instances, guide nucleic acids comprise a sequence that is at least 90% identical to a nucleobase sequence selected from any one of SEQ ID NOS: 10,485-15,015 or 24,166-31,319, the complement thereof, or the reverse complement thereof. In some instances, guide nucleic acids comprise a sequence that is 100% identical to a nucleobase sequence selected from any one of SEQ ID NOS: 10,485-15,015 or 24,166-31,319, the complement thereof, or the reverse complement thereof.

[0117] In some instances, guide nucleic acids comprise at least 10, at least 11, at least 12, at least 13, at least 14, at least 15, at least 16, at least 17, at least 18, at least 19, at least 20, at least 21, at least 22, at least 23, at least 24, at least 25, at least 26, at least 27, at least 28, at least 29, at least 30, at least 31, at least 32, at least 33, at least 34, at least 35, at least 36, at least 37, at least 38, at least 39 or at least 40 contiguous nucleotides of a nucleobase sequence selected from any one of SEQ ID NOS: 10,485-15,015 or 24,166-31,319, the complement thereof, or the reverse complement thereof. In some instances, guide nucleic acids contain less than 32, less than 34, less than 36, less than 37, less than 38, less than 39, less than 40, less than 41, less than 42, less than 43, less than 44, or less than 45 contiguous nucleotides of any one of the nucleobase sequences selected from any one of SEQ ID NOS: 10,485-15,015 or 24,166-31,319, the complement thereof, or the reverse complement thereof. In some instances, guide nucleic acids comprise 10, 11, 12, 13, 14, 15, 16, 17, 18, 19, 20, 21, 22, 23, 24, 25, 26, 27, 28, 29, 30, 31, 32, 33, 34, 35, 36, 37, 38, 39 or 40 contiguous nucleotides of any one of the nucleobase sequences selected from any one of SEQ ID NOS: 10,485-15,015 or 24, 166-31,319, the complement thereof, or the reverse complement thereof.

[0118] In some instances, compositions comprise an effector protein or a fusion protein thereof, and a guide nucleic acid, wherein the amino acid sequence of the effector protein is at least 50%, at least 55%, at least 60%, at least 65%, at least 70%, at least 75%, at least 80%, at least 85%, at least 90%, at least 95%, at least 97%, at least 98%, at least 99% or 100% identical to a sequence selected from Column A1 of TABLE 1, and wherein at least a portion of the guide nucleic acid comprises a nucleobase sequence that is at least 50%, at least 55%, at least 60%, at least 65%, at least 70%, at least 75%, at least 80%, at least 85%, at least 90%, at least 95%, or 100% identical or at least 50%, at least 55%, at least 60%, at least 65%, at least 70%, at least 75%, at least 80%, at least 85%, at least 90%, at least 95%, or 100% reverse complementary to a sequence selected from Column B1 of TABLE 1, wherein the sequence from Column A1 and the sequence from Column B1 are in the same row of TABLE 1.

[0119] In some instances, compositions comprise an effector protein or a fusion protein thereof, and a guide nucleic acid, wherein the amino acid sequence of the effector protein is at least 50%, at least 55%, at least 60%, at least 65%, at least 70%, at least 75%, at least 80%, at least 85%, at least 90%, at least 95%, at least 97%, at least 98%, at least 99% or 100% identical to a sequence selected from Column A2 of TABLE 1, and wherein at least a portion of the guide nucleic acid comprises a nucleobase sequence that is at least 50%, at least 55%, at least 60%, at least 65%, at least 70%, at least 75%, at least 80%, at least 85%, at least 90%, at least 95%, or 100% identical or at least 50%, at least 55%, at least 60%, at least 65%, at least 70%, at least 75%, at least 80%, at least 85%, at least 90%, at least 95%, or 100% reverse complementary to a sequence selected from Column B2 of TABLE 1, wherein the sequence from Column A2 and the sequence from Column B2 are in the same row of TABLE 1.

[0120] In some instances, compositions comprise an effector protein or a fusion protein thereof, and a guide nucleic acid, wherein the amino acid sequence of the effector protein is at least 50%, at least 55%, at least 60%, at least 65%, at least 70%, at least 75%, at least 80%, at least 85%, at least 90%, at least 95%, at least 97%, at least 98%, at least 99% or 100% identical to a sequence selected from Column A3 of TABLE 1, and wherein at least a portion of the guide nucleic acid comprises a nucleobase sequence that is at least 50%, at least 55%, at least 60%, at least 65%, at least 70%, at least 75%, at least 80%, at least 85%, at least 90%, at least 95%, or 100% identical or at least 50%, at least 55%, at least 60%, at least 65%, at least 70%, at least 75%, at least 80%, at least 85%, at least 90%, at least 95%, or 100% reverse complementary to a sequence selected from Column B3 of TABLE 1, wherein the sequence from Column A3 and the sequence from Column B3 are in the same row of TABLE 1.

[0121] In some instances, compositions comprise an effector protein or a fusion protein thereof, and a guide nucleic acid, wherein the amino acid sequence of the effector protein is at least about 50% identical to a sequence selected from Column A1 of TABLE 1, and wherein at least a portion of the guide nucleic acid comprises a nucleobase sequence that is at least about 50% identical or at least about 50% reverse complementary to a sequence selected from Column B1 of TABLE 1, wherein the sequence from Column A1 and the sequence from Column B1 are in the same row of TABLE 1.

[0122] In some instances, compositions comprise an effector protein or a fusion protein thereof, and a guide nucleic acid, wherein the amino acid sequence of the effector protein is at least about 60% identical to a sequence selected from Column A1 of TABLE 1, and wherein at least a portion of the guide nucleic acid comprises a nucleobase sequence that is at least about 60% identical or at least about 60% reverse complementary to a sequence selected from Column B1 of TABLE 1, wherein the sequence from Column A1 and the sequence from Column B1 are in the same row of TABLE 1.

[0123] In some instances, compositions comprise an effector protein or a fusion protein thereof, and a guide nucleic acid, wherein the amino acid sequence of the effector protein is at least about 70% identical to a sequence selected from Column A1 of TABLE 1, and wherein at least a portion of the guide nucleic acid comprises a nucleobase sequence that is at least about 70% identical or at least about 70% reverse complementary to a sequence selected from Column B1 of TABLE 1, wherein the sequence from Column A1 and the sequence from Column B1 are in the same row of TABLE 1.

[0124] In some instances, compositions comprise an effector protein or a fusion protein thereof, and a guide nucleic acid, wherein the amino acid sequence of the effector protein is at least about 80% identical to a sequence selected from Column A1 of TABLE 1, and wherein at least a portion of the guide nucleic acid comprises a nucleobase sequence that is at least about or 80% identical or at least about 80% reverse complementary to a sequence selected from Column B1 of TABLE 1, wherein the sequence from Column A1 and the sequence from Column B1 are in the same row of TABLE 1.

[0125] In some instances, compositions comprise an effector protein or a fusion protein thereof, and a guide nucleic acid, wherein the amino acid sequence of the effector protein is at least about 90% identical to a sequence selected from Column A1 of TABLE 1, and wherein at least a portion of the guide nucleic acid comprises a nucleobase sequence that is at least about 90% identical or at least about 90% reverse complementary to a sequence selected from Column B1 of TABLE 1, wherein the sequence from Column A1 and the sequence from Column B1 are in the same row of TABLE 1.

[0126] In some instances, compositions comprise an effector protein or a fusion protein thereof, and a guide nucleic acid, wherein the amino acid sequence of the effector protein is at least about 95% identical to a sequence selected from Column A1 of TABLE 1, and wherein at least a portion of the guide nucleic acid comprises a nucleobase sequence that is at least about 95% identical or at least 95% reverse complementary to a sequence selected from Column B1 of TABLE 1, wherein the sequence from Column A1 and the sequence from Column B1 are in the same row of TABLE 1.

[0127] In some instances, compositions comprise an effector protein or a fusion protein thereof, and a guide nucleic acid, wherein the amino acid sequence of the effector protein is 100% identical to a sequence selected from Column A1 of TABLE 1, and wherein at least a portion of the guide nucleic acid comprises a nucleobase sequence that is 100% identical or 100% reverse complementary to a sequence selected from Column B1 of TABLE 1, wherein the sequence from Column A1 and the sequence from Column B1 are in the same row of TABLE 1.

[0128] In some instances, compositions comprise an effector protein or a fusion protein thereof, and a guide nucleic acid, wherein the amino acid sequence of the effector protein is at least about 50% identical to a sequence selected from Column A2 of TABLE 1, and wherein at least a portion of the guide nucleic acid comprises a nucleobase sequence that is at least about 50% identical or at least about 50% reverse complementary to a sequence selected from Column B2 of TABLE 1, wherein the sequence from Column A2 and the sequence from Column B2 are in the same row of TABLE 1.

[0129] In some instances, compositions comprise an effector protein or a fusion protein thereof, and a guide nucleic acid, wherein the amino acid sequence of the effector protein is at least about 60% identical to a sequence selected from Column A2 of TABLE 1, and wherein at least a portion of the guide nucleic acid comprises a nucleobase sequence that is at least about 60% identical or at least about 60% reverse complementary to a sequence selected from Column B2 of TABLE 1, wherein the sequence from Column A2 and the sequence from Column B2 are in the same row of TABLE 1.

[0130] In some instances, compositions comprise an effector protein or a fusion protein thereof, and a guide nucleic acid, wherein the amino acid sequence of the effector protein is at least about 70% identical to a sequence selected from Column A2 of TABLE 1, and wherein at least a portion of the guide nucleic acid comprises a nucleobase sequence that is at least about 70% identical or at least about 70% reverse complementary to a sequence selected from Column B2 of TABLE 1, wherein the sequence from Column A2 and the sequence from Column B2 are in the same row of TABLE 1.

[0131] In some instances, compositions comprise an effector protein or a fusion protein thereof, and a guide nucleic acid, wherein the amino acid sequence of the effector protein is at least about 80% identical to a sequence selected from Column A2 of TABLE 1, and wherein at least a portion of the guide nucleic acid comprises a nucleobase sequence that is at least about 80% identical or at least about 80% reverse complementary to a sequence selected from Column B2 of TABLE 1, wherein the sequence from Column A2 and the sequence from Column B2 are in the same row of TABLE 1.

[0132] In some instances, compositions comprise an effector protein or a fusion protein thereof, and a guide nucleic acid, wherein the amino acid sequence of the effector protein is at least about 90% identical to a sequence selected from Column A2 of TABLE 1, and wherein at least a portion of the guide nucleic acid comprises a nucleobase sequence that is at least about 90% identical or at least about 90% reverse complementary to a sequence selected from Column B2 of TABLE 1, wherein the sequence from Column A2 and the sequence from Column B2 are in the same row of TABLE 1.

[0133] In some instances, compositions comprise an effector protein or a fusion protein thereof, and a guide nucleic acid, wherein the amino acid sequence of the effector protein is at least about 95% identical to a sequence selected from Column A2 of TABLE 1, and wherein at least a portion of the guide nucleic acid comprises a nucleobase sequence that is at least about 95% identical or at least about 95% reverse complementary to a sequence selected from Column B2 of TABLE 1, wherein the sequence from Column A2 and the sequence from Column B2 are in the same row of TABLE 1.

[0134] In some instances, compositions comprise an effector protein or a fusion protein thereof, and a guide nucleic acid, wherein the amino acid sequence of the effector protein is 100% identical to a sequence selected from Column A2 of TABLE 1, and wherein at least a portion of the guide nucleic acid comprises a nucleobase sequence that is 100% identical or 100% reverse complementary to a sequence selected from Column B2 of TABLE 1, wherein the sequence from Column A2 and the sequence from Column B2 are in the same row of TABLE 1.

[0135] In some instances, compositions comprise an effector protein or a fusion protein thereof, and a guide nucleic acid, wherein the amino acid sequence of the effector protein is at least about 50% identical to a sequence selected from Column A3 of TABLE 1, and wherein at least a portion of the guide nucleic acid comprises a nucleobase sequence that is at least about 50% identical or at least about 50% reverse complementary to a sequence selected from Column B3 of TABLE 1, wherein the sequence from Column A3 and the sequence from Column B3 are in the same row of TABLE 1.

[0136] In some instances, compositions comprise an effector protein or a fusion protein thereof, and a guide nucleic acid, wherein the amino acid sequence of the effector protein is at least about 60% identical to a sequence selected from Column A3 of TABLE 1, and wherein at least a portion of the guide nucleic acid comprises a nucleobase sequence that is at least about 60% identical or at least about 60% reverse complementary to a sequence selected from Column B3 of TABLE 1, wherein the sequence from Column A3 and the sequence from Column B3 are in the same row of TABLE 1.

[0137] In some instances, compositions comprise an effector protein or a fusion protein thereof, and a guide nucleic acid, wherein the amino acid sequence of the effector protein is at least about 70% identical to a sequence selected from Column A3 of TABLE 1, and wherein at least a portion of the guide nucleic acid comprises a nucleobase sequence that is at least about 70% identical or at least about 70% reverse complementary to a sequence selected from Column B3 of TABLE 1, wherein the sequence from Column A3 and the sequence from Column B3 are in the same row of TABLE 1.

[0138] In some instances, compositions comprise an effector protein or a fusion protein thereof, and a guide nucleic acid, wherein the amino acid sequence of the effector protein is at least about 80% identical to a sequence selected from Column A3 of TABLE 1, and wherein at least a portion of the guide nucleic acid comprises a nucleobase sequence that is at least about 80% identical or at least about 80% reverse complementary to a sequence selected from Column B3 of TABLE 1, wherein the sequence from Column A3 and the sequence from Column B3 are in the same row of TABLE 1.

[0139] In some instances, compositions comprise an effector protein or a fusion protein thereof, and a guide nucleic acid, wherein the amino acid sequence of the effector protein is at least about 90% identical to a sequence selected from Column A3 of TABLE 1, and wherein at least a portion of the guide nucleic acid comprises a nucleobase sequence that is at least about 90% identical or at least about 90% reverse complementary to a sequence selected from Column B3 of TABLE 1, wherein the sequence from Column A3 and the sequence from Column B3 are in the same row of TABLE 1.

[0140] In some instances, compositions comprise an effector protein or a fusion protein thereof, and a guide nucleic acid, wherein the amino acid sequence of the effector protein is at least about 95% identical to a sequence selected from Column A3 of TABLE 1, and wherein at least a portion of the guide nucleic acid comprises a nucleobase sequence that is at least about 95% identical or at least about 95% reverse complementary to a sequence selected from Column B3 of TABLE 1, wherein the sequence from Column A3 and the sequence from Column B3 are in the same row of TABLE 1.

[0141] In some instances, compositions comprise an effector protein or a fusion protein thereof, and a guide nucleic acid, wherein the amino acid sequence of the effector protein is 100% identical to a sequence selected from Column A3 of TABLE 1, and wherein at least a portion of the guide nucleic acid comprises a nucleobase sequence that is 100% identical or 100% reverse complementary to a sequence selected from Column B3 of TABLE 1, wherein the sequence from Column A3 and the sequence from Column B3 are in the same row of TABLE 1.

[0142] In some instances, compositions comprise an effector protein or a fusion protein thereof, and a guide nucleic acid, wherein the amino acid sequence of the effector protein is at least 50%, at least 55%, at least 60%, at least 65%, at least 70%, at least 75%, at least 80%, at least 85%, at least 90%, at least 95%, at least 97%, at least 98%, at least 99% or 100% identical to a sequence selected from Column D1 of TABLE 2, and wherein at least a portion of the guide nucleic acid comprises a nucleobase sequence that is at least 50%, at least 55%, at least 60%, at least 65%, at least 70%, at least 75%, at least 80%, at least 85%, at least 90%, at least 95%, or 100% identical or at least 50%, at least 55%, at least 60%, at least 65%, at least 70%, at least 75%, at least 80%, at least 85%, at least 90%, at least 95%, or 100% reverse complementary to a sequence selected from Column C1 of TABLE 2, wherein the sequence from Column D1 and the sequence from Column C1 are in the same row of TABLE 2.

[0143] In some instances, compositions comprise an effector protein or a fusion protein thereof, and a guide nucleic acid, wherein the amino acid sequence of the effector protein is at least about 50% identical to a sequence selected from Column D1 of TABLE 2, and wherein at least a portion of the guide nucleic acid comprises a nucleobase sequence that is at least about 50% identical or at least about 50% reverse complementary to a sequence selected from Column C1 of TABLE 2, wherein the sequence from Column D1 and the sequence from Column C1 are in the same row of TABLE 2.

[0144] In some instances, compositions comprise an effector protein or a fusion protein thereof, and a guide nucleic acid, wherein the amino acid sequence of the effector protein is at least about 60% identical to a sequence selected from Column D1 of TABLE 2, and wherein at least a portion of the guide nucleic acid comprises a nucleobase sequence that is at least about 60% identical or at least about 60% reverse complementary to a sequence selected from Column C1 of TABLE 2, wherein the sequence from Column D1 and the sequence from Column C1 are in the same row of TABLE 2.

[0145] In some instances, compositions comprise an effector protein or a fusion protein thereof, and a guide nucleic acid, wherein the amino acid sequence of the effector protein is at least about 70% identical to a sequence selected from Column D1 of TABLE 2, and wherein at least a portion of the guide nucleic acid comprises a nucleobase sequence that is at least about 70% identical or at least about 70% reverse complementary to a sequence selected from Column C1 of TABLE 2, wherein the sequence from Column D1 and the sequence from Column C1 are in the same row of TABLE 2.

[0146] In some instances, compositions comprise an effector protein or a fusion protein thereof, and a guide nucleic acid, wherein the amino acid sequence of the effector protein is at least about 80% identical to a sequence selected from Column D1 of TABLE 2, and wherein at least a portion of the guide nucleic acid comprises a nucleobase sequence that is at least about or 80% identical or at least about 80% reverse complementary to a sequence selected from Column C1 of TABLE 2, wherein the sequence from Column D1 and the sequence from Column C1 are in the same row of TABLE 2.

[0147] In some instances, compositions comprise an effector protein or a fusion protein thereof, and a guide nucleic acid, wherein the amino acid sequence of the effector protein is at least about 90% identical to a sequence selected from Column D1 of TABLE 2, and wherein at least a portion of the guide nucleic acid comprises a nucleobase sequence that is at least about 90% identical or at least about 90% reverse complementary to a sequence selected from Column C1 of TABLE 2, wherein the sequence from Column D1 and the sequence from Column C1 are in the same row of TABLE 2.

[0148] In some instances, compositions comprise an effector protein or a fusion protein thereof, and a guide nucleic acid, wherein the amino acid sequence of the effector protein is at least about 95% identical to a sequence selected from Column D1 of TABLE 2, and wherein at least a portion of the guide nucleic acid comprises a nucleobase sequence that is at least about 95% identical or at least 95% reverse complementary to a sequence selected from Column C1 of TABLE 2, wherein the sequence from Column D1 and the sequence from Column C1 are in the same row of TABLE 2.

[0149] In some instances, compositions comprise an effector protein or a fusion protein thereof, and a guide nucleic acid, wherein the amino acid sequence of the effector protein is 100% identical to a sequence selected from Column D1 of TABLE 2, and wherein at least a portion of the guide nucleic acid comprises a nucleobase sequence that is 100% identical or 100% reverse complementary to a sequence selected from Column C1 of TABLE 2, wherein the sequence from Column D1 and the sequence from Column C1 are in the same row of TABLE 2.

[0150] In some instances, compositions comprise an effector protein or a fusion protein thereof, and a guide nucleic acid, wherein the amino acid sequence of the effector protein is at least 50%, at least 55%, at least 60%, at least 65%, at least 70%, at least 75%, at least 80%, at least 85%, at least 90%, at least 95%, at least 97%, at least 98%, at least 99% or 100% identical to a sequence selected from Column D2 of TABLE 2, and wherein at least a portion of the guide nucleic acid comprises a nucleobase sequence that is at least 50%, at least 55%, at least 60%, at least 65%, at least 70%, at least 75%, at least 80%, at least 85%, at least 90%, at least 95%, or 100% identical or at least 50%, at least 55%, at least 60%, at least 65%, at least 70%, at least 75%, at least 80%, at least 85%, at least 90%, at least 95%, or 100% reverse complementary to a sequence selected from Column C2 of TABLE 2, wherein the sequence from Column D2 and the sequence from Column C2 are in the same row of TABLE 2.

[0151] In some instances, compositions comprise an effector protein or a fusion protein thereof, and a guide nucleic acid, wherein the amino acid sequence of the effector protein is at least about 50% identical to a sequence selected from Column D2 of TABLE 2, and wherein at least a portion of the guide nucleic acid comprises a nucleobase sequence that is at least about 50% identical or at least about 50% reverse complementary to a sequence selected from Column C2 of TABLE 2, wherein the sequence from Column D2 and the sequence from Column C2 are in the same row of TABLE 2.

[0152] In some instances, compositions comprise an effector protein or a fusion protein thereof, and a guide nucleic acid, wherein the amino acid sequence of the effector protein is at least about 60% identical to a sequence selected from Column D2 of TABLE 2, and wherein at least a portion of the guide nucleic acid comprises a nucleobase sequence that is at least about 60% identical or at least about 60% reverse complementary to a sequence selected from Column C2 of TABLE 2, wherein the sequence from Column D2 and the sequence from Column C2 are in the same row of TABLE 2.

[0153] In some instances, compositions comprise an effector protein or a fusion protein thereof, and a guide nucleic acid, wherein the amino acid sequence of the effector protein is at least about 70% identical to a sequence selected from Column D2 of TABLE 2, and wherein at least a portion of the guide nucleic acid comprises a nucleobase sequence that is at least about 70% identical or at least about 70% reverse complementary to a sequence selected from Column C2 of TABLE 2, wherein the sequence from Column D2 and the sequence from Column C2 are in the same row of TABLE 2.

[0154] In some instances, compositions comprise an effector protein or a fusion protein thereof, and a guide nucleic acid, wherein the amino acid sequence of the effector protein is at least about 80% identical to a sequence selected from Column D2 of TABLE 2, and wherein at least a portion of the guide nucleic acid comprises a nucleobase sequence that is at least about or 80% identical or at least about 80% reverse complementary to a sequence selected from Column C2 of TABLE 2, wherein the sequence from Column D2 and the sequence from Column C2 are in the same row of TABLE 2.

[0155] In some instances, compositions comprise an effector protein or a fusion protein thereof, and a guide nucleic acid, wherein the amino acid sequence of the effector protein is at least about 90% identical to a sequence selected from Column D2 of TABLE 2, and wherein at least a portion of the guide nucleic acid comprises a nucleobase sequence that is at least about 90% identical or at least about 90% reverse complementary to a sequence selected from Column C2 of TABLE 2, wherein the sequence from Column D2 and the sequence from Column C2 are in the same row of TABLE 2.

[0156] In some instances, compositions comprise an effector protein or a fusion protein thereof, and a guide nucleic acid, wherein the amino acid sequence of the effector protein is at least about 95% identical to a sequence selected from Column D2 of TABLE 2, and wherein at least a portion of the guide nucleic acid comprises a nucleobase sequence that is at least about 95% identical or at least 95% reverse complementary to a sequence selected from Column C2 of TABLE 2, wherein the sequence from Column D2 and the sequence from Column C2 are in the same row of TABLE 2.

[0157] In some instances, compositions comprise an effector protein or a fusion protein thereof, and a guide nucleic acid, wherein the amino acid sequence of the effector protein is 100% identical to a sequence selected from Column D2 of TABLE 2, and wherein at least a portion of the guide nucleic acid comprises a nucleobase sequence that is 100% identical or 100% reverse complementary to a sequence selected from Column C2 of TABLE 2, wherein the sequence from Column D2 and the sequence from Column C2 are in the same row of TABLE 2.

[0158] In some instances, compositions comprise an effector protein or a fusion protein thereof, and a guide nucleic acid, wherein the amino acid sequence of the effector protein is at least 50%, at least 55%, at least 60%, at least 65%, at least 70%, at least 75%, at least 80%, at least 85%, at least 90%, at least 95%, at least 97%, at least 98%, at least 99% or 100% identical to a sequence selected from Column D3 of TABLE 2, and wherein at least a portion of the guide nucleic acid comprises a nucleobase sequence that is at least 50%, at least 55%, at least 60%, at least 65%, at least 70%, at least 75%, at least 80%, at least 85%, at least 90%, at least 95%, or 100% identical or at least 50%, at least 55%, at least 60%, at least 65%, at least 70%, at least 75%, at least 80%, at least 85%, at least 90%, at least 95%, or 100% reverse complementary to a sequence selected from Column C3 of TABLE 2, wherein the sequence from Column D3 and the sequence from Column C3 are in the same row of TABLE 2.

[0159] In some instances, compositions comprise an effector protein or a fusion protein thereof, and a guide nucleic acid, wherein the amino acid sequence of the effector protein is at least about 50% identical to a sequence selected from Column D3 of TABLE 2, and wherein at least a portion of the guide nucleic acid comprises a nucleobase sequence that is at least about 50% identical or at least about 50% reverse complementary to a sequence selected from Column C3 of TABLE 2, wherein the sequence from Column D3 and the sequence from Column C3 are in the same row of TABLE 2.

[0160] In some instances, compositions comprise an effector protein or a fusion protein thereof, and a guide nucleic acid, wherein the amino acid sequence of the effector protein is at least about 60% identical to a sequence selected from Column D3 of TABLE 2, and wherein at least a portion of the guide nucleic acid comprises a nucleobase sequence that is at least about 60% identical or at least about 60% reverse complementary to a sequence selected from Column C3 of TABLE 2, wherein the sequence from Column D3 and the sequence from Column C3 are in the same row of TABLE 2.

[0161] In some instances, compositions comprise an effector protein or a fusion protein thereof, and a guide nucleic acid, wherein the amino acid sequence of the effector protein is at least about 70% identical to a sequence selected from Column D3 of TABLE 2, and wherein at least a portion of the guide nucleic acid comprises a nucleobase sequence that is at least about 70% identical or at least about 70% reverse complementary to a sequence selected from Column C3 of TABLE 2, wherein the sequence from Column D3 and the sequence from Column C3 are in the same row of TABLE 2.

[0162] In some instances, compositions comprise an effector protein or a fusion protein thereof, and a guide nucleic acid, wherein the amino acid sequence of the effector protein is at least about 80% identical to a sequence selected from Column D3 of TABLE 2, and wherein at least a portion of the guide nucleic acid comprises a nucleobase sequence that is at least about or 80% identical or at least about 80% reverse complementary to a sequence selected from Column C3 of TABLE 2, wherein the sequence from Column D3 and the sequence from Column C3 are in the same row of TABLE 2.

[0163] In some instances, compositions comprise an effector protein or a fusion protein thereof, and a guide nucleic acid, wherein the amino acid sequence of the effector protein is at least about 90% identical to a sequence selected from Column D3 of TABLE 2, and wherein at least a portion of the guide nucleic acid comprises a nucleobase sequence that is at least about 90% identical or at least about 90% reverse complementary to a sequence selected from Column C3 of TABLE 2, wherein the sequence from Column D3 and the sequence from Column C3 are in the same row of TABLE 2.

[0164] In some instances, compositions comprise an effector protein or a fusion protein thereof, and a guide nucleic acid, wherein the amino acid sequence of the effector protein is at least about 95% identical to a sequence selected from Column D3 of TABLE 2, and wherein at least a portion of the guide nucleic acid comprises a nucleobase sequence that is at least about 95% identical or at least 95% reverse complementary to a sequence selected from Column C3 of TABLE 2, wherein the sequence from Column D3 and the sequence from Column C3 are in the same row of TABLE 2.

[0165] In some instances, compositions comprise an effector protein or a fusion protein thereof, and a guide nucleic acid, wherein the amino acid sequence of the effector protein is 100% identical to a sequence selected from Column D3 of TABLE 2, and wherein at least a portion of the guide nucleic acid comprises a nucleobase sequence that is 100% identical or 100% reverse complementary to a sequence selected from Column C3 of TABLE 2, wherein the sequence from Column D3 and the sequence from Column C3 are in the same row of TABLE 2.

[0166] In some instances, compositions comprise an effector protein or a fusion protein thereof, and a guide nucleic acid, wherein the amino acid sequence of the effector protein is at least 50%, at least 55%, at least 60%, at least 65%, at least 70%, at least 75%, at least 80%, at least 85%, at least 90%, at least 95%, at least 97%, at least 98%, at least 99% or 100% identical to a sequence selected from Column D4 of TABLE 2, and wherein at least a portion of the guide nucleic acid comprises a nucleobase sequence that is at least 50%, at least 55%, at least 60%, at least 65%, at least 70%, at least 75%, at least 80%, at least 85%, at least 90%, at least 95%, or 100% identical or at least 50%, at least 55%, at least 60%, at least 65%, at least 70%, at least 75%, at least 80%, at least 85%, at least 90%, at least 95%, or 100% reverse complementary to a sequence selected from Column C4 of TABLE 2, wherein the sequence from Column D4 and the sequence from Column C4 are in the same row of TABLE 2.

[0167] In some instances, compositions comprise an effector protein or a fusion protein thereof, and a guide nucleic acid, wherein the amino acid sequence of the effector protein is at least about 50% identical to a sequence selected from Column D4 of TABLE 2, and wherein at least a portion of the guide nucleic acid comprises a nucleobase sequence that is at least about 50% identical or at least about 50% reverse complementary to a sequence selected from Column C4 of TABLE 2, wherein the sequence from Column D4 and the sequence from Column C4 are in the same row of TABLE 2.

[0168] In some instances, compositions comprise an effector protein or a fusion protein thereof, and a guide nucleic acid, wherein the amino acid sequence of the effector protein is at least about 60% identical to a sequence selected from Column D4 of TABLE 2, and wherein at least a portion of the guide nucleic acid comprises a nucleobase sequence that is at least about 60% identical or at least about 60% reverse complementary to a sequence selected from Column C4 of TABLE 2, wherein the sequence from Column D4 and the sequence from Column C4 are in the same row of TABLE 2.

[0169] In some instances, compositions comprise an effector protein or a fusion protein thereof, and a guide nucleic acid, wherein the amino acid sequence of the effector protein is at least about 70% identical to a sequence selected from Column D4 of TABLE 2, and wherein at least a portion of the guide nucleic acid comprises a nucleobase sequence that is at least about 70% identical or at least about 70% reverse complementary to a sequence selected from Column C4 of TABLE 2, wherein the sequence from Column D4 and the sequence from Column C4 are in the same row of TABLE 2.

[0170] In some instances, compositions comprise an effector protein or a fusion protein thereof, and a guide nucleic acid, wherein the amino acid sequence of the effector protein is at least about 80% identical to a sequence selected from Column D4 of TABLE 2, and wherein at least a portion of the guide nucleic acid comprises a nucleobase sequence that is at least about or 80% identical or at least about 80% reverse complementary to a sequence selected from Column C4 of TABLE 2, wherein the sequence from Column D4 and the sequence from Column C4 are in the same row of TABLE 2.

[0171] In some instances, compositions comprise an effector protein or a fusion protein thereof, and a guide nucleic acid, wherein the amino acid sequence of the effector protein is at least about 90% identical to a sequence selected from Column D4 of TABLE 2, and wherein at least a portion of the guide nucleic acid comprises a nucleobase sequence that is at least about 90% identical or at least about 90% reverse complementary to a sequence selected from Column C4 of TABLE 2, wherein the sequence from Column D4 and the sequence from Column C4 are in the same row of TABLE 2.

[0172] In some instances, compositions comprise an effector protein or a fusion protein thereof, and a guide nucleic acid, wherein the amino acid sequence of the effector protein is at least about 95% identical to a sequence selected from Column D4 of TABLE 2, and wherein at least a portion of the guide nucleic acid comprises a nucleobase sequence that is at least about 95% identical or at least 95% reverse complementary to a sequence selected from Column C4 of TABLE 2, wherein the sequence from Column D4 and the sequence from Column C4 are in the same row of TABLE 2.

[0173] In some instances, compositions comprise an effector protein or a fusion protein thereof, and a guide nucleic acid, wherein the amino acid sequence of the effector protein is 100% identical to a sequence selected from Column D4 of TABLE 2, and wherein at least a portion of the guide nucleic acid comprises a nucleobase sequence that is 100% identical or 100% reverse complementary to a sequence selected from Column C4 of TABLE 2, wherein the sequence from Column D4 and the sequence from Column C4 are in the same row of TABLE 2.

[0174] In some instances, the portion of the guide nucleic acid is the repeat region of the guide nucleic acid. In some instances, the portion of the guide nucleic acid binds the effector protein.

TABLE 1
Effector Proteins

| A1 | B1 | A2 | B2 | A3 | B3 |
|---|---|---|---|---|---|
| SEQ ID NO: | SEQ ID NO: | SEQ ID NO: | SEQ ID NO: | SEQ ID NO: | SEQ ID NO: |
| 1 | 10485 | 1747 | 11996 | 3493 | 13520 |
| 1 | 11112 | 1748 | 11997 | 3494 | 13521 |
| 2 | 10485 | 1749 | 11998 | 3495 | 13522 |
| 2 | 11112 | 1750 | 11999 | 3496 | 13523 |
| 3 | 10486 | 1751 | 12000 | 3497 | 13524 |
| 4 | 10487 | 1752 | 12001 | 3498 | 13525 |
| 5 | 10488 | 1753 | 12001 | 3499 | 13526 |
| 6 | 10489 | 1754 | 12001 | 3500 | 13527 |
| 7 | 10489 | 1755 | 12002 | 3501 | 13528 |
| 8 | 10489 | 1756 | 12003 | 3502 | 13528 |
| 9 | 10489 | 1757 | 12004 | 3503 | 13528 |
| 10 | 10490 | 1758 | 12005 | 3504 | 13528 |
| 11 | 10491 | 1759 | 12006 | 3505 | 13529 |
| 11 | 14123 | 1760 | 12007 | 3506 | 13529 |
| 12 | 10492 | 1761 | 12008 | 3507 | 13530 |
| 12 | 12592 | 1762 | 12009 | 3508 | 13531 |
| 13 | 10493 | 1763 | 12010 | 3509 | 13532 |
| 14 | 10494 | 1764 | 12011 | 3510 | 13533 |
| 15 | 10495 | 1765 | 12012 | 3511 | 13533 |
| 16 | 10496 | 1766 | 12013 | 3512 | 13534 |
| 17 | 10497 | 1767 | 12014 | 3513 | 13535 |
| 18 | 10497 | 1768 | 12015 | 3514 | 13536 |
| 19 | 10498 | 1769 | 12016 | 3515 | 13537 |
| 20 | 10499 | 1770 | 12017 | 3515 | 13556 |
| 21 | 10500 | 1771 | 12018 | 3516 | 13538 |
| 22 | 10501 | 1772 | 12019 | 3517 | 13539 |
| 23 | 10502 | 1773 | 12020 | 3518 | 13540 |
| 24 | 10503 | 1774 | 12021 | 3519 | 13541 |
| 25 | 10504 | 1775 | 12022 | 3520 | 13541 |
| 26 | 10505 | 1776 | 12023 | 3521 | 13541 |
| 27 | 10506 | 1777 | 12024 | 3522 | 13542 |
| 28 | 10507 | 1778 | 12025 | 3523 | 13543 |
| 29 | 10508 | 1779 | 12026 | 3524 | 13544 |
| 30 | 10509 | 1780 | 12027 | 3525 | 13545 |
| 31 | 10510 | 1781 | 12028 | 3526 | 13546 |
| 32 | 10511 | 1782 | 12029 | 3527 | 13547 |
| 33 | 10511 | 1783 | 12030 | 3528 | 13548 |
| 34 | 10512 | 1784 | 12030 | 3529 | 13549 |
| 35 | 10513 | 1785 | 12031 | 3530 | 13550 |
| 36 | 10514 | 1786 | 12032 | 3531 | 13551 |
| 37 | 10515 | 1787 | 12033 | 3532 | 13552 |
| 38 | 10516 | 1788 | 12034 | 3533 | 13553 |
| 39 | 10517 | 1789 | 12035 | 3534 | 13554 |
| 40 | 10518 | 1790 | 12036 | 3535 | 13555 |
| 41 | 10519 | 1791 | 12037 | 3536 | 13557 |
| 42 | 10520 | 1792 | 12038 | 3537 | 13558 |
| 43 | 10521 | 1793 | 12039 | 3538 | 13559 |
| 44 | 10522 | 1794 | 12040 | 3539 | 13560 |
| 45 | 10523 | 1795 | 12041 | 3540 | 13561 |
| 46 | 10524 | 1796 | 12042 | 3541 | 13562 |
| 47 | 10524 | 1797 | 12043 | 3542 | 13563 |
| 48 | 10525 | 1798 | 12044 | 3543 | 13564 |
| 49 | 10526 | 1799 | 12045 | 3544 | 13565 |
| 50 | 10527 | 1800 | 12046 | 3545 | 13566 |
| 51 | 10528 | 1801 | 12046 | 3546 | 13567 |
| 52 | 10528 | 1802 | 12047 | 3547 | 13568 |
| 53 | 10529 | 1803 | 12048 | 3548 | 13569 |
| 54 | 10529 | 1804 | 12049 | 3549 | 13570 |
| 55 | 10530 | 1805 | 12050 | 3550 | 13571 |
| 56 | 10531 | 1806 | 12051 | 3551 | 13572 |
| 57 | 10532 | 1807 | 12052 | 3552 | 13572 |
| 58 | 10533 | 1808 | 12053 | 3553 | 13572 |
| 59 | 10533 | 1809 | 12054 | 3554 | 13572 |
| 60 | 10533 | 1810 | 12055 | 3555 | 13573 |
| 61 | 10534 | 1811 | 12056 | 3556 | 13574 |
| 62 | 10534 | 1812 | 12057 | 3557 | 13575 |
| 63 | 10535 | 1813 | 12058 | 3558 | 13576 |
| 64 | 10536 | 1814 | 12059 | 3559 | 13577 |
| 65 | 10537 | 1815 | 12060 | 3560 | 13578 |
| 66 | 10537 | 1816 | 12061 | 3561 | 13579 |
| 67 | 10538 | 1817 | 12062 | 3562 | 13579 |
| 68 | 10539 | 1818 | 12063 | 3563 | 13580 |
| 69 | 10539 | 1819 | 12064 | 3564 | 13581 |
| 70 | 10539 | 1820 | 12065 | 3565 | 13582 |
| 71 | 10539 | 1821 | 12066 | 3566 | 13583 |
| 72 | 10539 | 1822 | 12067 | 3567 | 13584 |
| 73 | 10539 | 1823 | 12068 | 3568 | 13585 |
| 74 | 10539 | 1824 | 12069 | 3569 | 13586 |
| 75 | 10539 | 1825 | 12070 | 3570 | 13587 |
| 76 | 10539 | 1826 | 12071 | 3571 | 13588 |
| 77 | 10539 | 1827 | 12072 | 3572 | 13589 |
| 78 | 10539 | 1828 | 12072 | 3573 | 13590 |
| 79 | 10539 | 1829 | 12073 | 3574 | 13591 |
| 80 | 10539 | 1830 | 12074 | 3575 | 13592 |
| 81 | 10539 | 1831 | 12075 | 3576 | 13594 |
| 82 | 10539 | 1832 | 12076 | 3577 | 13595 |
| 83 | 10539 | 1833 | 12077 | 3578 | 13595 |
| 84 | 10539 | 1834 | 12078 | 3579 | 13595 |
| 85 | 10539 | 1835 | 12079 | 3580 | 13596 |
| 86 | 10539 | 1836 | 12079 | 3581 | 13597 |
| 87 | 10539 | 1837 | 12080 | 3582 | 13598 |
| 88 | 10539 | 1838 | 12081 | 3583 | 13599 |
| 89 | 10539 | 1838 | 12083 | 3584 | 13600 |
| 90 | 10540 | 1839 | 12082 | 3585 | 13601 |
| 91 | 10541 | 1840 | 12083 | 3586 | 13602 |
| 91 | 10542 | 1841 | 12084 | 3587 | 13603 |
| 91 | 14888 | 1842 | 12085 | 3588 | 13604 |
| 92 | 10543 | 1843 | 12086 | 3589 | 13605 |
| 93 | 10544 | 1844 | 12087 | 3590 | 13606 |
| 94 | 10545 | 1845 | 12088 | 3591 | 13607 |
| 95 | 10545 | 1846 | 12089 | 3592 | 13607 |
| 96 | 10545 | 1847 | 12089 | 3593 | 13608 |
| 97 | 10545 | 1848 | 12089 | 3594 | 13608 |
| 98 | 10546 | 1849 | 12090 | 3595 | 13608 |
| 99 | 10547 | 1850 | 12091 | 3596 | 13609 |
| 100 | 10548 | 1851 | 12092 | 3597 | 13610 |
| 101 | 10549 | 1852 | 12093 | 3598 | 13611 |
| 102 | 10550 | 1853 | 12094 | 3599 | 13612 |
| 103 | 10551 | 1854 | 12095 | 3600 | 13613 |
| 104 | 10552 | 1854 | 13505 | 3601 | 13614 |
| 105 | 10553 | 1855 | 12096 | 3602 | 13615 |
| 106 | 10554 | 1856 | 12097 | 3603 | 13616 |
| 107 | 10555 | 1857 | 12098 | 3604 | 13617 |
| 108 | 10556 | 1858 | 12099 | 3605 | 13618 |
| 109 | 10557 | 1859 | 12100 | 3606 | 13619 |
| 110 | 10558 | 1860 | 12101 | 3607 | 13620 |
| 111 | 10559 | 1861 | 12102 | 3608 | 13621 |
| 112 | 10560 | 1862 | 12103 | 3609 | 13622 |
| 113 | 10561 | 1863 | 12104 | 3610 | 13622 |
| 114 | 10562 | 1864 | 12105 | 3611 | 13623 |
| 115 | 10563 | 1865 | 12106 | 3612 | 13624 |
| 116 | 10564 | 1866 | 12107 | 3613 | 13625 |
| 117 | 10565 | 1867 | 12108 | 3614 | 13626 |
| 118 | 10566 | 1868 | 12109 | 3615 | 13627 |
| 119 | 10567 | 1869 | 12110 | 3616 | 13628 |
| 120 | 10568 | 1870 | 12111 | 3617 | 13629 |
| 121 | 10569 | 1871 | 12112 | 3618 | 13630 |
| 122 | 10570 | 1872 | 12113 | 3619 | 13631 |
| 123 | 10571 | 1873 | 12114 | 3620 | 13632 |
| 124 | 10572 | 1874 | 12115 | 3621 | 13633 |
| 125 | 10573 | 1875 | 12116 | 3622 | 13634 |
| 126 | 10573 | 1876 | 12117 | 3623 | 13635 |
| 127 | 10573 | 1877 | 12118 | 3624 | 13635 |
| 128 | 10574 | 1878 | 12119 | 3625 | 13636 |
| 129 | 10575 | 1879 | 12120 | 3626 | 13637 |
| 130 | 10576 | 1880 | 12121 | 3627 | 13638 |
| 131 | 10576 | 1881 | 12122 | 3628 | 13638 |
| 132 | 10577 | 1882 | 12123 | 3629 | 13639 |
| 133 | 10578 | 1883 | 12124 | 3630 | 13640 |
| 134 | 10579 | 1884 | 12125 | 3631 | 13641 |
| 135 | 10580 | 1885 | 12126 | 3632 | 13642 |
| 136 | 10581 | 1886 | 12126 | 3633 | 13643 |
| 137 | 10582 | 1887 | 12127 | 3634 | 13644 |
| 138 | 10583 | 1888 | 12128 | 3635 | 13645 |
| 139 | 10584 | 1889 | 12129 | 3636 | 13646 |
| 140 | 10585 | 1890 | 12130 | 3637 | 13647 |
| 141 | 10586 | 1891 | 12131 | 3638 | 13648 |
| 142 | 10587 | 1892 | 12132 | 3639 | 13649 |
| 143 | 10587 | 1893 | 12133 | 3640 | 13650 |
| 144 | 10588 | 1894 | 12134 | 3641 | 13651 |
| 145 | 10589 | 1895 | 12135 | 3642 | 13652 |
| 146 | 10590 | 1896 | 12136 | 3643 | 13653 |
| 147 | 10591 | 1897 | 12137 | 3644 | 13654 |
| 148 | 10592 | 1898 | 12138 | 3645 | 13655 |
| 149 | 10593 | 1899 | 12139 | 3646 | 13656 |
| 150 | 10594 | 1900 | 12140 | 3647 | 13657 |
| 151 | 10595 | 1901 | 12141 | 3648 | 13658 |
| 152 | 10596 | 1902 | 12142 | 3649 | 13659 |
| 153 | 10597 | 1903 | 12143 | 3650 | 13660 |
| 154 | 10598 | 1904 | 12144 | 3651 | 13661 |
| 155 | 10599 | 1905 | 12145 | 3652 | 13662 |
| 156 | 10600 | 1906 | 12146 | 3653 | 13663 |
| 157 | 10601 | 1907 | 12147 | 3654 | 13664 |
| 158 | 10602 | 1908 | 12148 | 3655 | 13665 |
| 159 | 10603 | 1909 | 12149 | 3656 | 13666 |
| 160 | 10604 | 1910 | 12150 | 3657 | 13667 |
| 161 | 10605 | 1911 | 12151 | 3658 | 13668 |
| 162 | 10606 | 1912 | 12152 | 3659 | 13669 |
| 163 | 10607 | 1913 | 12153 | 3660 | 13670 |
| 164 | 10608 | 1913 | 12284 | 3661 | 13671 |
| 165 | 10609 | 1914 | 12153 | 3662 | 13672 |
| 166 | 10610 | 1914 | 12284 | 3663 | 13673 |
| 167 | 10611 | 1915 | 12154 | 3664 | 13674 |
| 168 | 10612 | 1916 | 12155 | 3665 | 13675 |
| 169 | 10613 | 1917 | 12156 | 3666 | 13676 |
| 170 | 10614 | 1918 | 12157 | 3667 | 13677 |
| 171 | 10615 | 1919 | 12158 | 3668 | 13678 |
| 172 | 10616 | 1920 | 12159 | 3669 | 13679 |
| 173 | 10617 | 1921 | 12160 | 3670 | 13680 |
| 174 | 10618 | 1922 | 12161 | 3671 | 13681 |
| 175 | 10619 | 1923 | 12162 | 3672 | 13682 |
| 176 | 10620 | 1924 | 12163 | 3673 | 13683 |
| 177 | 10621 | 1925 | 12164 | 3674 | 13684 |
| 178 | 10622 | 1926 | 12165 | 3675 | 13685 |
| 179 | 10623 | 1927 | 12166 | 3676 | 13686 |
| 180 | 10624 | 1928 | 12166 | 3677 | 13687 |
| 181 | 10625 | 1929 | 12167 | 3678 | 13688 |
| 182 | 10626 | 1930 | 12168 | 3679 | 13689 |
| 183 | 10627 | 1931 | 12169 | 3680 | 13690 |
| 184 | 10628 | 1932 | 12170 | 3681 | 13691 |
| 185 | 10629 | 1933 | 12171 | 3682 | 13692 |
| 186 | 10630 | 1934 | 12172 | 3683 | 13693 |
| 187 | 10631 | 1935 | 12173 | 3684 | 13694 |
| 188 | 10632 | 1936 | 12174 | 3685 | 13695 |
| 189 | 10633 | 1937 | 12175 | 3686 | 13696 |
| 190 | 10634 | 1938 | 12176 | 3687 | 13697 |
| 191 | 10635 | 1939 | 12177 | 3688 | 13698 |
| 192 | 10636 | 1940 | 12178 | 3689 | 13699 |
| 193 | 10636 | 1941 | 12179 | 3690 | 13700 |
| 194 | 10637 | 1942 | 12180 | 3691 | 13701 |
| 195 | 10637 | 1943 | 12181 | 3692 | 13702 |
| 196 | 10638 | 1944 | 12182 | 3693 | 13703 |
| 197 | 10639 | 1945 | 12183 | 3694 | 13704 |
| 198 | 10639 | 1946 | 12184 | 3695 | 13705 |
| 199 | 10640 | 1947 | 12185 | 3696 | 13706 |
| 200 | 10641 | 1948 | 12186 | 3697 | 13707 |
| 201 | 10641 | 1949 | 12187 | 3698 | 13708 |
| 202 | 10642 | 1950 | 12188 | 3699 | 13709 |
| 203 | 10643 | 1951 | 12189 | 3700 | 13710 |
| 204 | 10644 | 1952 | 12190 | 3701 | 13711 |
| 205 | 10645 | 1953 | 12191 | 3702 | 13712 |
| 206 | 10646 | 1954 | 12192 | 3703 | 13713 |
| 207 | 10647 | 1954 | 12193 | 3704 | 13714 |
| 208 | 10648 | 1954 | 14998 | 3705 | 13715 |
| 209 | 10649 | 1955 | 12192 | 3706 | 13716 |
| 210 | 10650 | 1955 | 12193 | 3707 | 13717 |
| 210 | 14873 | 1955 | 14998 | 3708 | 13718 |
| 211 | 10651 | 1956 | 12194 | 3709 | 13719 |
| 212 | 10652 | 1957 | 12194 | 3710 | 13720 |
| 213 | 10653 | 1958 | 12195 | 3711 | 13721 |
| 214 | 10654 | 1959 | 12195 | 3712 | 13722 |
| 215 | 10655 | 1959 | 12196 | 3713 | 13723 |
| 216 | 10655 | 1960 | 12197 | 3714 | 13724 |
| 217 | 10656 | 1961 | 12198 | 3715 | 13725 |
| 218 | 10657 | 1962 | 12199 | 3716 | 13726 |
| 219 | 10657 | 1963 | 12199 | 3717 | 13727 |
| 220 | 10658 | 1964 | 12200 | 3718 | 13728 |
| 221 | 10659 | 1965 | 12201 | 3719 | 13729 |
| 222 | 10660 | 1966 | 12202 | 3720 | 13730 |
| 223 | 10661 | 1967 | 12203 | 3721 | 13731 |
| 224 | 10662 | 1968 | 12204 | 3722 | 13732 |
| 225 | 10663 | 1969 | 12204 | 3723 | 13733 |
| 226 | 10664 | 1970 | 12205 | 3724 | 13734 |
| 227 | 10665 | 1971 | 12206 | 3725 | 13735 |
| 228 | 10666 | 1972 | 12207 | 3726 | 13736 |
| 229 | 10667 | 1973 | 12208 | 3727 | 13737 |
| 230 | 10668 | 1974 | 12209 | 3728 | 13738 |
| 231 | 10669 | 1975 | 12210 | 3729 | 13739 |
| 232 | 10670 | 1976 | 12211 | 3730 | 13740 |
| 233 | 10671 | 1976 | 14225 | 3731 | 13741 |
| 234 | 10672 | 1977 | 12212 | 3732 | 13742 |
| 235 | 10673 | 1978 | 12213 | 3733 | 13743 |
| 236 | 10674 | 1979 | 12213 | 3734 | 13744 |
| 237 | 10675 | 1980 | 12213 | 3735 | 13745 |
| 238 | 10676 | 1981 | 12213 | 3736 | 13746 |
| 239 | 10677 | 1982 | 12214 | 3737 | 13747 |
| 240 | 10678 | 1983 | 12215 | 3738 | 13748 |
| 241 | 10679 | 1984 | 12216 | 3739 | 13748 |
| 242 | 10680 | 1985 | 12217 | 3740 | 13748 |
| 243 | 10681 | 1986 | 12218 | 3741 | 13749 |
| 244 | 10682 | 1987 | 12219 | 3742 | 13750 |
| 245 | 10683 | 1988 | 12220 | 3743 | 13751 |
| 246 | 10684 | 1989 | 12221 | 3744 | 13752 |
| 247 | 10685 | 1990 | 12222 | 3745 | 13753 |
| 248 | 10686 | 1991 | 12223 | 3746 | 13754 |
| 249 | 10687 | 1992 | 12224 | 3747 | 13755 |
| 250 | 10688 | 1993 | 12225 | 3748 | 13756 |
| 251 | 10689 | 1994 | 12226 | 3749 | 13757 |
| 252 | 10690 | 1995 | 12227 | 3750 | 13758 |
| 253 | 10691 | 1996 | 12228 | 3751 | 13759 |
| 254 | 10692 | 1997 | 12229 | 3752 | 13760 |
| 255 | 10693 | 1998 | 12230 | 3753 | 13761 |
| 256 | 10694 | 1999 | 12231 | 3754 | 13762 |
| 257 | 10695 | 2000 | 12232 | 3755 | 13763 |
| 258 | 10696 | 2001 | 12233 | 3756 | 13764 |
| 259 | 10697 | 2002 | 12234 | 3757 | 13766 |
| 260 | 10698 | 2003 | 12235 | 3758 | 13767 |
| 261 | 10698 | 2004 | 12236 | 3759 | 13768 |
| 262 | 10699 | 2005 | 12237 | 3760 | 13769 |
| 263 | 10700 | 2006 | 12237 | 3761 | 13770 |
| 264 | 10701 | 2007 | 12238 | 3762 | 13771 |
| 265 | 10702 | 2008 | 12239 | 3763 | 13772 |
| 266 | 10703 | 2009 | 12240 | 3764 | 13773 |
| 267 | 10703 | 2010 | 12241 | 3765 | 13774 |
| 268 | 10703 | 2011 | 12242 | 3766 | 13775 |
| 269 | 10704 | 2012 | 12243 | 3767 | 13776 |
| 270 | 10705 | 2013 | 12244 | 3768 | 13777 |
| 271 | 10706 | 2014 | 12245 | 3769 | 13778 |
| 272 | 10706 | 2015 | 12246 | 3770 | 13779 |
| 273 | 10706 | 2016 | 12247 | 3771 | 13780 |
| 274 | 10707 | 2017 | 12248 | 3772 | 13781 |
| 275 | 10708 | 2018 | 12249 | 3773 | 13782 |
| 276 | 10708 | 2019 | 12250 | 3774 | 13782 |
| 277 | 10708 | 2020 | 12251 | 3775 | 13783 |
| 278 | 10709 | 2021 | 12252 | 3776 | 13784 |
| 279 | 10710 | 2022 | 12253 | 3777 | 13785 |
| 280 | 10710 | 2023 | 12254 | 3778 | 13786 |
| 281 | 10710 | 2024 | 12255 | 3779 | 13787 |
| 282 | 10710 | 2025 | 12256 | 3780 | 13788 |
| 283 | 10710 | 2026 | 12257 | 3781 | 13789 |
| 284 | 10710 | 2027 | 12258 | 3782 | 13790 |
| 285 | 10710 | 2028 | 12259 | 3783 | 13791 |
| 286 | 10710 | 2029 | 12260 | 3784 | 13792 |
| 287 | 10711 | 2030 | 12261 | 3785 | 13793 |
| 288 | 10712 | 2031 | 12262 | 3786 | 13794 |
| 289 | 10713 | 2032 | 12263 | 3787 | 13794 |
| 290 | 10714 | 2033 | 12264 | 3788 | 13795 |
| 291 | 10715 | 2034 | 12265 | 3789 | 13795 |
| 292 | 10716 | 2035 | 12266 | 3790 | 13796 |
| 293 | 10717 | 2036 | 12267 | 3791 | 13797 |
| 294 | 10717 | 2037 | 12268 | 3792 | 13798 |
| 295 | 10718 | 2038 | 12269 | 3793 | 13799 |
| 296 | 10719 | 2039 | 12270 | 3794 | 13800 |
| 297 | 10720 | 2040 | 12271 | 3795 | 13801 |
| 298 | 10721 | 2041 | 12272 | 3796 | 13802 |
| 299 | 10722 | 2042 | 12273 | 3797 | 13803 |
| 300 | 10723 | 2043 | 12274 | 3798 | 13804 |
| 301 | 10724 | 2044 | 12275 | 3799 | 13805 |
| 302 | 10725 | 2045 | 12276 | 3800 | 13806 |
| 303 | 10726 | 2046 | 12277 | 3801 | 13807 |
| 304 | 10727 | 2047 | 12278 | 3802 | 13808 |
| 305 | 10728 | 2048 | 12279 | 3803 | 13809 |
| 306 | 10729 | 2049 | 12280 | 3804 | 13810 |
| 307 | 10730 | 2050 | 12281 | 3805 | 13811 |
| 308 | 10731 | 2051 | 12281 | 3806 | 13812 |
| 309 | 10731 | 2052 | 12282 | 3807 | 13813 |
| 310 | 10732 | 2053 | 12283 | 3808 | 13814 |
| 311 | 10733 | 2054 | 12285 | 3809 | 13815 |
| 312 | 10734 | 2055 | 12286 | 3810 | 13815 |
| 313 | 10735 | 2056 | 12287 | 3811 | 13815 |
| 314 | 10736 | 2057 | 12288 | 3812 | 13816 |
| 315 | 10737 | 2058 | 12289 | 3813 | 13817 |
| 316 | 10738 | 2059 | 12290 | 3814 | 13817 |
| 317 | 10739 | 2060 | 12291 | 3815 | 13817 |
| 318 | 10740 | 2061 | 12292 | 3816 | 13817 |
| 319 | 10741 | 2062 | 12293 | 3817 | 13817 |
| 320 | 10742 | 2063 | 12294 | 3818 | 13817 |
| 321 | 10743 | 2064 | 12295 | 3819 | 13817 |
| 322 | 10744 | 2065 | 12296 | 3820 | 13818 |
| 323 | 10745 | 2066 | 12297 | 3821 | 13818 |
| 324 | 10746 | 2067 | 12298 | 3822 | 13819 |
| 325 | 10747 | 2068 | 12299 | 3823 | 13820 |
| 326 | 10748 | 2069 | 12300 | 3824 | 13821 |
| 327 | 10748 | 2070 | 12301 | 3825 | 13821 |
| 328 | 10749 | 2071 | 12302 | 3826 | 13822 |
| 329 | 10750 | 2072 | 12303 | 3827 | 13822 |
| 330 | 10751 | 2073 | 12304 | 3828 | 13822 |
| 331 | 10752 | 2074 | 12305 | 3829 | 13822 |
| 332 | 10753 | 2075 | 12306 | 3830 | 13823 |
| 333 | 10754 | 2076 | 12307 | 3831 | 13824 |
| 334 | 10755 | 2077 | 12308 | 3832 | 13825 |
| 335 | 10756 | 2078 | 12309 | 3833 | 13825 |
| 335 | 10758 | 2079 | 12310 | 3834 | 13826 |
| 336 | 10757 | 2080 | 12311 | 3835 | 13827 |
| 337 | 10757 | 2081 | 12312 | 3836 | 13828 |
| 338 | 10759 | 2082 | 12313 | 3837 | 13829 |
| 339 | 10760 | 2083 | 12314 | 3838 | 13830 |
| 340 | 10761 | 2084 | 12315 | 3839 | 13831 |
| 341 | 10762 | 2085 | 12316 | 3840 | 13832 |
| 342 | 10763 | 2086 | 12317 | 3841 | 13833 |
| 343 | 10764 | 2087 | 12318 | 3842 | 13834 |
| 344 | 10765 | 2088 | 12319 | 3843 | 13835 |
| 345 | 10766 | 2089 | 12320 | 3844 | 13836 |
| 346 | 10767 | 2090 | 12321 | 3845 | 13836 |
| 347 | 10768 | 2091 | 12321 | 3846 | 13837 |
| 348 | 10769 | 2092 | 12322 | 3847 | 13838 |
| 349 | 10770 | 2093 | 12322 | 3848 | 13839 |
| 350 | 10771 | 2094 | 12323 | 3849 | 13840 |
| 351 | 10772 | 2095 | 12324 | 3850 | 13841 |
| 352 | 10773 | 2096 | 12325 | 3851 | 13842 |
| 353 | 10774 | 2097 | 12326 | 3852 | 13843 |
| 354 | 10775 | 2098 | 12327 | 3853 | 13844 |
| 355 | 10776 | 2099 | 12328 | 3854 | 13845 |
| 356 | 10777 | 2100 | 12329 | 3855 | 13846 |
| 357 | 10777 | 2101 | 12329 | 3856 | 13847 |
| 358 | 10778 | 2102 | 12330 | 3857 | 13848 |
| 359 | 10779 | 2103 | 12331 | 3858 | 13849 |
| 360 | 10780 | 2104 | 12332 | 3859 | 13850 |
| 361 | 10780 | 2105 | 12333 | 3860 | 13851 |
| 362 | 10781 | 2106 | 12334 | 3861 | 13852 |
| 363 | 10782 | 2107 | 12335 | 3862 | 13853 |
| 364 | 10783 | 2108 | 12336 | 3863 | 13854 |
| 365 | 10784 | 2109 | 12337 | 3864 | 13855 |
| 366 | 10785 | 2110 | 12338 | 3865 | 13856 |
| 367 | 10785 | 2111 | 12339 | 3866 | 13857 |
| 368 | 10785 | 2112 | 12340 | 3867 | 13858 |
| 369 | 10786 | 2113 | 12341 | 3868 | 13859 |
| 370 | 10786 | 2114 | 12342 | 3869 | 13860 |
| 371 | 10787 | 2115 | 12343 | 3870 | 13861 |
| 372 | 10788 | 2116 | 12344 | 3871 | 13862 |
| 373 | 10789 | 2117 | 12345 | 3872 | 13863 |
| 374 | 10790 | 2118 | 12346 | 3873 | 13864 |
| 375 | 10791 | 2119 | 12347 | 3874 | 13865 |
| 376 | 10792 | 2120 | 12348 | 3875 | 13866 |
| 377 | 10793 | 2121 | 12349 | 3876 | 13867 |
| 378 | 10794 | 2122 | 12350 | 3877 | 13867 |
| 379 | 10794 | 2123 | 12351 | 3878 | 13868 |
| 380 | 10795 | 2124 | 12352 | 3879 | 13869 |
| 381 | 10796 | 2125 | 12353 | 3880 | 13870 |
| 382 | 10797 | 2126 | 12354 | 3881 | 13871 |
| 383 | 10798 | 2127 | 12355 | 3882 | 13872 |
| 384 | 10799 | 2128 | 12356 | 3883 | 13873 |
| 385 | 10800 | 2129 | 12357 | 3884 | 13874 |
| 386 | 10801 | 2130 | 12358 | 3885 | 13875 |
| 387 | 10802 | 2131 | 12359 | 3886 | 13876 |
| 388 | 10803 | 2132 | 12360 | 3887 | 13877 |
| 389 | 10804 | 2133 | 12361 | 3888 | 13878 |
| 390 | 10805 | 2134 | 12362 | 3889 | 13879 |
| 391 | 10806 | 2134 | 14621 | 3890 | 13880 |
| 392 | 10807 | 2134 | 14627 | 3891 | 13881 |
| 393 | 10808 | 2135 | 12363 | 3892 | 13881 |
| 394 | 10809 | 2136 | 12364 | 3893 | 13882 |
| 395 | 10810 | 2137 | 12365 | 3894 | 13883 |
| 396 | 10811 | 2138 | 12366 | 3895 | 13884 |
| 397 | 10812 | 2139 | 12367 | 3896 | 13885 |
| 398 | 10812 | 2140 | 12367 | 3897 | 13886 |
| 399 | 10813 | 2141 | 12368 | 3898 | 13887 |
| 400 | 10814 | 2142 | 12369 | 3899 | 13888 |
| 401 | 10814 | 2143 | 12370 | 3900 | 13889 |
| 402 | 10815 | 2144 | 12371 | 3901 | 13889 |
| 403 | 10815 | 2145 | 12372 | 3902 | 13889 |
| 404 | 10815 | 2146 | 12373 | 3903 | 13890 |
| 405 | 10815 | 2147 | 12374 | 3904 | 13891 |
| 406 | 10816 | 2148 | 12374 | 3905 | 13892 |
| 407 | 10817 | 2149 | 12375 | 3906 | 13893 |
| 408 | 10818 | 2150 | 12376 | 3907 | 13893 |
| 409 | 10819 | 2151 | 12377 | 3908 | 13893 |
| 410 | 10820 | 2152 | 12378 | 3909 | 13894 |
| 411 | 10821 | 2153 | 12379 | 3910 | 13895 |
| 412 | 10822 | 2154 | 12380 | 3911 | 13896 |
| 413 | 10823 | 2155 | 12381 | 3912 | 13897 |
| 414 | 10824 | 2156 | 12382 | 3913 | 13897 |
| 415 | 10825 | 2157 | 12383 | 3914 | 13897 |
| 416 | 10826 | 2158 | 12384 | 3915 | 13897 |
| 417 | 10827 | 2159 | 12385 | 3916 | 13898 |
| 418 | 10828 | 2160 | 12386 | 3917 | 13899 |
| 419 | 10829 | 2161 | 12387 | 3918 | 13900 |
| 420 | 10829 | 2162 | 12388 | 3919 | 13901 |
| 421 | 10830 | 2163 | 12389 | 3920 | 13902 |
| 422 | 10831 | 2164 | 12390 | 3921 | 13903 |
| 423 | 10832 | 2165 | 12391 | 3922 | 13904 |
| 424 | 10833 | 2165 | 14453 | 3923 | 13905 |
| 425 | 10834 | 2166 | 12392 | 3924 | 13906 |
| 426 | 10835 | 2166 | 14417 | 3925 | 13907 |
| 427 | 10836 | 2167 | 12393 | 3926 | 13907 |
| 428 | 10837 | 2168 | 12394 | 3927 | 13908 |
| 429 | 10838 | 2169 | 12395 | 3928 | 13908 |
| 430 | 10839 | 2170 | 12396 | 3929 | 13909 |
| 431 | 10840 | 2171 | 12397 | 3930 | 13909 |
| 432 | 10841 | 2172 | 12398 | 3931 | 13910 |
| 433 | 10842 | 2173 | 12399 | 3932 | 13911 |
| 434 | 10843 | 2174 | 12400 | 3933 | 13912 |
| 435 | 10844 | 2175 | 12401 | 3934 | 13913 |
| 436 | 10845 | 2176 | 12402 | 3935 | 13914 |
| 437 | 10846 | 2177 | 12403 | 3936 | 13915 |
| 438 | 10847 | 2178 | 12404 | 3937 | 13915 |
| 439 | 10848 | 2179 | 12405 | 3938 | 13916 |
| 440 | 10849 | 2180 | 12406 | 3939 | 13917 |
| 441 | 10850 | 2181 | 12407 | 3940 | 13918 |
| 441 | 10851 | 2182 | 12408 | 3941 | 13919 |
| 442 | 10852 | 2183 | 12409 | 3942 | 13919 |
| 443 | 10853 | 2184 | 12410 | 3943 | 13919 |
| 444 | 10854 | 2185 | 12411 | 3944 | 13920 |
| 445 | 10855 | 2186 | 12412 | 3945 | 13920 |
| 446 | 10856 | 2187 | 12413 | 3946 | 13921 |
| 447 | 10857 | 2188 | 12414 | 3947 | 13921 |
| 448 | 10858 | 2189 | 12415 | 3948 | 13921 |
| 449 | 10859 | 2190 | 12416 | 3949 | 13921 |
| 450 | 10860 | 2191 | 12417 | 3950 | 13921 |
| 451 | 10861 | 2192 | 12418 | 3951 | 13921 |
| 452 | 10862 | 2193 | 12418 | 3952 | 13921 |
| 453 | 10862 | 2194 | 12418 | 3953 | 13921 |
| 454 | 10863 | 2195 | 12418 | 3954 | 13921 |
| 455 | 10864 | 2196 | 12419 | 3955 | 13921 |
| 456 | 10865 | 2197 | 12420 | 3956 | 13921 |
| 457 | 10866 | 2197 | 13189 | 3957 | 13921 |
| 458 | 10867 | 2198 | 12421 | 3958 | 13921 |
| 459 | 10868 | 2199 | 12422 | 3959 | 13921 |
| 460 | 10869 | 2200 | 12423 | 3960 | 13921 |
| 461 | 10870 | 2201 | 12424 | 3961 | 13921 |
| 462 | 10871 | 2202 | 12425 | 3962 | 13921 |
| 463 | 10872 | 2203 | 12426 | 3963 | 13921 |
| 464 | 10873 | 2204 | 12427 | 3964 | 13922 |
| 465 | 10874 | 2205 | 12428 | 3965 | 13922 |
| 466 | 10875 | 2206 | 12429 | 3966 | 13922 |
| 467 | 10876 | 2207 | 12430 | 3967 | 13923 |
| 468 | 10877 | 2208 | 12431 | 3968 | 13924 |
| 469 | 10878 | 2209 | 12432 | 3969 | 13925 |
| 470 | 10878 | 2210 | 12433 | 3970 | 13926 |
| 471 | 10879 | 2211 | 12434 | 3971 | 13927 |
| 472 | 10880 | 2212 | 12436 | 3972 | 13927 |
| 473 | 10881 | 2213 | 12437 | 3973 | 13927 |
| 474 | 10882 | 2214 | 12438 | 3974 | 13927 |
| 475 | 10883 | 2215 | 12439 | 3975 | 13927 |
| 476 | 10884 | 2216 | 12440 | 3976 | 13928 |
| 477 | 10885 | 2217 | 12441 | 3977 | 13929 |
| 478 | 10886 | 2218 | 12442 | 3978 | 13930 |
| 479 | 10887 | 2219 | 12443 | 3979 | 13931 |
| 480 | 10887 | 2220 | 12444 | 3980 | 13932 |
| 481 | 10888 | 2221 | 12445 | 3981 | 13932 |
| 482 | 10889 | 2222 | 12446 | 3982 | 13932 |
| 483 | 10890 | 2223 | 12447 | 3983 | 13933 |
| 484 | 10891 | 2224 | 12448 | 3984 | 13934 |
| 485 | 10892 | 2225 | 12449 | 3985 | 13934 |
| 486 | 10893 | 2226 | 12450 | 3986 | 13934 |
| 487 | 10894 | 2227 | 12451 | 3987 | 13934 |
| 488 | 10895 | 2228 | 12452 | 3988 | 13935 |
| 489 | 10895 | 2229 | 12453 | 3989 | 13936 |
| 490 | 10896 | 2230 | 12453 | 3990 | 13937 |
| 49 | 10897 | 2231 | 12454 | 3991 | 13938 |
| 492 | 10898 | 2232 | 12455 | 3992 | 13939 |
| 493 | 10899 | 2233 | 12455 | 3993 | 13940 |
| 494 | 10900 | 2234 | 12456 | 3994 | 13941 |
| 495 | 10901 | 2235 | 12457 | 3995 | 13942 |
| 496 | 10902 | 2236 | 12458 | 3996 | 13943 |
| 497 | 10903 | 2237 | 12459 | 3997 | 13944 |
| 498 | 10904 | 2238 | 12460 | 3998 | 13945 |
| 499 | 10905 | 2239 | 12461 | 3999 | 13946 |
| 500 | 10906 | 2240 | 12462 | 4000 | 13947 |
| 501 | 10907 | 2241 | 12463 | 4001 | 13948 |
| 502 | 10908 | 2242 | 12464 | 4002 | 13949 |
| 503 | 10909 | 2243 | 12465 | 4003 | 13950 |
| 504 | 10910 | 2244 | 12466 | 4004 | 13950 |
| 505 | 10911 | 2245 | 12467 | 4005 | 13951 |
| 506 | 10911 | 2246 | 12468 | 4006 | 13951 |
| 507 | 10912 | 2247 | 12469 | 4007 | 13952 |
| 508 | 10913 | 2248 | 12470 | 4008 | 13953 |
| 509 | 10914 | 2249 | 12471 | 4009 | 13954 |
| 510 | 10915 | 2250 | 12472 | 4010 | 13955 |
| 511 | 10916 | 2251 | 12473 | 4011 | 13956 |
| 512 | 10917 | 2252 | 12474 | 4012 | 13957 |
| 513 | 10918 | 2253 | 12475 | 4013 | 13958 |
| 514 | 10919 | 2254 | 12477 | 4014 | 13959 |
| 515 | 10920 | 2255 | 12478 | 4015 | 13960 |
| 516 | 10921 | 2255 | 14171 | 4016 | 13961 |
| 517 | 10922 | 2256 | 12479 | 4017 | 13962 |
| 518 | 10923 | 2257 | 12480 | 4018 | 13963 |
| 519 | 10924 | 2258 | 12481 | 4019 | 13964 |
| 520 | 10925 | 2259 | 12482 | 4020 | 13964 |
| 521 | 10926 | 2260 | 12483 | 4021 | 13965 |
| 522 | 10927 | 2261 | 12484 | 4022 | 13966 |
| 523 | 10928 | 2262 | 12485 | 4023 | 13967 |
| 524 | 10929 | 2263 | 12486 | 4024 | 13968 |
| 525 | 10930 | 2264 | 12487 | 4025 | 13969 |
| 526 | 10931 | 2265 | 12488 | 4026 | 13970 |
| 527 | 10932 | 2266 | 12489 | 4027 | 13971 |
| 528 | 10933 | 2267 | 12490 | 4028 | 13972 |
| 528 | 10934 | 2268 | 12491 | 4029 | 13973 |
| 529 | 10935 | 2269 | 12491 | 4030 | 13974 |
| 530 | 10936 | 2270 | 12492 | 4031 | 13975 |
| 531 | 10937 | 2271 | 12493 | 4032 | 13976 |
| 532 | 10938 | 2272 | 12494 | 4033 | 13977 |
| 533 | 10939 | 2273 | 12495 | 4034 | 13978 |
| 534 | 10940 | 2274 | 12496 | 4035 | 13979 |
| 535 | 10941 | 2275 | 12497 | 4036 | 13980 |
| 536 | 10942 | 2276 | 12498 | 4037 | 13982 |
| 537 | 10943 | 2277 | 12499 | 4038 | 13982 |
| 538 | 10944 | 2278 | 12500 | 4039 | 13983 |
| 539 | 10945 | 2279 | 12501 | 4040 | 13984 |
| 540 | 10945 | 2280 | 12502 | 4041 | 13985 |
| 541 | 10945 | 2281 | 12503 | 4042 | 13986 |
| 542 | 10945 | 2282 | 12504 | 4043 | 13987 |
| 543 | 10945 | 2283 | 12505 | 4044 | 13988 |
| 544 | 10946 | 2284 | 12505 | 4045 | 13988 |
| 545 | 10947 | 2285 | 12506 | 4046 | 13989 |
| 546 | 10948 | 2286 | 12507 | 4047 | 13990 |
| 547 | 10949 | 2287 | 12508 | 4048 | 13991 |
| 548 | 10950 | 2288 | 12509 | 4049 | 13991 |
| 549 | 10950 | 2289 | 12510 | 4050 | 13991 |
| 550 | 10951 | 2289 | 12511 | 4051 | 13992 |
| 551 | 10952 | 2290 | 12512 | 4052 | 13993 |
| 552 | 10953 | 2291 | 12513 | 4053 | 13994 |
| 553 | 10954 | 2292 | 12514 | 4054 | 13995 |
| 554 | 10955 | 2293 | 12515 | 4055 | 13996 |
| 555 | 10956 | 2294 | 12516 | 4056 | 13997 |
| 556 | 10957 | 2295 | 12517 | 4057 | 13998 |
| 557 | 10958 | 2296 | 12518 | 4058 | 13999 |
| 558 | 10959 | 2297 | 12519 | 4059 | 14000 |
| 559 | 10960 | 2298 | 12520 | 4060 | 14001 |
| 560 | 10961 | 2299 | 12521 | 4061 | 14002 |
| 561 | 10962 | 2300 | 12522 | 4062 | 14003 |
| 562 | 10963 | 2301 | 12523 | 4063 | 14004 |
| 563 | 10964 | 2302 | 12524 | 4064 | 14005 |
| 564 | 10965 | 2303 | 12525 | 4065 | 14006 |
| 565 | 10966 | 2304 | 12526 | 4066 | 14007 |
| 566 | 10966 | 2305 | 12527 | 4067 | 14008 |
| 567 | 10967 | 2306 | 12528 | 4068 | 14009 |
| 568 | 10968 | 2307 | 12529 | 4069 | 14010 |
| 569 | 10969 | 2308 | 12530 | 4070 | 14011 |
| 570 | 10970 | 2309 | 12531 | 4071 | 14012 |
| 571 | 10970 | 2310 | 12532 | 4072 | 14013 |
| 572 | 10971 | 2311 | 12533 | 4073 | 14014 |
| 573 | 10972 | 2312 | 12534 | 4074 | 14015 |
| 574 | 10973 | 2313 | 12535 | 4075 | 14016 |
| 575 | 10974 | 2314 | 12536 | 4076 | 14017 |
| 576 | 10974 | 2315 | 12537 | 4077 | 14018 |
| 577 | 10975 | 2316 | 12538 | 4078 | 14019 |
| 578 | 10976 | 2317 | 12539 | 4079 | 14020 |
| 579 | 10977 | 2318 | 12540 | 4080 | 14021 |
| 580 | 10978 | 2319 | 12541 | 4081 | 14022 |
| 581 | 10978 | 2320 | 12542 | 4082 | 14023 |
| 582 | 10979 | 2321 | 12543 | 4083 | 14024 |
| 583 | 10980 | 2322 | 12543 | 4084 | 14025 |
| 584 | 10981 | 2323 | 12544 | 4085 | 14025 |
| 585 | 10982 | 2324 | 12545 | 4086 | 14026 |
| 586 | 10983 | 2325 | 12546 | 4087 | 14027 |
| 587 | 10984 | 2326 | 12547 | 4088 | 14027 |
| 588 | 10985 | 2327 | 12548 | 4089 | 14027 |
| 589 | 10986 | 2328 | 12549 | 4090 | 14028 |
| 590 | 10986 | 2329 | 12550 | 4091 | 14029 |
| 591 | 10987 | 2330 | 12551 | 4092 | 14030 |
| 592 | 10988 | 2331 | 12552 | 4093 | 14031 |
| 593 | 10989 | 2332 | 12553 | 4094 | 14032 |
| 594 | 10990 | 2333 | 12554 | 4095 | 14033 |
| 595 | 10991 | 2334 | 12555 | 4096 | 14034 |
| 596 | 10991 | 2335 | 12555 | 4097 | 14035 |
| 597 | 10991 | 2336 | 12556 | 4098 | 14036 |
| 598 | 10991 | 2337 | 12557 | 4099 | 14037 |
| 599 | 10991 | 2338 | 12558 | 4100 | 14038 |
| 600 | 10991 | 2339 | 12559 | 4101 | 14039 |
| 601 | 10992 | 2340 | 12560 | 4102 | 14040 |
| 602 | 10993 | 2341 | 12561 | 4103 | 14041 |
| 603 | 10994 | 2342 | 12562 | 4104 | 14042 |
| 604 | 10995 | 2343 | 12563 | 4105 | 14043 |
| 605 | 10995 | 2344 | 12563 | 4106 | 14044 |
| 606 | 10996 | 2345 | 12563 | 4107 | 14045 |
| 607 | 10997 | 2346 | 12564 | 4108 | 14046 |
| 608 | 10998 | 2347 | 12564 | 4109 | 14047 |
| 609 | 10999 | 2348 | 12564 | 4110 | 14048 |
| 610 | 11000 | 2349 | 12564 | 4111 | 14049 |
| 611 | 11001 | 2350 | 12564 | 4112 | 14050 |
| 612 | 11002 | 2351 | 12564 | 4113 | 14051 |
| 613 | 11003 | 2352 | 12564 | 4114 | 14052 |
| 614 | 11003 | 2353 | 12564 | 4115 | 14053 |
| 615 | 11004 | 2354 | 12564 | 4116 | 14054 |
| 616 | 11005 | 2355 | 12564 | 4117 | 14055 |
| 617 | 11006 | 2356 | 12565 | 4118 | 14056 |
| 618 | 11006 | 2357 | 12566 | 4119 | 14057 |
| 619 | 11006 | 2358 | 12567 | 4120 | 14058 |
| 620 | 11006 | 2359 | 12568 | 4121 | 14059 |
| 621 | 11007 | 2360 | 12569 | 4122 | 14060 |
| 621 | 11627 | 2361 | 12570 | 4123 | 14060 |
| 622 | 11008 | 2362 | 12571 | 4124 | 14060 |
| 623 | 11008 | 2363 | 12572 | 4125 | 14061 |
| 624 | 11008 | 2364 | 12573 | 4126 | 14062 |
| 625 | 11008 | 2365 | 12573 | 4127 | 14063 |
| 626 | 11009 | 2366 | 12574 | 4128 | 14064 |
| 627 | 11010 | 2367 | 12574 | 4129 | 14065 |
| 628 | 11011 | 2368 | 12574 | 4130 | 14065 |
| 629 | 11012 | 2369 | 12574 | 4131 | 14066 |
| 630 | 11013 | 2370 | 12575 | 4132 | 14067 |
| 631 | 11014 | 2371 | 12576 | 4133 | 14068 |
| 632 | 11015 | 2372 | 12577 | 4134 | 14069 |
| 633 | 11016 | 2373 | 12578 | 4135 | 14070 |
| 634 | 11017 | 2374 | 12578 | 4136 | 14071 |
| 635 | 11018 | 2375 | 12578 | 4137 | 14072 |
| 636 | 11019 | 2376 | 12579 | 4138 | 14073 |
| 637 | 11020 | 2377 | 12580 | 4139 | 14074 |
| 638 | 11021 | 2378 | 12581 | 4140 | 14075 |
| 639 | 11022 | 2379 | 12582 | 4141 | 14076 |
| 640 | 11023 | 2380 | 12582 | 4142 | 14077 |
| 641 | 11024 | 2381 | 12583 | 4143 | 14078 |
| 642 | 11025 | 2382 | 12584 | 4144 | 14079 |
| 643 | 11026 | 2383 | 12586 | 4145 | 14080 |
| 644 | 11027 | 2384 | 12587 | 4146 | 14081 |
| 645 | 11028 | 2385 | 12588 | 4147 | 14082 |
| 646 | 11029 | 2386 | 12589 | 4148 | 14083 |
| 647 | 11030 | 2387 | 12590 | 4149 | 14083 |
| 648 | 11031 | 2388 | 12591 | 4150 | 14084 |
| 649 | 11032 | 2389 | 12593 | 4151 | 14085 |
| 650 | 11033 | 2390 | 12594 | 4152 | 14086 |
| 651 | 11034 | 2391 | 12596 | 4153 | 14086 |
| 652 | 11035 | 2392 | 12597 | 4154 | 14087 |
| 653 | 11036 | 2393 | 12598 | 4155 | 14088 |
| 654 | 11037 | 2394 | 12599 | 4156 | 14089 |
| 654 | 11735 | 2395 | 12600 | 4157 | 14090 |
| 655 | 11038 | 2396 | 12601 | 4158 | 14091 |
| 656 | 11039 | 2397 | 12602 | 4159 | 14092 |
| 656 | 13162 | 2398 | 12603 | 4160 | 14093 |
| 657 | 11040 | 2399 | 12604 | 4161 | 14094 |
| 658 | 11041 | 2400 | 12605 | 4162 | 14095 |
| 659 | 11042 | 2401 | 12606 | 4163 | 14096 |
| 660 | 11043 | 2402 | 12607 | 4164 | 14097 |
| 661 | 11044 | 2403 | 12607 | 4165 | 14098 |
| 662 | 11045 | 2404 | 12608 | 4166 | 14099 |
| 663 | 11046 | 2405 | 12609 | 4167 | 14100 |
| 663 | 13409 | 2406 | 12610 | 4168 | 14100 |
| 664 | 11047 | 2407 | 12611 | 4169 | 14101 |
| 665 | 11048 | 2408 | 12612 | 4170 | 14102 |
| 665 | 13593 | 2409 | 12613 | 4171 | 14103 |
| 666 | 11049 | 2410 | 12613 | 4172 | 14104 |
| 667 | 11050 | 2411 | 12614 | 4173 | 14105 |
| 668 | 11051 | 2412 | 12615 | 4174 | 14106 |
| 669 | 11052 | 2413 | 12616 | 4175 | 14107 |
| 670 | 11053 | 2414 | 12616 | 4176 | 14107 |
| 671 | 11054 | 2415 | 12617 | 4177 | 14108 |
| 672 | 11055 | 2416 | 12618 | 4178 | 14109 |
| 673 | 11056 | 2417 | 12619 | 4179 | 14110 |
| 674 | 11057 | 2418 | 12620 | 4180 | 14111 |
| 675 | 11058 | 2419 | 12621 | 4181 | 14111 |
| 676 | 11059 | 2420 | 12621 | 4182 | 14112 |
| 677 | 11060 | 2421 | 12621 | 4183 | 14113 |
| 678 | 11061 | 2422 | 12622 | 4184 | 14114 |
| 679 | 11062 | 2423 | 12623 | 4185 | 14115 |
| 680 | 11063 | 2424 | 12623 | 4186 | 14116 |
| 681 | 11064 | 2425 | 12624 | 4187 | 14117 |
| 682 | 11064 | 2426 | 12625 | 4188 | 14118 |
| 683 | 11065 | 2427 | 12626 | 4189 | 14119 |
| 684 | 11066 | 2428 | 12626 | 4190 | 14120 |
| 685 | 11067 | 2429 | 12627 | 4191 | 14121 |
| 686 | 11068 | 2430 | 12628 | 4192 | 14122 |
| 687 | 11069 | 2431 | 12629 | 4193 | 14122 |
| 688 | 11070 | 2432 | 12630 | 4194 | 14122 |
| 689 | 11071 | 2433 | 12631 | 4195 | 14122 |
| 690 | 11072 | 2434 | 12632 | 4196 | 14122 |
| 691 | 11073 | 2435 | 12633 | 4197 | 14122 |
| 692 | 11074 | 2436 | 12634 | 4198 | 14122 |
| 693 | 11075 | 2437 | 12635 | 4199 | 14124 |
| 694 | 11076 | 2438 | 12636 | 4200 | 14125 |
| 695 | 11077 | 2439 | 12637 | 4201 | 14127 |
| 696 | 11077 | 2440 | 12638 | 4202 | 14128 |
| 697 | 11078 | 2441 | 12639 | 4203 | 14128 |
| 698 | 11079 | 2442 | 12640 | 4204 | 14129 |
| 699 | 11080 | 2443 | 12641 | 4205 | 14130 |
| 700 | 11081 | 2444 | 12641 | 4206 | 14131 |
| 701 | 11082 | 2445 | 12642 | 4207 | 14132 |
| 702 | 11083 | 2446 | 12643 | 4208 | 14133 |
| 703 | 11084 | 2447 | 12644 | 4209 | 14133 |
| 704 | 11085 | 2448 | 12645 | 4210 | 14134 |
| 705 | 11086 | 2449 | 12646 | 4211 | 14135 |
| 706 | 11087 | 2450 | 12647 | 4212 | 14136 |
| 707 | 11088 | 2451 | 12648 | 4213 | 14137 |
| 708 | 11089 | 2452 | 12649 | 4214 | 14138 |
| 709 | 11090 | 2453 | 12650 | 4215 | 14139 |
| 710 | 11091 | 2454 | 12651 | 4216 | 14140 |
| 711 | 11091 | 2455 | 12652 | 4217 | 14141 |
| 712 | 11092 | 2456 | 12653 | 4218 | 14142 |
| 713 | 11093 | 2457 | 12654 | 4219 | 14143 |
| 714 | 11094 | 2458 | 12655 | 4220 | 14144 |
| 715 | 11095 | 2459 | 12656 | 4221 | 14145 |
| 716 | 11096 | 2460 | 12657 | 4222 | 14145 |
| 717 | 11097 | 2461 | 12658 | 4223 | 14146 |
| 718 | 11098 | 2462 | 12659 | 4224 | 14147 |
| 719 | 11099 | 2463 | 12660 | 4225 | 14148 |
| 720 | 11100 | 2464 | 12661 | 4226 | 14149 |
| 721 | 11100 | 2465 | 12662 | 4227 | 14149 |
| 722 | 11101 | 2466 | 12663 | 4228 | 14150 |
| 723 | 11102 | 2467 | 12664 | 4229 | 14151 |
| 724 | 11103 | 2468 | 12665 | 4230 | 14152 |
| 725 | 11104 | 2469 | 12666 | 4231 | 14153 |
| 726 | 11105 | 2470 | 12667 | 4232 | 14154 |
| 727 | 11106 | 2471 | 12668 | 4233 | 14155 |
| 728 | 11107 | 2471 | 12677 | 4234 | 14156 |
| 729 | 11108 | 2472 | 12669 | 4235 | 14157 |
| 730 | 11109 | 2473 | 12670 | 4236 | 14158 |
| 731 | 11110 | 2474 | 12671 | 4237 | 14158 |
| 732 | 11111 | 2475 | 12672 | 4238 | 14159 |
| 732 | 14274 | 2476 | 12673 | 4239 | 14160 |
| 732 | 14361 | 2477 | 12673 | 4240 | 14161 |
| 733 | 11113 | 2478 | 12673 | 4241 | 14161 |
| 734 | 11114 | 2479 | 12674 | 4242 | 14161 |
| 735 | 11114 | 2480 | 12675 | 4243 | 14162 |
| 736 | 11115 | 2481 | 12676 | 4244 | 14163 |
| 737 | 11116 | 2482 | 12678 | 4245 | 14164 |
| 738 | 11117 | 2483 | 12679 | 4246 | 14164 |
| 739 | 11118 | 2484 | 12680 | 4247 | 14164 |
| 740 | 11119 | 2485 | 12681 | 4248 | 14165 |
| 741 | 11120 | 2486 | 12682 | 4249 | 14166 |
| 742 | 11121 | 2487 | 12683 | 4250 | 14167 |
| 743 | 11122 | 2488 | 12684 | 4251 | 14168 |
| 744 | 11123 | 2489 | 12685 | 4252 | 14169 |
| 745 | 11123 | 2490 | 12686 | 4253 | 14170 |
| 746 | 11124 | 2491 | 12687 | 4254 | 14172 |
| 747 | 11125 | 2492 | 12688 | 4255 | 14172 |
| 748 | 11126 | 2493 | 12689 | 4256 | 14173 |
| 749 | 11127 | 2494 | 12690 | 4257 | 14174 |
| 750 | 11128 | 2495 | 12691 | 4258 | 14174 |
| 751 | 11129 | 2496 | 12692 | 4259 | 14176 |
| 751 | 11741 | 2497 | 12693 | 4260 | 14177 |
| 752 | 11130 | 2498 | 12694 | 4261 | 14178 |
| 752 | 11139 | 2499 | 12695 | 4262 | 14179 |
| 753 | 11131 | 2500 | 12696 | 4263 | 14180 |
| 754 | 11132 | 2501 | 12697 | 4264 | 14180 |
| 755 | 11133 | 2502 | 12698 | 4265 | 14181 |
| 756 | 11134 | 2503 | 12699 | 4266 | 14181 |
| 757 | 11135 | 2504 | 12699 | 4267 | 14182 |
| 758 | 11136 | 2505 | 12700 | 4268 | 14183 |
| 759 | 11137 | 2506 | 12701 | 4269 | 14184 |
| 760 | 11138 | 2507 | 12702 | 4270 | 14185 |
| 761 | 11140 | 2508 | 12703 | 4271 | 14186 |
| 762 | 11141 | 2509 | 12704 | 4272 | 14187 |
| 763 | 11142 | 2510 | 12705 | 4273 | 14188 |
| 764 | 11143 | 2511 | 12706 | 4274 | 14188 |
| 765 | 11144 | 2512 | 12707 | 4275 | 14189 |
| 766 | 11145 | 2513 | 12708 | 4276 | 14190 |
| 767 | 11146 | 2514 | 12709 | 4277 | 14191 |
| 768 | 11147 | 2515 | 12710 | 4278 | 14191 |
| 769 | 11148 | 2516 | 12710 | 4279 | 14191 |
| 770 | 11149 | 2517 | 12711 | 4280 | 14191 |
| 770 | 11478 | 2518 | 12711 | 4281 | 14191 |
| 771 | 11150 | 2519 | 12712 | 4282 | 14192 |
| 772 | 11151 | 2520 | 12713 | 4283 | 14192 |
| 773 | 11152 | 2521 | 12714 | 4284 | 14193 |
| 774 | 11153 | 2522 | 12715 | 4285 | 14193 |
| 775 | 11154 | 2523 | 12716 | 4286 | 14193 |
| 776 | 11154 | 2524 | 12717 | 4287 | 14194 |
| 777 | 11155 | 2524 | 14370 | 4288 | 14195 |
| 777 | 13993 | 2524 | 14496 | 4289 | 14196 |
| 778 | 11156 | 2525 | 12718 | 4290 | 14197 |
| 779 | 11157 | 2526 | 12719 | 4291 | 14198 |
| 780 | 11158 | 2527 | 12720 | 4292 | 14199 |
| 781 | 11159 | 2528 | 12721 | 4293 | 14200 |
| 782 | 11160 | 2529 | 12722 | 4294 | 14201 |
| 782 | 12585 | 2530 | 12722 | 4295 | 14202 |
| 783 | 11161 | 2531 | 12723 | 4296 | 14203 |
| 784 | 11162 | 2532 | 12724 | 4297 | 14204 |
| 785 | 11163 | 2533 | 12724 | 4298 | 14205 |
| 786 | 11164 | 2534 | 12725 | 4299 | 14206 |
| 787 | 11165 | 2535 | 12726 | 4300 | 14206 |
| 788 | 11166 | 2536 | 12727 | 4301 | 14207 |
| 789 | 11167 | 2537 | 12728 | 4302 | 14208 |
| 790 | 11168 | 2538 | 12729 | 4303 | 14209 |
| 791 | 11169 | 2539 | 12730 | 4304 | 14210 |
| 792 | 11170 | 2540 | 12730 | 4305 | 14211 |
| 793 | 11171 | 2541 | 12730 | 4306 | 14212 |
| 794 | 11172 | 2542 | 12731 | 4307 | 14213 |
| 795 | 11173 | 2543 | 12732 | 4308 | 14214 |
| 796 | 11174 | 2544 | 12733 | 4309 | 14215 |
| 797 | 11175 | 2545 | 12733 | 4310 | 14216 |
| 798 | 11176 | 2546 | 12734 | 4311 | 14217 |
| 799 | 11177 | 2547 | 12735 | 4312 | 14218 |
| 800 | 11178 | 2548 | 12736 | 4313 | 14219 |
| 801 | 11179 | 2549 | 12737 | 4314 | 14220 |
| 802 | 11180 | 2550 | 12738 | 4315 | 14221 |
| 803 | 11181 | 2551 | 12739 | 4316 | 14221 |
| 804 | 11181 | 2552 | 12740 | 4317 | 14222 |
| 805 | 11182 | 2553 | 12741 | 4318 | 14223 |
| 806 | 11183 | 2554 | 12741 | 4319 | 14224 |
| 807 | 11184 | 2555 | 12742 | 4320 | 14226 |
| 808 | 11185 | 2556 | 12743 | 4321 | 14227 |
| 809 | 11186 | 2557 | 12744 | 4322 | 14228 |
| 810 | 11187 | 2558 | 12745 | 4323 | 14229 |
| 811 | 11188 | 2559 | 12746 | 4324 | 14230 |
| 812 | 11189 | 2560 | 12747 | 4325 | 14231 |
| 813 | 11190 | 2561 | 12747 | 4326 | 14232 |
| 814 | 11191 | 2562 | 12747 | 4327 | 14233 |
| 815 | 11192 | 2563 | 12748 | 4328 | 14234 |
| 816 | 11193 | 2564 | 12749 | 4329 | 14235 |
| 817 | 11194 | 2565 | 12750 | 4330 | 14236 |
| 818 | 11195 | 2566 | 12751 | 4331 | 14237 |
| 819 | 11196 | 2567 | 12751 | 4332 | 14238 |
| 820 | 11197 | 2568 | 12752 | 4333 | 14239 |
| 821 | 11198 | 2569 | 12753 | 4334 | 14239 |
| 822 | 11199 | 2570 | 12754 | 4335 | 14239 |
| 823 | 11199 | 2571 | 12755 | 4336 | 14240 |
| 824 | 11200 | 2572 | 12756 | 4337 | 14241 |
| 825 | 11201 | 2573 | 12757 | 4338 | 14242 |
| 826 | 11202 | 2574 | 12758 | 4339 | 14243 |
| 827 | 11203 | 2575 | 12759 | 4340 | 14244 |
| 828 | 11204 | 2576 | 12759 | 4341 | 14245 |
| 829 | 11205 | 2577 | 12759 | 4342 | 14246 |
| 830 | 11206 | 2578 | 12759 | 4343 | 14247 |
| 831 | 11207 | 2579 | 12759 | 4344 | 14248 |
| 832 | 11208 | 2580 | 12759 | 4345 | 14248 |
| 833 | 11208 | 2581 | 12760 | 4346 | 14248 |
| 834 | 11208 | 2582 | 12761 | 4347 | 14248 |
| 835 | 11209 | 2583 | 12762 | 4348 | 14248 |
| 836 | 11210 | 2584 | 12763 | 4349 | 14249 |
| 837 | 11211 | 2585 | 12764 | 4350 | 14250 |
| 838 | 11211 | 2586 | 12765 | 4351 | 14251 |
| 839 | 11211 | 2587 | 12766 | 4352 | 14252 |
| 840 | 11212 | 2588 | 12767 | 4353 | 14253 |
| 841 | 11213 | 2589 | 12768 | 4354 | 14254 |
| 842 | 11214 | 2590 | 12769 | 4355 | 14255 |
| 843 | 11215 | 2591 | 12770 | 4356 | 14256 |
| 844 | 11216 | 2592 | 12771 | 4357 | 14257 |
| 844 | 11423 | 2593 | 12772 | 4358 | 14258 |
| 845 | 11217 | 2594 | 12773 | 4359 | 14259 |
| 846 | 11218 | 2595 | 12773 | 4360 | 14260 |
| 847 | 11219 | 2596 | 12774 | 4361 | 14261 |
| 848 | 11220 | 2597 | 12775 | 4362 | 14261 |
| 849 | 11221 | 2598 | 12776 | 4363 | 14262 |
| 850 | 11222 | 2598 | 12777 | 4364 | 14263 |
| 851 | 11223 | 2599 | 12777 | 4365 | 14264 |
| 852 | 11224 | 2600 | 12777 | 4366 | 14264 |
| 853 | 11225 | 2601 | 12777 | 4367 | 14265 |
| 854 | 11226 | 2602 | 12778 | 4368 | 14265 |
| 855 | 11227 | 2603 | 12779 | 4369 | 14266 |
| 856 | 11227 | 2604 | 12780 | 4370 | 14267 |
| 857 | 11227 | 2605 | 12781 | 4371 | 14268 |
| 857 | 12435 | 2606 | 12782 | 4372 | 14269 |
| 858 | 11227 | 2607 | 12783 | 4373 | 14270 |
| 859 | 11227 | 2608 | 12784 | 4374 | 14271 |
| 860 | 11227 | 2609 | 12785 | 4375 | 14271 |
| 861 | 11227 | 2610 | 12786 | 4376 | 14272 |
| 862 | 11227 | 2611 | 12787 | 4377 | 14273 |
| 863 | 11228 | 2612 | 12788 | 4378 | 14275 |
| 864 | 11229 | 2613 | 12789 | 4379 | 14276 |
| 865 | 11230 | 2614 | 12790 | 4380 | 14277 |
| 866 | 11231 | 2615 | 12791 | 4381 | 14277 |
| 867 | 11232 | 2616 | 12792 | 4382 | 14278 |
| 868 | 11233 | 2617 | 12793 | 4383 | 14279 |
| 869 | 11234 | 2618 | 12794 | 4384 | 14280 |
| 870 | 11235 | 2619 | 12795 | 4385 | 14281 |
| 871 | 11236 | 2620 | 12796 | 4386 | 14281 |
| 872 | 11237 | 2620 | 13765 | 4387 | 14282 |
| 873 | 11238 | 2621 | 12797 | 4388 | 14283 |
| 874 | 11239 | 2622 | 12798 | 4389 | 14284 |
| 875 | 11240 | 2623 | 12799 | 4390 | 14285 |
| 876 | 11241 | 2624 | 12800 | 4391 | 14286 |
| 877 | 11242 | 2625 | 12801 | 4392 | 14287 |
| 878 | 11243 | 2626 | 12802 | 4393 | 14287 |
| 879 | 11244 | 2627 | 12803 | 4394 | 14287 |
| 880 | 11245 | 2628 | 12804 | 4395 | 14288 |
| 881 | 11246 | 2629 | 12805 | 4396 | 14288 |
| 882 | 11247 | 2630 | 12806 | 4397 | 14289 |
| 883 | 11248 | 2631 | 12807 | 4398 | 14289 |
| 884 | 11249 | 2632 | 12808 | 4399 | 14289 |
| 885 | 11250 | 2633 | 12809 | 4400 | 14290 |
| 886 | 11251 | 2634 | 12810 | 4401 | 14291 |
| 887 | 11252 | 2635 | 12811 | 4402 | 14292 |
| 888 | 11253 | 2636 | 12812 | 4403 | 14293 |
| 889 | 11254 | 2637 | 12813 | 4404 | 14294 |
| 890 | 11255 | 2638 | 12814 | 4405 | 14295 |
| 891 | 11256 | 2639 | 12814 | 4406 | 14296 |
| 892 | 11257 | 2640 | 12815 | 4407 | 14296 |
| 893 | 11257 | 2641 | 12816 | 4408 | 14297 |
| 894 | 11257 | 2642 | 12817 | 4409 | 14298 |
| 895 | 11258 | 2643 | 12818 | 4410 | 14299 |
| 896 | 11259 | 2644 | 12819 | 4411 | 14300 |
| 897 | 11260 | 2645 | 12820 | 4412 | 14301 |
| 898 | 11261 | 2646 | 12821 | 4413 | 14302 |
| 899 | 11262 | 2647 | 12822 | 4414 | 14303 |
| 900 | 11262 | 2648 | 12823 | 4415 | 14304 |
| 901 | 11263 | 2649 | 12823 | 4416 | 14305 |
| 902 | 11263 | 2650 | 12824 | 4417 | 14306 |
| 903 | 11263 | 2651 | 12825 | 4418 | 14307 |
| 904 | 11264 | 2652 | 12826 | 4419 | 14308 |
| 905 | 11265 | 2653 | 12827 | 4420 | 14309 |
| 906 | 11266 | 2654 | 12828 | 4421 | 14310 |
| 907 | 11267 | 2655 | 12829 | 4422 | 14311 |
| 908 | 11268 | 2656 | 12830 | 4423 | 14312 |
| 909 | 11269 | 2657 | 12831 | 4424 | 14313 |
| 910 | 11270 | 2658 | 12832 | 4425 | 14313 |
| 911 | 11271 | 2659 | 12833 | 4426 | 14313 |
| 912 | 11272 | 2660 | 12834 | 4427 | 14313 |
| 913 | 11273 | 2661 | 12835 | 4428 | 14314 |
| 914 | 11274 | 2662 | 12836 | 4429 | 14315 |
| 915 | 11275 | 2663 | 12836 | 4430 | 14316 |
| 916 | 11276 | 2664 | 12837 | 4431 | 14316 |
| 917 | 11277 | 2665 | 12838 | 4432 | 14317 |
| 918 | 11278 | 2666 | 12839 | 4433 | 14318 |
| 919 | 11279 | 2667 | 12840 | 4434 | 14319 |
| 920 | 11280 | 2668 | 12841 | 4435 | 14320 |
| 921 | 11281 | 2669 | 12842 | 4436 | 14321 |
| 922 | 11282 | 2670 | 12843 | 4437 | 14322 |
| 923 | 11282 | 2671 | 12844 | 4438 | 14323 |
| 924 | 11283 | 2672 | 12845 | 4439 | 14324 |
| 925 | 11284 | 2673 | 12846 | 4440 | 14325 |
| 926 | 11285 | 2674 | 12847 | 4441 | 14326 |
| 927 | 11285 | 2675 | 12848 | 4442 | 14326 |
| 928 | 11285 | 2676 | 12849 | 4443 | 14327 |
| 929 | 11285 | 2677 | 12850 | 4444 | 14328 |
| 930 | 11285 | 2678 | 12851 | 4445 | 14329 |
| 931 | 11285 | 2679 | 12852 | 4446 | 14330 |
| 932 | 11285 | 2680 | 12853 | 4447 | 14331 |
| 933 | 11286 | 2681 | 12854 | 4448 | 14332 |
| 934 | 11287 | 2682 | 12855 | 4449 | 14333 |
| 935 | 11288 | 2683 | 12856 | 4450 | 14334 |
| 936 | 11288 | 2684 | 12856 | 4451 | 14335 |
| 937 | 11288 | 2684 | 14923 | 4452 | 14336 |
| 938 | 11288 | 2685 | 12857 | 4453 | 14337 |
| 939 | 11289 | 2686 | 12858 | 4454 | 14338 |
| 940 | 11289 | 2687 | 12859 | 4455 | 14339 |
| 941 | 11290 | 2688 | 12860 | 4456 | 14340 |
| 942 | 11291 | 2689 | 12861 | 4457 | 14341 |
| 943 | 11292 | 2690 | 12862 | 4458 | 14342 |
| 944 | 11293 | 2691 | 12863 | 4459 | 14343 |
| 945 | 11294 | 2692 | 12864 | 4460 | 14344 |
| 946 | 11295 | 2693 | 12865 | 4461 | 14345 |
| 947 | 11295 | 2694 | 12865 | 4462 | 14346 |
| 948 | 11296 | 2695 | 12866 | 4463 | 14347 |
| 949 | 11297 | 2696 | 12867 | 4464 | 14348 |
| 950 | 11298 | 2697 | 12867 | 4465 | 14349 |
| 951 | 11299 | 2698 | 12868 | 4466 | 14350 |
| 952 | 11300 | 2699 | 12869 | 4467 | 14351 |
| 953 | 11301 | 2700 | 12870 | 4468 | 14352 |
| 954 | 11302 | 2701 | 12871 | 4468 | 14956 |
| 955 | 11303 | 2702 | 12872 | 4469 | 14353 |
| 956 | 11304 | 2703 | 12873 | 4470 | 14354 |
| 957 | 11305 | 2704 | 12874 | 4471 | 14355 |
| 958 | 11306 | 2705 | 12875 | 4472 | 14356 |
| 959 | 11307 | 2706 | 12876 | 4473 | 14357 |
| 960 | 11308 | 2707 | 12877 | 4474 | 14358 |
| 961 | 11309 | 2708 | 12878 | 4475 | 14359 |
| 962 | 11310 | 2709 | 12879 | 4476 | 14360 |
| 963 | 11311 | 2710 | 12880 | 4477 | 14362 |
| 964 | 11312 | 2711 | 12881 | 4478 | 14363 |
| 965 | 11313 | 2712 | 12882 | 4479 | 14363 |
| 966 | 11314 | 2713 | 12883 | 4480 | 14364 |
| 967 | 11315 | 2714 | 12884 | 4481 | 14365 |
| 968 | 11316 | 2715 | 12885 | 4482 | 14366 |
| 969 | 11317 | 2716 | 12885 | 4483 | 14367 |
| 970 | 11318 | 2717 | 12886 | 4484 | 14367 |
| 970 | 12476 | 2718 | 12887 | 4485 | 14368 |
| 971 | 11319 | 2719 | 12888 | 4486 | 14369 |
| 972 | 11320 | 2720 | 12889 | 4487 | 14371 |
| 973 | 11321 | 2721 | 12890 | 4488 | 14372 |
| 974 | 11322 | 2722 | 12891 | 4489 | 14373 |
| 975 | 11323 | 2723 | 12892 | 4490 | 14373 |
| 976 | 11324 | 2724 | 12893 | 4491 | 14374 |
| 977 | 11324 | 2725 | 12894 | 4492 | 14374 |
| 978 | 11324 | 2726 | 12895 | 4493 | 14375 |
| 979 | 11325 | 2727 | 12896 | 4494 | 14376 |
| 980 | 11325 | 2728 | 12897 | 4495 | 14377 |
| 981 | 11326 | 2729 | 12898 | 4496 | 14378 |
| 982 | 11326 | 2729 | 12899 | 4497 | 14379 |
| 983 | 11327 | 2730 | 12900 | 4498 | 14380 |
| 984 | 11327 | 2731 | 12901 | 4499 | 14381 |
| 985 | 11327 | 2732 | 12902 | 4500 | 14382 |
| 986 | 11328 | 2733 | 12903 | 4501 | 14383 |
| 987 | 11329 | 2734 | 12904 | 4502 | 14384 |
| 988 | 11330 | 2735 | 12905 | 4503 | 14385 |
| 989 | 11331 | 2736 | 12906 | 4504 | 14386 |
| 990 | 11332 | 2737 | 12906 | 4505 | 14387 |
| 991 | 11333 | 2738 | 12907 | 4506 | 14388 |
| 992 | 11334 | 2739 | 12907 | 4507 | 14389 |
| 993 | 11335 | 2740 | 12908 | 4508 | 14390 |
| 994 | 11336 | 2741 | 12909 | 4509 | 14390 |
| 995 | 11337 | 2742 | 12910 | 4510 | 14390 |
| 996 | 11338 | 2743 | 12911 | 4511 | 14390 |
| 997 | 11339 | 2744 | 12912 | 4512 | 14391 |
| 998 | 11340 | 2745 | 12913 | 4513 | 14392 |
| 999 | 11341 | 2746 | 12914 | 4514 | 14393 |
| 1000 | 11341 | 2747 | 12914 | 4515 | 14394 |
| 1001 | 11342 | 2748 | 12915 | 4516 | 14395 |
| 1002 | 11343 | 2749 | 12916 | 4517 | 14396 |
| 1003 | 11344 | 2750 | 12917 | 4518 | 14397 |
| 1004 | 11345 | 2751 | 12918 | 4519 | 14398 |
| 1005 | 11346 | 2752 | 12919 | 4520 | 14398 |
| 1006 | 11347 | 2753 | 12920 | 4521 | 14399 |
| 1007 | 11348 | 2754 | 12921 | 4522 | 14400 |
| 1008 | 11349 | 2755 | 12922 | 4523 | 14401 |
| 1009 | 11350 | 2756 | 12923 | 4524 | 14401 |
| 1010 | 11351 | 2757 | 12924 | 4525 | 14402 |
| 1011 | 11352 | 2758 | 12925 | 4526 | 14402 |
| 1012 | 11353 | 2759 | 12926 | 4527 | 14403 |
| 1013 | 11354 | 2760 | 12927 | 4528 | 14403 |
| 1014 | 11355 | 2761 | 12928 | 4529 | 14404 |
| 1015 | 11356 | 2762 | 12929 | 4530 | 14405 |
| 1016 | 11357 | 2763 | 12930 | 4531 | 14406 |
| 1017 | 11358 | 2764 | 12931 | 4532 | 14407 |
| 1018 | 11359 | 2765 | 12932 | 4533 | 14408 |
| 1019 | 11360 | 2766 | 12933 | 4534 | 14409 |
| 1020 | 11361 | 2767 | 12934 | 4535 | 14410 |
| 1021 | 11362 | 2768 | 12935 | 4536 | 14411 |
| 1022 | 11363 | 2769 | 12936 | 4537 | 14412 |
| 1023 | 11364 | 2770 | 12937 | 4538 | 14413 |
| 1024 | 11365 | 2771 | 12939 | 4539 | 14414 |
| 1025 | 11366 | 2772 | 12940 | 4540 | 14415 |
| 1026 | 11367 | 2773 | 12940 | 4541 | 14416 |
| 1027 | 11368 | 2774 | 12941 | 4542 | 14417 |
| 1028 | 11369 | 2775 | 12942 | 4543 | 14417 |
| 1029 | 11370 | 2776 | 12943 | 4544 | 14418 |
| 1030 | 11371 | 2777 | 12944 | 4545 | 14419 |
| 1031 | 11372 | 2778 | 12945 | 4546 | 14419 |
| 1032 | 11373 | 2779 | 12946 | 4547 | 14419 |
| 1033 | 11374 | 2780 | 12947 | 4548 | 14420 |
| 1034 | 11375 | 2781 | 12948 | 4549 | 14421 |
| 1035 | 11376 | 2782 | 12949 | 4550 | 14422 |
| 1036 | 11377 | 2783 | 12950 | 4551 | 14423 |
| 1037 | 11378 | 2784 | 12951 | 4552 | 14424 |
| 1038 | 11379 | 2785 | 12952 | 4553 | 14425 |
| 1039 | 11380 | 2786 | 12953 | 4554 | 14425 |
| 1040 | 11380 | 2787 | 12954 | 4555 | 14425 |
| 1041 | 11380 | 2788 | 12954 | 4556 | 14425 |
| 1042 | 11381 | 2789 | 12955 | 4557 | 14425 |
| 1043 | 11382 | 2790 | 12956 | 4558 | 14426 |
| 1044 | 11383 | 2791 | 12956 | 4559 | 14427 |
| 1045 | 11384 | 2792 | 12956 | 4560 | 14428 |
| 1046 | 11385 | 2793 | 12957 | 4561 | 14429 |
| 1047 | 11386 | 2794 | 12958 | 4562 | 14430 |
| 1048 | 11387 | 2795 | 12959 | 4563 | 14431 |
| 1049 | 11388 | 2795 | 13149 | 4564 | 14432 |
| 1050 | 11389 | 2796 | 12960 | 4565 | 14433 |
| 1051 | 11390 | 2797 | 12961 | 4566 | 14434 |
| 1052 | 11391 | 2798 | 12962 | 4567 | 14435 |
| 1053 | 11392 | 2799 | 12962 | 4567 | 14436 |
| 1054 | 11393 | 2799 | 12963 | 4568 | 14437 |
| 1055 | 11394 | 2799 | 14904 | 4569 | 14438 |
| 1056 | 11395 | 2800 | 12964 | 4570 | 14439 |
| 1057 | 11396 | 2801 | 12965 | 4571 | 14440 |
| 1058 | 11397 | 2802 | 12966 | 4572 | 14441 |
| 1059 | 11398 | 2803 | 12967 | 4573 | 14442 |
| 1060 | 11399 | 2804 | 12968 | 4574 | 14443 |
| 1061 | 11400 | 2805 | 12969 | 4575 | 14444 |
| 1062 | 11401 | 2806 | 12970 | 4576 | 14445 |
| 1063 | 11402 | 2807 | 12970 | 4577 | 14446 |
| 1064 | 11402 | 2808 | 12970 | 4578 | 14447 |
| 1064 | 11472 | 2809 | 12971 | 4579 | 14448 |
| 1065 | 11403 | 2810 | 12972 | 4580 | 14449 |
| 1066 | 11404 | 2811 | 12972 | 4581 | 14450 |
| 1067 | 11405 | 2812 | 12972 | 4582 | 14451 |
| 1068 | 11406 | 2813 | 12972 | 4583 | 14452 |
| 1069 | 11407 | 2814 | 12972 | 4584 | 14454 |
| 1070 | 11408 | 2815 | 12973 | 4585 | 14455 |
| 1071 | 11409 | 2816 | 12974 | 4586 | 14456 |
| 1072 | 11409 | 2817 | 12975 | 4587 | 14457 |
| 1073 | 11410 | 2818 | 12976 | 4588 | 14458 |
| 1074 | 11411 | 2819 | 12976 | 4589 | 14459 |
| 1075 | 11412 | 2820 | 12977 | 4590 | 14460 |
| 1076 | 11413 | 2821 | 12977 | 4591 | 14461 |
| 1077 | 11414 | 2822 | 12978 | 4592 | 14462 |
| 1078 | 11415 | 2823 | 12979 | 4593 | 14463 |
| 1079 | 11415 | 2824 | 12980 | 4594 | 14464 |
| 1080 | 11415 | 2825 | 12981 | 4595 | 14465 |
| 1081 | 11416 | 2826 | 12982 | 4596 | 14466 |
| 1082 | 11417 | 2827 | 12983 | 4597 | 14467 |
| 1083 | 11418 | 2828 | 12984 | 4597 | 14891 |
| 1084 | 11418 | 2829 | 12985 | 4598 | 14468 |
| 1085 | 11418 | 2830 | 12986 | 4599 | 14469 |
| 1086 | 11418 | 2831 | 12987 | 4600 | 14470 |
| 1087 | 11418 | 2832 | 12988 | 4601 | 14471 |
| 1088 | 11419 | 2833 | 12989 | 4602 | 14471 |
| 1089 | 11420 | 2834 | 12990 | 4603 | 14472 |
| 1090 | 11421 | 2835 | 12991 | 4604 | 14473 |
| 1091 | 11422 | 2836 | 12992 | 4605 | 14474 |
| 1092 | 11424 | 2837 | 12993 | 4606 | 14475 |
| 1093 | 11425 | 2838 | 12994 | 4607 | 14476 |
| 1094 | 11426 | 2839 | 12995 | 4608 | 14477 |
| 1095 | 11427 | 2840 | 12996 | 4609 | 14477 |
| 1096 | 11428 | 2841 | 12997 | 4610 | 14477 |
| 1097 | 11429 | 2842 | 12998 | 4611 | 14478 |
| 1098 | 11430 | 2843 | 12999 | 4612 | 14479 |
| 1099 | 11431 | 2844 | 13000 | 4613 | 14479 |
| 1100 | 11432 | 2845 | 13001 | 4614 | 14480 |
| 1101 | 11433 | 2846 | 13002 | 4615 | 14481 |
| 1102 | 11434 | 2847 | 13003 | 4616 | 14482 |
| 1103 | 11435 | 2848 | 13004 | 4617 | 14483 |
| 1104 | 11436 | 2849 | 13005 | 4618 | 14484 |
| 1105 | 11437 | 2849 | 13006 | 4619 | 14485 |
| 1106 | 11438 | 2850 | 13007 | 4620 | 14486 |
| 1107 | 11438 | 2851 | 13008 | 4621 | 14487 |
| 1108 | 11438 | 2852 | 13009 | 4622 | 14488 |
| 1109 | 11439 | 2853 | 13010 | 4623 | 14489 |
| 1110 | 11440 | 2854 | 13011 | 4624 | 14489 |
| 1111 | 11441 | 2855 | 13012 | 4625 | 14490 |
| 1112 | 11442 | 2856 | 13013 | 4626 | 14491 |
| 1113 | 11443 | 2857 | 13014 | 4627 | 14492 |
| 1114 | 11444 | 2858 | 13015 | 4628 | 14493 |
| 1115 | 11445 | 2859 | 13016 | 4629 | 14494 |
| 1116 | 11446 | 2860 | 13017 | 4630 | 14495 |
| 1117 | 11447 | 2861 | 13018 | 4631 | 14497 |
| 1118 | 11448 | 2862 | 13019 | 4632 | 14498 |
| 1119 | 11449 | 2863 | 13020 | 4633 | 14499 |
| 1120 | 11450 | 2864 | 13020 | 4634 | 14500 |
| 1121 | 11451 | 2865 | 13021 | 4635 | 14501 |
| 1122 | 11452 | 2866 | 13022 | 4636 | 14502 |
| 1123 | 11453 | 2867 | 13023 | 4637 | 14502 |
| 1124 | 11454 | 2868 | 13024 | 4638 | 14503 |
| 1125 | 11455 | 2869 | 13024 | 4639 | 14504 |
| 1126 | 11456 | 2870 | 13024 | 4639 | 14505 |
| 1127 | 11457 | 2871 | 13024 | 4640 | 14506 |
| 1128 | 11458 | 2872 | 13024 | 4641 | 14507 |
| 1129 | 11459 | 2873 | 13024 | 4642 | 14508 |
| 1130 | 11460 | 2874 | 13024 | 4643 | 14509 |
| 1131 | 11461 | 2875 | 13024 | 4643 | 14509 |
| 1132 | 11462 | 2876 | 13024 | 4643 | 14677 |
| 1133 | 11463 | 2877 | 13024 | 4644 | 14509 |
| 1134 | 11464 | 2878 | 13024 | 4644 | 14509 |
| 1135 | 11465 | 2879 | 13024 | 4644 | 14677 |
| 1136 | 11465 | 2880 | 13025 | 4645 | 14510 |
| 1137 | 11466 | 2881 | 13026 | 4646 | 14511 |
| 1138 | 11467 | 2882 | 13027 | 4647 | 14512 |
| 1139 | 11468 | 2883 | 13027 | 4648 | 14513 |
| 1140 | 11469 | 2884 | 13027 | 4649 | 14514 |
| 1141 | 11469 | 2885 | 13027 | 4650 | 14515 |
| 1142 | 11469 | 2886 | 13027 | 4651 | 14516 |
| 1143 | 11469 | 2887 | 13028 | 4652 | 14517 |
| 1144 | 11469 | 2888 | 13029 | 4653 | 14518 |
| 1145 | 11469 | 2889 | 13030 | 4654 | 14519 |
| 1146 | 11470 | 2890 | 13031 | 4655 | 14519 |
| 1147 | 11471 | 2891 | 13031 | 4656 | 14520 |
| 1148 | 11473 | 2892 | 13032 | 4657 | 14521 |
| 1149 | 11473 | 2893 | 13033 | 4658 | 14521 |
| 1150 | 11473 | 2894 | 13034 | 4659 | 14522 |
| 1151 | 11473 | 2895 | 13035 | 4660 | 14523 |
| 1152 | 11474 | 2896 | 13036 | 4661 | 14524 |
| 1153 | 11474 | 2897 | 13037 | 4662 | 14525 |
| 1154 | 11475 | 2898 | 13038 | 4663 | 14526 |
| 1155 | 11476 | 2899 | 13039 | 4664 | 14527 |
| 1156 | 11477 | 2900 | 13040 | 4665 | 14528 |
| 1157 | 11479 | 2901 | 13041 | 4666 | 14529 |
| 1158 | 11480 | 2902 | 13042 | 4667 | 14530 |
| 1159 | 11481 | 2903 | 13043 | 4668 | 14531 |
| 1160 | 11482 | 2904 | 13044 | 4669 | 14532 |
| 1161 | 11483 | 2905 | 13045 | 4670 | 14533 |
| 1162 | 11484 | 2906 | 13045 | 4671 | 14534 |
| 1163 | 11485 | 2907 | 13045 | 4672 | 14535 |
| 1164 | 11486 | 2908 | 13045 | 4673 | 14536 |
| 1165 | 11487 | 2909 | 13046 | 4674 | 14536 |
| 1166 | 11488 | 2910 | 13047 | 4675 | 14537 |
| 1167 | 11489 | 2911 | 13047 | 4676 | 14538 |
| 1168 | 11490 | 2912 | 13047 | 4677 | 14539 |
| 1169 | 11491 | 2913 | 13047 | 4678 | 14539 |
| 1170 | 11492 | 2914 | 13047 | 4679 | 14540 |
| 1171 | 11492 | 2915 | 13047 | 4680 | 14541 |
| 1172 | 11492 | 2916 | 13048 | 4681 | 14542 |
| 1173 | 11492 | 2917 | 13048 | 4682 | 14543 |
| 1174 | 11492 | 2918 | 13048 | 4683 | 14543 |
| 1175 | 11492 | 2919 | 13048 | 4684 | 14543 |
| 1176 | 11492 | 2920 | 13049 | 4685 | 14544 |
| 1177 | 11492 | 2921 | 13050 | 4686 | 14544 |
| 1178 | 11493 | 2922 | 13051 | 4687 | 14545 |
| 1179 | 11494 | 2923 | 13052 | 4688 | 14545 |
| 1180 | 11495 | 2924 | 13052 | 4689 | 14546 |
| 1181 | 11496 | 2925 | 13053 | 4690 | 14547 |
| 1182 | 11496 | 2926 | 13054 | 4691 | 14548 |
| 1183 | 11497 | 2927 | 13055 | 4692 | 14549 |
| 1184 | 11498 | 2928 | 13056 | 4693 | 14549 |
| 1185 | 11498 | 2929 | 13056 | 4694 | 14550 |
| 1186 | 11498 | 2930 | 13056 | 4695 | 14551 |
| 1187 | 11498 | 2931 | 13056 | 4696 | 14552 |
| 1188 | 11498 | 2932 | 13057 | 4697 | 14553 |
| 1189 | 11498 | 2933 | 13058 | 4698 | 14554 |
| 1190 | 11498 | 2934 | 13058 | 4699 | 14554 |
| 1191 | 11498 | 2935 | 13058 | 4700 | 14555 |
| 1192 | 11498 | 2936 | 13058 | 4701 | 14555 |
| 1193 | 11499 | 2937 | 13059 | 4702 | 14555 |
| 1194 | 11500 | 2938 | 13059 | 4703 | 14555 |
| 1195 | 11501 | 2939 | 13059 | 4704 | 14556 |
| 1196 | 11502 | 2940 | 13060 | 4705 | 14557 |
| 1197 | 11503 | 2941 | 13061 | 4706 | 14558 |
| 1198 | 11504 | 2942 | 13062 | 4707 | 14559 |
| 1199 | 11505 | 2943 | 13062 | 4708 | 14560 |
| 1200 | 11505 | 2944 | 13062 | 4709 | 14561 |
| 1201 | 11505 | 2945 | 13062 | 4710 | 14562 |
| 1202 | 11506 | 2946 | 13062 | 4711 | 14563 |
| 1203 | 11507 | 2947 | 13063 | 4712 | 14564 |
| 1204 | 11508 | 2948 | 13063 | 4713 | 14565 |
| 1205 | 11509 | 2949 | 13063 | 4714 | 14566 |
| 1206 | 11510 | 2950 | 13064 | 4715 | 14567 |
| 1207 | 11511 | 2951 | 13064 | 4716 | 14568 |
| 1208 | 11512 | 2952 | 13064 | 4717 | 14568 |
| 1209 | 11513 | 2953 | 13064 | 4718 | 14568 |
| 1210 | 11514 | 2954 | 13064 | 4719 | 14568 |
| 1211 | 11515 | 2955 | 13064 | 4720 | 14568 |
| 1212 | 11516 | 2956 | 13065 | 4721 | 14568 |
| 1213 | 11517 | 2957 | 13065 | 4722 | 14568 |
| 1214 | 11518 | 2958 | 13066 | 4723 | 14568 |
| 1215 | 11519 | 2959 | 13066 | 4724 | 14568 |
| 1216 | 11520 | 2960 | 13066 | 4725 | 14569 |
| 1217 | 11521 | 2961 | 13067 | 4726 | 14570 |
| 1218 | 11522 | 2962 | 13067 | 4727 | 14571 |
| 1219 | 11523 | 2963 | 13067 | 4728 | 14572 |
| 1220 | 11524 | 2964 | 13067 | 4729 | 14573 |
| 1221 | 11525 | 2965 | 13068 | 4730 | 14574 |
| 1222 | 11526 | 2966 | 13068 | 4731 | 14575 |
| 1223 | 11527 | 2967 | 13068 | 4732 | 14576 |
| 1224 | 11528 | 2968 | 13069 | 4733 | 14577 |
| 1225 | 11529 | 2969 | 13070 | 4734 | 14577 |
| 1226 | 11530 | 2970 | 13071 | 4735 | 14578 |
| 1227 | 11531 | 2971 | 13071 | 4736 | 14579 |
| 1228 | 11532 | 2972 | 13072 | 4737 | 14580 |
| 1229 | 11533 | 2973 | 13072 | 4738 | 14581 |
| 1230 | 11534 | 2974 | 13072 | 4739 | 14581 |
| 1231 | 11535 | 2975 | 13072 | 4740 | 14582 |
| 1232 | 11535 | 2976 | 13072 | 4741 | 14583 |
| 1233 | 11536 | 2977 | 13072 | 4742 | 14584 |
| 1234 | 11537 | 2978 | 13072 | 4743 | 14585 |
| 1235 | 11538 | 2979 | 13073 | 4744 | 14586 |
| 1236 | 11539 | 2980 | 13073 | 4745 | 14587 |
| 1237 | 11540 | 2981 | 13073 | 4746 | 14588 |
| 1238 | 11541 | 2982 | 13073 | 4747 | 14589 |
| 1239 | 11542 | 2983 | 13074 | 4748 | 14590 |
| 1240 | 11543 | 2984 | 13075 | 4749 | 14591 |
| 1241 | 11544 | 2985 | 13076 | 4750 | 14592 |
| 1241 | 14175 | 2986 | 13077 | 4751 | 14593 |
| 1242 | 11545 | 2987 | 13078 | 4752 | 14594 |
| 1243 | 11546 | 2988 | 13079 | 4753 | 14595 |
| 1244 | 11547 | 2989 | 13080 | 4754 | 14596 |
| 1245 | 11548 | 2990 | 13081 | 4755 | 14597 |
| 1246 | 11549 | 2991 | 13082 | 4756 | 14598 |
| 1247 | 11550 | 2992 | 13083 | 4757 | 14599 |
| 1248 | 11551 | 2993 | 13084 | 4758 | 14600 |
| 1249 | 11552 | 2994 | 13085 | 4759 | 14601 |
| 1250 | 11553 | 2995 | 13086 | 4760 | 14602 |
| 1251 | 11554 | 2996 | 13086 | 4761 | 14603 |
| 1252 | 11555 | 2997 | 13087 | 4762 | 14603 |
| 1253 | 11556 | 2998 | 13088 | 4762 | 14963 |
| 1254 | 11557 | 2999 | 13089 | 4763 | 14604 |
| 1255 | 11558 | 3000 | 13090 | 4764 | 14605 |
| 1256 | 11559 | 3001 | 13091 | 4765 | 14606 |
| 1257 | 11560 | 3001 | 15000 | 4766 | 14606 |
| 1257 | 11621 | 3002 | 13091 | 4767 | 14607 |
| 1258 | 11561 | 3002 | 15000 | 4768 | 14608 |
| 1259 | 11562 | 3003 | 13092 | 4769 | 14609 |
| 1260 | 11563 | 3004 | 13093 | 4770 | 14610 |
| 1261 | 11564 | 3005 | 13094 | 4771 | 14611 |
| 1262 | 11564 | 3006 | 13095 | 4772 | 14612 |
| 1263 | 11564 | 3007 | 13096 | 4773 | 14612 |
| 1264 | 11565 | 3008 | 13097 | 4774 | 14613 |
| 1265 | 11565 | 3009 | 13098 | 4775 | 14614 |
| 1266 | 11565 | 3010 | 13099 | 4776 | 14615 |
| 1267 | 11566 | 3011 | 13100 | 4777 | 14616 |
| 1268 | 11567 | 3012 | 13102 | 4778 | 14617 |
| 1269 | 11568 | 3013 | 13103 | 4779 | 14618 |
| 1270 | 11569 | 3014 | 13104 | 4780 | 14619 |
| 1271 | 11569 | 3015 | 13105 | 4781 | 14620 |
| 1272 | 11570 | 3016 | 13106 | 4782 | 14622 |
| 1273 | 11571 | 3017 | 13107 | 4783 | 14623 |
| 1274 | 11572 | 3018 | 13108 | 4784 | 14624 |
| 1275 | 11573 | 3019 | 13109 | 4785 | 14625 |
| 1276 | 11574 | 3020 | 13110 | 4786 | 14626 |
| 1277 | 11575 | 3021 | 13111 | 4787 | 14626 |
| 1278 | 11576 | 3022 | 13112 | 4788 | 14628 |
| 1279 | 11577 | 3023 | 13113 | 4789 | 14628 |
| 1280 | 11578 | 3024 | 13114 | 4790 | 14629 |
| 1281 | 11579 | 3025 | 13115 | 4791 | 14629 |
| 1282 | 11580 | 3026 | 13116 | 4792 | 14630 |
| 1283 | 11581 | 3027 | 13117 | 4793 | 14631 |
| 1284 | 11582 | 3028 | 13118 | 4794 | 14632 |
| 1284 | 12938 | 3029 | 13118 | 4795 | 14633 |
| 1285 | 11583 | 3030 | 13119 | 4796 | 14634 |
| 1286 | 11583 | 3031 | 13120 | 4797 | 14635 |
| 1287 | 11584 | 3032 | 13120 | 4798 | 14636 |
| 1288 | 11585 | 3033 | 13120 | 4799 | 14637 |
| 1289 | 11585 | 3034 | 13120 | 4800 | 14638 |
| 1290 | 11586 | 3035 | 13121 | 4801 | 14639 |
| 1291 | 11587 | 3036 | 13122 | 4802 | 14640 |
| 1292 | 11588 | 3037 | 13123 | 4803 | 14641 |
| 1293 | 11589 | 3038 | 13124 | 4804 | 14641 |
| 1294 | 11590 | 3039 | 13125 | 4805 | 14641 |
| 1295 | 11591 | 3040 | 13126 | 4806 | 14642 |
| 1296 | 11592 | 3041 | 13127 | 4807 | 14643 |
| 1297 | 11593 | 3042 | 13128 | 4808 | 14644 |
| 1298 | 11594 | 3043 | 13129 | 4809 | 14644 |
| 1299 | 11595 | 3044 | 13130 | 4810 | 14644 |
| 1300 | 11596 | 3045 | 13131 | 4811 | 14644 |
| 1301 | 11597 | 3046 | 13132 | 4812 | 14644 |
| 1302 | 11598 | 3047 | 13133 | 4813 | 14644 |
| 1303 | 11599 | 3048 | 13134 | 4814 | 14644 |
| 1304 | 11600 | 3049 | 13135 | 4815 | 14644 |
| 1305 | 11601 | 3050 | 13136 | 4816 | 14644 |
| 1306 | 11602 | 3051 | 13137 | 4817 | 14644 |
| 1307 | 11603 | 3052 | 13138 | 4818 | 14644 |
| 1308 | 11603 | 3053 | 13139 | 4819 | 14644 |
| 1309 | 11604 | 3054 | 13140 | 4820 | 14644 |
| 1310 | 11605 | 3055 | 13141 | 4821 | 14644 |
| 1311 | 11606 | 3056 | 13141 | 4822 | 14644 |
| 1312 | 11607 | 3057 | 13142 | 4823 | 14644 |
| 1313 | 11608 | 3058 | 13143 | 4824 | 14645 |
| 1314 | 11609 | 3059 | 13144 | 4825 | 14645 |
| 1315 | 11610 | 3060 | 13145 | 4826 | 14646 |
| 1316 | 11611 | 3061 | 13146 | 4827 | 14646 |
| 1317 | 11612 | 3062 | 13146 | 4828 | 14647 |
| 1318 | 11613 | 3063 | 13147 | 4829 | 14648 |
| 1319 | 11614 | 3064 | 13148 | 4830 | 14649 |
| 1320 | 11615 | 3065 | 13149 | 4831 | 14650 |
| 1321 | 11616 | 3066 | 13150 | 4832 | 14650 |
| 1322 | 11617 | 3067 | 13151 | 4833 | 14650 |
| 1323 | 11617 | 3068 | 13152 | 4834 | 14650 |
| 1323 | 14025 | 3069 | 13153 | 4835 | 14651 |
| 1324 | 11618 | 3070 | 13153 | 4836 | 14652 |
| 1325 | 11619 | 3071 | 13154 | 4837 | 14653 |
| 1326 | 11620 | 3072 | 13155 | 4838 | 14654 |
| 1327 | 11622 | 3073 | 13156 | 4839 | 14654 |
| 1328 | 11623 | 3074 | 13156 | 4840 | 14655 |
| 1329 | 11624 | 3075 | 13157 | 4841 | 14656 |
| 1330 | 11624 | 3076 | 13158 | 4842 | 14657 |
| 1331 | 11625 | 3077 | 13159 | 4843 | 14658 |
| 1332 | 11625 | 3078 | 13160 | 4844 | 14659 |
| 1333 | 11625 | 3079 | 13161 | 4845 | 14660 |
| 1334 | 11625 | 3080 | 13162 | 4846 | 14661 |
| 1335 | 11626 | 3081 | 13163 | 4847 | 14662 |
| 1336 | 11628 | 3082 | 13163 | 4848 | 14663 |
| 1337 | 11629 | 3083 | 13163 | 4849 | 14664 |
| 1338 | 11630 | 3084 | 13164 | 4850 | 14665 |
| 1339 | 11631 | 3085 | 13164 | 4851 | 14666 |
| 1340 | 11632 | 3086 | 13164 | 4852 | 14667 |
| 1341 | 11633 | 3087 | 13165 | 4853 | 14668 |
| 1342 | 11634 | 3088 | 13166 | 4854 | 14669 |
| 1343 | 11635 | 3089 | 13167 | 4855 | 14670 |
| 1344 | 11636 | 3090 | 13168 | 4856 | 14671 |
| 1345 | 11637 | 3091 | 13169 | 4857 | 14672 |
| 1346 | 11638 | 3092 | 13170 | 4858 | 14673 |
| 1347 | 11639 | 3093 | 13171 | 4859 | 14674 |
| 1348 | 11640 | 3094 | 13171 | 4860 | 14675 |
| 1349 | 11641 | 3095 | 13172 | 4861 | 14676 |
| 1350 | 11642 | 3096 | 13173 | 4862 | 14678 |
| 1351 | 11643 | 3097 | 13174 | 4863 | 14679 |
| 1352 | 11644 | 3098 | 13175 | 4864 | 14680 |
| 1353 | 11645 | 3099 | 13176 | 4865 | 14681 |
| 1354 | 11646 | 3100 | 13176 | 4866 | 14682 |
| 1355 | 11647 | 3101 | 13177 | 4867 | 14683 |
| 1356 | 11648 | 3102 | 13178 | 4868 | 14684 |
| 1357 | 11649 | 3103 | 13179 | 4869 | 14685 |
| 1358 | 11650 | 3104 | 13180 | 4870 | 14686 |
| 1359 | 11651 | 3105 | 13181 | 4871 | 14687 |
| 1360 | 11652 | 3106 | 13182 | 4872 | 14688 |
| 1361 | 11653 | 3107 | 13183 | 4873 | 14689 |
| 1362 | 11654 | 3108 | 13184 | 4873 | 14690 |
| 1363 | 11654 | 3109 | 13185 | 4874 | 14691 |
| 1364 | 11655 | 3110 | 13186 | 4875 | 14692 |
| 1365 | 11656 | 3111 | 13187 | 4876 | 14692 |
| 1366 | 11657 | 3112 | 13188 | 4877 | 14692 |
| 1367 | 11658 | 3113 | 13190 | 4878 | 14692 |
| 1368 | 11659 | 3114 | 13191 | 4879 | 14692 |
| 1369 | 11660 | 3115 | 13192 | 4880 | 14693 |
| 1370 | 11661 | 3116 | 13193 | 4881 | 14694 |
| 1371 | 11662 | 3117 | 13194 | 4882 | 14695 |
| 1372 | 11663 | 3118 | 13194 | 4883 | 14696 |
| 1373 | 11664 | 3119 | 13195 | 4884 | 14696 |
| 1374 | 11665 | 3120 | 13196 | 4885 | 14697 |
| 1375 | 11666 | 3121 | 13197 | 4886 | 14698 |
| 1376 | 11667 | 3122 | 13198 | 4887 | 14699 |
| 1377 | 11668 | 3123 | 13199 | 4888 | 14700 |
| 1378 | 11669 | 3124 | 13201 | 4889 | 14701 |
| 1379 | 11670 | 3125 | 13202 | 4890 | 14702 |
| 1380 | 11671 | 3126 | 13203 | 4891 | 14702 |
| 1381 | 11672 | 3127 | 13204 | 4892 | 14703 |
| 1382 | 11673 | 3128 | 13205 | 4893 | 14704 |
| 1383 | 11674 | 3129 | 13206 | 4894 | 14705 |
| 1384 | 11675 | 3130 | 13207 | 4895 | 14706 |
| 1385 | 11676 | 3131 | 13208 | 4896 | 14707 |
| 1386 | 11677 | 3132 | 13209 | 4897 | 14708 |
| 1387 | 11678 | 3133 | 13210 | 4898 | 14709 |
| 1388 | 11679 | 3134 | 13211 | 4899 | 14710 |
| 1389 | 11680 | 3135 | 13212 | 4900 | 14711 |
| 1390 | 11681 | 3136 | 13213 | 4901 | 14712 |
| 1391 | 11682 | 3137 | 13214 | 4902 | 14713 |
| 1392 | 11683 | 3138 | 13215 | 4903 | 14713 |
| 1393 | 11683 | 3139 | 13216 | 4904 | 14713 |
| 1394 | 11684 | 3140 | 13217 | 4905 | 14714 |
| 1394 | 13101 | 3141 | 13218 | 4906 | 14715 |
| 1395 | 11685 | 3142 | 13219 | 4907 | 14716 |
| 1396 | 11686 | 3143 | 13220 | 4908 | 14717 |
| 1397 | 11687 | 3144 | 13221 | 4909 | 14718 |
| 1398 | 11688 | 3145 | 13222 | 4910 | 14719 |
| 1399 | 11689 | 3146 | 13223 | 4911 | 14720 |
| 1400 | 11690 | 3147 | 13223 | 4912 | 14721 |
| 1400 | 14960 | 3148 | 13224 | 4913 | 14722 |
| 1401 | 11690 | 3149 | 13225 | 4914 | 14722 |
| 1401 | 14960 | 3150 | 13226 | 4915 | 14723 |
| 1402 | 11691 | 3151 | 13227 | 4916 | 14724 |
| 1403 | 11692 | 3152 | 13228 | 4917 | 14725 |
| 1404 | 11693 | 3153 | 13229 | 4918 | 14726 |
| 1405 | 11694 | 3154 | 13230 | 4919 | 14727 |
| 1406 | 11695 | 3155 | 13231 | 4920 | 14727 |
| 1407 | 11696 | 3156 | 13232 | 4921 | 14728 |
| 1408 | 11697 | 3157 | 13233 | 4922 | 14729 |
| 1409 | 11698 | 3158 | 13234 | 4923 | 14730 |
| 1410 | 11699 | 3159 | 13235 | 4924 | 14730 |
| 1411 | 11700 | 3160 | 13236 | 4925 | 14730 |
| 1412 | 11701 | 3161 | 13237 | 4926 | 14730 |
| 1413 | 11702 | 3162 | 13238 | 4927 | 14731 |
| 1414 | 11703 | 3163 | 13239 | 4928 | 14732 |
| 1415 | 11704 | 3164 | 13239 | 4929 | 14733 |
| 1416 | 11705 | 3165 | 13240 | 4930 | 14734 |
| 1417 | 11706 | 3166 | 13240 | 4931 | 14734 |
| 1418 | 11707 | 3167 | 13241 | 4932 | 14735 |
| 1419 | 11708 | 3168 | 13241 | 4933 | 14736 |
| 1420 | 11709 | 3169 | 13241 | 4934 | 14737 |
| 1421 | 11710 | 3170 | 13242 | 4935 | 14738 |
| 1422 | 11711 | 3171 | 13243 | 4936 | 14739 |
| 1423 | 11712 | 3172 | 13244 | 4937 | 14740 |
| 1424 | 11712 | 3173 | 13245 | 4938 | 14741 |
| 1425 | 11713 | 3174 | 13245 | 4939 | 14742 |
| 1426 | 11714 | 3175 | 13246 | 4940 | 14742 |
| 1427 | 11715 | 3176 | 13247 | 4941 | 14742 |
| 1428 | 11716 | 3177 | 13248 | 4942 | 14742 |
| 1429 | 11717 | 3178 | 13249 | 4943 | 14743 |
| 1429 | 12595 | 3179 | 13250 | 4944 | 14744 |
| 1430 | 11718 | 3180 | 13251 | 4945 | 14745 |
| 1431 | 11719 | 3181 | 13252 | 4946 | 14746 |
| 1432 | 11720 | 3182 | 13253 | 4947 | 14747 |
| 1433 | 11721 | 3183 | 13254 | 4948 | 14748 |
| 1434 | 11722 | 3184 | 13254 | 4949 | 14749 |
| 1435 | 11723 | 3185 | 13255 | 4950 | 14750 |
| 1436 | 11724 | 3186 | 13256 | 4951 | 14751 |
| 1437 | 11725 | 3187 | 13257 | 4952 | 14752 |
| 1438 | 11726 | 3187 | 13319 | 4953 | 14753 |
| 1439 | 11727 | 3188 | 13258 | 4954 | 14754 |
| 1440 | 11728 | 3189 | 13259 | 4955 | 14755 |
| 1441 | 11729 | 3189 | 13260 | 4956 | 14756 |
| 1442 | 11730 | 3190 | 13261 | 4957 | 14757 |
| 1443 | 11731 | 3191 | 13262 | 4958 | 14758 |
| 1444 | 11732 | 3192 | 13263 | 4959 | 14759 |
| 1445 | 11733 | 3193 | 13264 | 4960 | 14760 |
| 1446 | 11734 | 3194 | 13265 | 4961 | 14761 |
| 1447 | 11736 | 3195 | 13266 | 4962 | 14762 |
| 1448 | 11737 | 3196 | 13267 | 4963 | 14763 |
| 1449 | 11738 | 3197 | 13267 | 4964 | 14764 |
| 1450 | 11738 | 3198 | 13267 | 4965 | 14765 |
| 1451 | 11739 | 3199 | 13268 | 4966 | 14766 |
| 1452 | 11740 | 3200 | 13269 | 4967 | 14767 |
| 1453 | 11742 | 3201 | 13270 | 4968 | 14767 |
| 1454 | 11743 | 3202 | 13271 | 4969 | 14768 |
| 1455 | 11744 | 3203 | 13272 | 4970 | 14769 |
| 1455 | 13200 | 3204 | 13273 | 4971 | 14770 |
| 1456 | 11745 | 3205 | 13274 | 4972 | 14771 |
| 1457 | 11746 | 3206 | 13275 | 4973 | 14772 |
| 1458 | 11747 | 3207 | 13276 | 4974 | 14773 |
| 1459 | 11748 | 3208 | 13277 | 4975 | 14774 |
| 1460 | 11749 | 3209 | 13278 | 4976 | 14775 |
| 1461 | 11750 | 3210 | 13279 | 4977 | 14776 |
| 1462 | 11751 | 3211 | 13280 | 4978 | 14777 |
| 1463 | 11752 | 3212 | 13281 | 4979 | 14778 |
| 1464 | 11753 | 3213 | 13282 | 4980 | 14779 |
| 1465 | 11754 | 3214 | 13283 | 4981 | 14780 |
| 1466 | 11754 | 3215 | 13284 | 4982 | 14781 |
| 1467 | 11755 | 3216 | 13285 | 4983 | 14782 |
| 1468 | 11756 | 3217 | 13286 | 4984 | 14783 |
| 1469 | 11757 | 3218 | 13287 | 4985 | 14783 |
| 1470 | 11758 | 3219 | 13288 | 4986 | 14784 |
| 1471 | 11758 | 3219 | 13981 | 4987 | 14785 |
| 1472 | 11759 | 3220 | 13289 | 4988 | 14785 |
| 1473 | 11760 | 3221 | 13290 | 4989 | 14786 |
| 1474 | 11761 | 3222 | 13291 | 4990 | 14787 |
| 1475 | 11762 | 3223 | 13292 | 4991 | 14788 |
| 1476 | 11763 | 3224 | 13293 | 4992 | 14789 |
| 1477 | 11764 | 3225 | 13294 | 4993 | 14790 |
| 1478 | 11765 | 3226 | 13294 | 4994 | 14791 |
| 1479 | 11766 | 3227 | 13295 | 4995 | 14792 |
| 1480 | 11767 | 3228 | 13296 | 4996 | 14792 |
| 1481 | 11768 | 3229 | 13297 | 4996 | 14795 |
| 1482 | 11769 | 3230 | 13298 | 4997 | 14792 |
| 1483 | 11770 | 3231 | 13299 | 4997 | 14794 |
| 1484 | 11771 | 3232 | 13300 | 4998 | 14792 |
| 1485 | 11772 | 3233 | 13301 | 4999 | 14792 |
| 1486 | 11773 | 3234 | 13302 | 5000 | 14792 |
| 1487 | 11774 | 3235 | 13303 | 5001 | 14792 |
| 1488 | 11775 | 3236 | 13304 | 5002 | 14792 |
| 1489 | 11776 | 3237 | 13305 | 5003 | 14792 |
| 1490 | 11777 | 3238 | 13306 | 5004 | 14792 |
| 1491 | 11778 | 3239 | 13307 | 5005 | 14792 |
| 1492 | 11779 | 3240 | 13308 | 5006 | 14792 |
| 1493 | 11780 | 3241 | 13309 | 5007 | 14792 |
| 1494 | 11781 | 3242 | 13310 | 5008 | 14792 |
| 1495 | 11782 | 3243 | 13311 | 5009 | 14792 |
| 1496 | 11783 | 3244 | 13312 | 5010 | 14792 |
| 1497 | 11784 | 3245 | 13313 | 5011 | 14792 |
| 1498 | 11785 | 3246 | 13314 | 5012 | 14793 |
| 1499 | 11785 | 3247 | 13315 | 5013 | 14794 |
| 1500 | 11785 | 3248 | 13316 | 5014 | 14794 |
| 1501 | 11785 | 3248 | 13318 | 5015 | 14794 |
| 1502 | 11786 | 3249 | 13316 | 5016 | 14796 |
| 1503 | 11787 | 3250 | 13317 | 5017 | 14797 |
| 1504 | 11788 | 3251 | 13318 | 5018 | 14797 |
| 1505 | 11789 | 3252 | 13318 | 5019 | 14797 |
| 1506 | 11790 | 3253 | 13318 | 5020 | 14797 |
| 1507 | 11791 | 3254 | 13318 | 5021 | 14797 |
| 1508 | 11792 | 3255 | 13320 | 5022 | 14798 |
| 1509 | 11793 | 3256 | 13321 | 5023 | 14799 |
| 1510 | 11794 | 3257 | 13322 | 5024 | 14800 |
| 1511 | 11795 | 3258 | 13323 | 5025 | 14801 |
| 1512 | 11796 | 3259 | 13324 | 5026 | 14802 |
| 1513 | 11797 | 3260 | 13325 | 5027 | 14803 |
| 1514 | 11798 | 3261 | 13326 | 5028 | 14804 |
| 1515 | 11799 | 3262 | 13327 | 5029 | 14805 |
| 1516 | 11800 | 3263 | 13328 | 5030 | 14806 |
| 1517 | 11801 | 3264 | 13329 | 5031 | 14807 |
| 1518 | 11802 | 3265 | 13330 | 5032 | 14808 |
| 1519 | 11803 | 3266 | 13331 | 5033 | 14809 |
| 1520 | 11804 | 3267 | 13331 | 5034 | 14810 |
| 1521 | 11805 | 3268 | 13332 | 5035 | 14811 |
| 1522 | 11806 | 3269 | 13332 | 5036 | 14811 |
| 1523 | 11806 | 3270 | 13333 | 5037 | 14811 |
| 1524 | 11807 | 3271 | 13334 | 5038 | 14812 |
| 1525 | 11808 | 3272 | 13335 | 5039 | 14813 |
| 1526 | 11809 | 3273 | 13336 | 5040 | 14814 |
| 1527 | 11810 | 3274 | 13337 | 5041 | 14815 |
| 1528 | 11811 | 3274 | 13338 | 5042 | 14816 |
| 1529 | 11812 | 3275 | 13339 | 5043 | 14817 |
| 1530 | 11813 | 3276 | 13340 | 5044 | 14818 |
| 1531 | 11814 | 3277 | 13341 | 5045 | 14819 |
| 1532 | 11815 | 3278 | 13341 | 5046 | 14819 |
| 1533 | 11816 | 3279 | 13342 | 5047 | 14819 |
| 1534 | 11817 | 3280 | 13343 | 5048 | 14820 |
| 1535 | 11818 | 3281 | 13343 | 5049 | 14821 |
| 1536 | 11819 | 3282 | 13344 | 5050 | 14822 |
| 1537 | 11820 | 3283 | 13345 | 5051 | 14823 |
| 1538 | 11821 | 3284 | 13346 | 5052 | 14824 |
| 1539 | 11822 | 3285 | 13347 | 5053 | 14825 |
| 1540 | 11823 | 3286 | 13348 | 5054 | 14826 |
| 1541 | 11824 | 3287 | 13349 | 5055 | 14827 |
| 1542 | 11825 | 3288 | 13350 | 5056 | 14828 |
| 1543 | 11826 | 3289 | 13351 | 5057 | 14829 |
| 1544 | 11827 | 3290 | 13352 | 5058 | 14830 |
| 1545 | 11827 | 3291 | 13353 | 5059 | 14831 |
| 1546 | 11828 | 3292 | 13353 | 5060 | 14832 |
| 1547 | 11829 | 3293 | 13353 | 5061 | 14833 |
| 1548 | 11830 | 3294 | 13354 | 5062 | 14834 |
| 1549 | 11830 | 3295 | 13355 | 5063 | 14835 |
| 1550 | 11831 | 3296 | 13356 | 5064 | 14836 |
| 1551 | 11832 | 3297 | 13357 | 5065 | 14837 |
| 1552 | 11832 | 3298 | 13358 | 5066 | 14838 |
| 1553 | 11833 | 3299 | 13359 | 5067 | 14838 |
| 1554 | 11834 | 3300 | 13359 | 5068 | 14838 |
| 1555 | 11835 | 3301 | 13360 | 5069 | 14839 |
| 1556 | 11836 | 3302 | 13361 | 5070 | 14840 |
| 1557 | 11836 | 3303 | 13362 | 5071 | 14841 |
| 1558 | 11837 | 3304 | 13363 | 5072 | 14842 |
| 1559 | 11838 | 3305 | 13364 | 5073 | 14843 |
| 1560 | 11839 | 3306 | 13365 | 5074 | 14843 |
| 1561 | 11840 | 3307 | 13366 | 5075 | 14843 |
| 1562 | 11841 | 3308 | 13366 | 5076 | 14844 |
| 1563 | 11842 | 3309 | 13367 | 5077 | 14845 |
| 1564 | 11843 | 3310 | 13368 | 5078 | 14846 |
| 1565 | 11844 | 3311 | 13369 | 5079 | 14847 |
| 1566 | 11845 | 3312 | 13370 | 5080 | 14847 |
| 1567 | 11846 | 3313 | 13371 | 5081 | 14848 |
| 1568 | 11847 | 3314 | 13372 | 5082 | 14849 |
| 1569 | 11848 | 3315 | 13373 | 5083 | 14850 |
| 1570 | 11849 | 3316 | 13374 | 5084 | 14851 |
| 1571 | 11850 | 3317 | 13375 | 5085 | 14852 |
| 1572 | 11851 | 3318 | 13376 | 5086 | 14852 |
| 1573 | 11852 | 3319 | 13377 | 5087 | 14852 |
| 1574 | 11853 | 3320 | 13378 | 5088 | 14852 |
| 1575 | 11854 | 3321 | 13379 | 5089 | 14852 |
| 1576 | 11855 | 3322 | 13380 | 5090 | 14853 |
| 1577 | 11856 | 3323 | 13380 | 5091 | 14853 |
| 1578 | 11857 | 3324 | 13381 | 5092 | 14854 |
| 1579 | 11858 | 3325 | 13382 | 5093 | 14855 |
| 1580 | 11858 | 3326 | 13383 | 5094 | 14856 |
| 1581 | 11858 | 3327 | 13384 | 5095 | 14857 |
| 1582 | 11858 | 3328 | 13384 | 5096 | 14858 |
| 1583 | 11858 | 3329 | 13384 | 5097 | 14859 |
| 1584 | 11859 | 3330 | 13384 | 5098 | 14860 |
| 1585 | 11859 | 3331 | 13384 | 5099 | 14860 |
| 1586 | 11860 | 3332 | 13384 | 5100 | 14861 |
| 1587 | 11861 | 3333 | 13384 | 5101 | 14861 |
| 1588 | 11861 | 3334 | 13385 | 5102 | 14862 |
| 1589 | 11861 | 3335 | 13386 | 5103 | 14863 |
| 1590 | 11862 | 3336 | 13387 | 5104 | 14863 |
| 1591 | 11863 | 3337 | 13388 | 5105 | 14863 |
| 1592 | 11864 | 3338 | 13389 | 5106 | 14863 |
| 1593 | 11865 | 3339 | 13390 | 5107 | 14863 |
| 1594 | 11866 | 3340 | 13391 | 5108 | 14863 |
| 1595 | 11867 | 3341 | 13392 | 5109 | 14863 |
| 1596 | 11868 | 3342 | 13393 | 5110 | 14863 |
| 1597 | 11869 | 3343 | 13394 | 5111 | 14863 |
| 1598 | 11870 | 3344 | 13395 | 5112 | 14863 |
| 1598 | 14126 | 3344 | 14917 | 5113 | 14863 |
| 1599 | 11871 | 3345 | 13396 | 5114 | 14863 |
| 1600 | 11872 | 3346 | 13397 | 5115 | 14864 |
| 1601 | 11873 | 3347 | 13398 | 5116 | 14865 |
| 1602 | 11874 | 3348 | 13399 | 5117 | 14866 |
| 1603 | 11875 | 3349 | 13400 | 5118 | 14867 |
| 1604 | 11876 | 3350 | 13401 | 5119 | 14868 |
| 1605 | 11877 | 3351 | 13402 | 5120 | 14869 |
| 1606 | 11878 | 3352 | 13403 | 5121 | 14869 |
| 1607 | 11879 | 3353 | 13404 | 5122 | 14869 |
| 1608 | 11880 | 3354 | 13405 | 5123 | 14869 |
| 1609 | 11880 | 3355 | 13405 | 5124 | 14870 |
| 1610 | 11880 | 3356 | 13406 | 5125 | 14871 |
| 1611 | 11880 | 3357 | 13407 | 5126 | 14872 |
| 1612 | 11880 | 3358 | 13408 | 5127 | 14874 |
| 1613 | 11880 | 3359 | 13409 | 5128 | 14875 |
| 1614 | 11880 | 3360 | 13410 | 5129 | 14876 |
| 1615 | 11881 | 3361 | 13411 | 5130 | 14877 |
| 1616 | 11882 | 3362 | 13412 | 5131 | 14878 |
| 1617 | 11883 | 3363 | 13413 | 5132 | 14879 |
| 1618 | 11884 | 3363 | 13421 | 5133 | 14880 |
| 1619 | 11885 | 3364 | 13414 | 5134 | 14881 |
| 1620 | 11886 | 3365 | 13415 | 5135 | 14882 |
| 1621 | 11887 | 3366 | 13416 | 5136 | 14883 |
| 1622 | 11888 | 3367 | 13417 | 5137 | 14884 |
| 1623 | 11889 | 3368 | 13417 | 5138 | 14885 |
| 1624 | 11890 | 3369 | 13418 | 5139 | 14886 |
| 1625 | 11891 | 3370 | 13419 | 5140 | 14887 |
| 1626 | 11892 | 3371 | 13420 | 5141 | 14889 |
| 1627 | 11892 | 3372 | 13422 | 5142 | 14890 |
| 1628 | 11893 | 3373 | 13423 | 5143 | 14892 |
| 1629 | 11894 | 3374 | 13424 | 5144 | 14893 |
| 1630 | 11895 | 3375 | 13425 | 5145 | 14894 |
| 1631 | 11896 | 3376 | 13426 | 5146 | 14895 |
| 1632 | 11897 | 3377 | 13426 | 5147 | 14896 |
| 1633 | 11898 | 3378 | 13427 | 5148 | 14897 |
| 1634 | 11899 | 3379 | 13427 | 5149 | 14898 |
| 1635 | 11900 | 3380 | 13427 | 5150 | 14899 |
| 1636 | 11901 | 3381 | 13427 | 5151 | 14900 |
| 1637 | 11901 | 3382 | 13428 | 5152 | 14901 |
| 1638 | 11902 | 3383 | 13429 | 5153 | 14902 |
| 1639 | 11903 | 3384 | 13429 | 5154 | 14903 |
| 1640 | 11904 | 3385 | 13430 | 5155 | 14905 |
| 1641 | 11905 | 3386 | 13431 | 5156 | 14906 |
| 1642 | 11906 | 3387 | 13432 | 5157 | 14907 |
| 1643 | 11907 | 3388 | 13433 | 5158 | 14908 |
| 1644 | 11908 | 3389 | 13434 | 5159 | 14909 |
| 1645 | 11909 | 3390 | 13435 | 5160 | 14910 |
| 1646 | 11910 | 3391 | 13435 | 5161 | 14911 |
| 1647 | 11911 | 3392 | 13435 | 5162 | 14911 |
| 1648 | 11912 | 3393 | 13435 | 5163 | 14912 |
| 1649 | 11913 | 3394 | 13436 | 5164 | 14913 |
| 1650 | 11914 | 3395 | 13437 | 5165 | 14914 |
| 1651 | 11915 | 3396 | 13438 | 5166 | 14915 |
| 1652 | 11916 | 3397 | 13439 | 5167 | 14916 |
| 1653 | 11917 | 3398 | 13440 | 5168 | 14918 |
| 1654 | 11918 | 3399 | 13441 | 5169 | 14919 |
| 1655 | 11919 | 3400 | 13442 | 5170 | 14920 |
| 1656 | 11920 | 3401 | 13443 | 5171 | 14921 |
| 1657 | 11921 | 3402 | 13444 | 5172 | 14921 |
| 1658 | 11922 | 3403 | 13445 | 5173 | 14922 |
| 1659 | 11922 | 3404 | 13445 | 5174 | 14924 |
| 1660 | 11922 | 3405 | 13445 | 5175 | 14925 |
| 1661 | 11922 | 3406 | 13446 | 5176 | 14926 |
| 1662 | 11922 | 3407 | 13446 | 5177 | 14927 |
| 1663 | 11922 | 3408 | 13446 | 5178 | 14928 |
| 1664 | 11922 | 3409 | 13446 | 5179 | 14929 |
| 1665 | 11922 | 3410 | 13446 | 5180 | 14930 |
| 1666 | 11923 | 3411 | 13446 | 5181 | 14931 |
| 1667 | 11924 | 3412 | 13447 | 5182 | 14932 |
| 1668 | 11925 | 3413 | 13448 | 5183 | 14933 |
| 1669 | 11926 | 3414 | 13449 | 5184 | 14934 |
| 1670 | 11927 | 3415 | 13450 | 5185 | 14935 |
| 1671 | 11928 | 3416 | 13451 | 5186 | 14935 |
| 1672 | 11929 | 3417 | 13452 | 5187 | 14936 |
| 1673 | 11930 | 3418 | 13453 | 5188 | 14937 |
| 1674 | 11931 | 3419 | 13454 | 5189 | 14938 |
| 1675 | 11932 | 3420 | 13455 | 5190 | 14939 |
| 1676 | 11933 | 3421 | 13456 | 5191 | 14940 |
| 1677 | 11933 | 3422 | 13457 | 5192 | 14941 |
| 1678 | 11933 | 3423 | 13458 | 5193 | 14942 |
| 1679 | 11934 | 3424 | 13459 | 5194 | 14943 |
| 1680 | 11935 | 3425 | 13460 | 5195 | 14944 |
| 1681 | 11936 | 3426 | 13461 | 5196 | 14945 |
| 1682 | 11937 | 3427 | 13462 | 5197 | 14946 |
| 1683 | 11938 | 3428 | 13463 | 5198 | 14947 |
| 1684 | 11939 | 3429 | 13464 | 5199 | 14948 |
| 1685 | 11940 | 3430 | 13464 | 5200 | 14949 |
| 1686 | 11941 | 3431 | 13465 | 5201 | 14950 |
| 1687 | 11942 | 3432 | 13466 | 5202 | 14951 |
| 1688 | 11943 | 3433 | 13467 | 5203 | 14952 |
| 1689 | 11944 | 3434 | 13467 | 5204 | 14953 |
| 1690 | 11945 | 3435 | 13468 | 5205 | 14954 |
| 1691 | 11946 | 3436 | 13469 | 5206 | 14955 |
| 1692 | 11947 | 3437 | 13470 | 5207 | 14957 |
| 1693 | 11948 | 3438 | 13471 | 5208 | 14958 |
| 1694 | 11949 | 3439 | 13472 | 5209 | 14959 |
| 1695 | 11950 | 3440 | 13473 | 5210 | 14961 |
| 1696 | 11951 | 3441 | 13474 | 5211 | 14962 |
| 1697 | 11951 | 3442 | 13474 | 5212 | 14964 |
| 1698 | 11952 | 3443 | 13474 | 5213 | 14965 |
| 1699 | 11953 | 3444 | 13475 | 5214 | 14966 |
| 1700 | 11954 | 3445 | 13475 | 5215 | 14967 |
| 1701 | 11955 | 3446 | 13475 | 5216 | 14968 |
| 1702 | 11956 | 3447 | 13475 | 5217 | 14969 |
| 1702 | 12762 | 3448 | 13475 | 5218 | 14970 |
| 1703 | 11957 | 3449 | 13476 | 5219 | 14971 |
| 1704 | 11958 | 3450 | 13477 | 5220 | 14972 |
| 1705 | 11959 | 3451 | 13478 | 5221 | 14973 |
| 1706 | 11960 | 3452 | 13479 | 5222 | 14974 |
| 1707 | 11961 | 3453 | 13480 | 5223 | 14975 |
| 1708 | 11962 | 3454 | 13481 | 5224 | 14976 |
| 1709 | 11963 | 3455 | 13482 | 5225 | 14977 |
| 1710 | 11964 | 3456 | 13483 | 5226 | 14978 |
| 1711 | 11965 | 3457 | 13484 | 5227 | 14979 |
| 1712 | 11966 | 3458 | 13485 | 5228 | 14980 |
| 1713 | 11967 | 3459 | 13486 | 5229 | 14981 |
| 1714 | 11968 | 3460 | 13487 | 5230 | 14982 |
| 1715 | 11969 | 3461 | 13488 | 5231 | 14983 |
| 1716 | 11970 | 3462 | 13489 | 5232 | 14984 |
| 1717 | 11971 | 3463 | 13490 | 5233 | 14985 |
| 1718 | 11972 | 3464 | 13491 | 5234 | 14986 |
| 1719 | 11973 | 3465 | 13492 | 5235 | 14987 |
| 1720 | 11974 | 3466 | 13493 | 5236 | 14988 |
| 1721 | 11975 | 3467 | 13494 | 5237 | 14989 |
| 1722 | 11976 | 3468 | 13495 | 5238 | 14990 |
| 1723 | 11976 | 3469 | 13496 | 5239 | 14991 |
| 1724 | 11976 | 3470 | 13497 | 5240 | 14992 |
| 1725 | 11976 | 3471 | 13498 | 5241 | 14993 |
| 1726 | 11977 | 3472 | 13499 | 5242 | 14994 |
| 1727 | 11978 | 3473 | 13500 | 5243 | 14995 |
| 1728 | 11979 | 3474 | 13501 | 5244 | 14996 |
| 1729 | 11980 | 3475 | 13502 | 5245 | 14997 |
| 1730 | 11980 | 3476 | 13503 | 5246 | 14999 |
| 1731 | 11981 | 3477 | 13503 | 5247 | 15001 |
| 1732 | 11982 | 3478 | 13504 | 5248 | 15002 |
| 1733 | 11983 | 3479 | 13506 | 5249 | 15003 |
| 1734 | 11984 | 3480 | 13507 | 5250 | 15004 |
| 1735 | 11985 | 3481 | 13508 | 5251 | 15005 |
| 1736 | 11986 | 3482 | 13509 | 5252 | 15006 |
| 1737 | 11987 | 3483 | 13510 | 5253 | 15007 |
| 1738 | 11988 | 3484 | 13511 | 5254 | 15008 |
| 1739 | 11989 | 3485 | 13512 | 5255 | 15009 |
| 1740 | 11989 | 3486 | 13513 | 5256 | 15010 |
| 1741 | 11990 | 3487 | 13514 | 5257 | 15011 |
| 1742 | 11991 | 3488 | 13515 | 5258 | 15012 |
| 1743 | 11992 | 3489 | 13516 | 5259 | 15013 |
| 1744 | 11993 | 3490 | 13517 | 5260 | 15014 |
| 1745 | 11994 | 3491 | 13518 | 5261 | 15015 |
| 1746 | 11995 | 3492 | 13519 | | |

TABLE 2
Effector Protein

| C1 | D1 | C2 | D2 | C3 | D3 | C4 | D4 |
|---|---|---|---|---|---|---|---|
| SEQ ID NO: | SEQ ID NO: | SEQ ID NO: | SEQ ID NO: | SEQ ID NO: | SEQ ID NO: | SEQ ID NO: | SEQ ID NO: |
| 24166 | 15022 | 26452 | 17308 | 28738 | 19594 | 31024 | 21880 |
| 24167 | 15023 | 26453 | 17309 | 28739 | 19595 | 31025 | 21881 |
| 24168 | 15024 | 26454 | 17310 | 28740 | 19596 | 31026 | 21882 |
| 24169 | 15025 | 26455 | 17311 | 28741 | 19597 | 31027 | 21883 |
| 24170 | 15026 | 26456 | 17312 | 28742 | 19598 | 31028 | 21884 |
| 24171 | 15027 | 26457 | 17313 | 28743 | 19599 | 31029 | 21885 |
| 24172 | 15028 | 26458 | 17314 | 28744 | 19600 | 31030 | 21886 |
| 24173 | 15029 | 26459 | 17315 | 28745 | 19601 | 31031 | 21887 |
| 24174 | 15030 | 26460 | 17316 | 28746 | 19602 | 31032 | 21888 |
| 24175 | 15031 | 26461 | 17317 | 28747 | 19603 | 31033 | 21889 |
| 24176 | 15032 | 26462 | 17318 | 28748 | 19604 | 31034 | 21890 |
| 24177 | 15033 | 26463 | 17319 | 28749 | 19605 | 31035 | 21891 |
| 24178 | 15034 | 26464 | 17320 | 28750 | 19606 | 31036 | 21892 |
| 24179 | 15035 | 26465 | 17321 | 28751 | 19607 | 31037 | 21893 |
| 24180 | 15036 | 26466 | 17322 | 28752 | 19608 | 31038 | 21894 |
| 24181 | 15037 | 26467 | 17323 | 28753 | 19609 | 31039 | 21895 |
| 24182 | 15038 | 26468 | 17324 | 28754 | 19610 | 31040 | 21896 |
| 24183 | 15039 | 26469 | 17325 | 28755 | 19611 | 31041 | 21897 |
| 24184 | 15040 | 26470 | 17326 | 28756 | 19612 | 31042 | 21898 |
| 24185 | 15041 | 26471 | 17327 | 28757 | 19613 | 31043 | 21899 |
| 24186 | 15042 | 26472 | 17328 | 28758 | 19614 | 31044 | 21900 |
| 24187 | 15043 | 26473 | 17329 | 28759 | 19615 | 31045 | 21901 |
| 24188 | 15044 | 26474 | 17330 | 28760 | 19616 | 31046 | 21902 |
| 24189 | 15045 | 26475 | 17331 | 28761 | 19617 | 31047 | 21903 |
| 24190 | 15046 | 26476 | 17332 | 28762 | 19618 | 31048 | 21904 |
| 24191 | 15047 | 26477 | 17333 | 28763 | 19619 | 31049 | 21905 |
| 24192 | 15048 | 26478 | 17334 | 28764 | 19620 | 31050 | 21906 |
| 24193 | 15049 | 26479 | 17335 | 28765 | 19621 | 31051 | 21907 |
| 24194 | 15050 | 26480 | 17336 | 28766 | 19622 | 31052 | 21908 |
| 24195 | 15051 | 26481 | 17337 | 28767 | 19623 | 31053 | 21909 |
| 24196 | 15052 | 26482 | 17338 | 28768 | 19624 | 31054 | 21910 |
| 24197 | 15053 | 26483 | 17339 | 28769 | 19625 | 31055 | 21911 |
| 24198 | 15054 | 26484 | 17340 | 28770 | 19626 | 31056 | 21912 |
| 24199 | 15055 | 26485 | 17341 | 28771 | 19627 | 31057 | 21913 |
| 24200 | 15056 | 26486 | 17342 | 28772 | 19628 | 31058 | 21914 |
| 24201 | 15057 | 26487 | 17343 | 28773 | 19629 | 31059 | 21915 |
| 24202 | 15058 | 26488 | 17344 | 28774 | 19630 | 31060 | 21916 |
| 24203 | 15059 | 26489 | 17345 | 28775 | 19631 | 31061 | 21917 |
| 24204 | 15060 | 26490 | 17346 | 28776 | 19632 | 31062 | 21918 |
| 24205 | 15061 | 26491 | 17347 | 28777 | 19633 | 31063 | 21919 |
| 24206 | 15062 | 26492 | 17348 | 28778 | 19634 | 31064 | 21920 |
| 24207 | 15063 | 26493 | 17349 | 28779 | 19635 | 31065 | 21921 |
| 24208 | 15064 | 26494 | 17350 | 28780 | 19636 | 31066 | 21922 |
| 24209 | 15065 | 26495 | 17351 | 28781 | 19637 | 31067 | 21923 |
| 24210 | 15066 | 26496 | 17352 | 28782 | 19638 | 31068 | 21924 |
| 24211 | 15067 | 26497 | 17353 | 28783 | 19639 | 31069 | 21925 |
| 24212 | 15068 | 26498 | 17354 | 28784 | 19640 | 31070 | 21926 |
| 24213 | 15069 | 26499 | 17355 | 28785 | 19641 | 31071 | 21927 |
| 24214 | 15070 | 26500 | 17356 | 28786 | 19642 | 31072 | 21928 |
| 24215 | 15071 | 26501 | 17357 | 28787 | 19643 | 31073 | 21929 |
| 24216 | 15072 | 26502 | 17358 | 28788 | 19644 | 31074 | 21930 |
| 24217 | 15073 | 26503 | 17359 | 28789 | 19645 | 31075 | 21931 |
| 24218 | 15074 | 26504 | 17360 | 28790 | 19646 | 31076 | 21932 |
| 24219 | 15075 | 26505 | 17361 | 28791 | 19647 | 31077 | 21933 |
| 24220 | 15076 | 26506 | 17362 | 28792 | 19648 | 31078 | 21934 |
| 24221 | 15077 | 26507 | 17363 | 28793 | 19649 | 31079 | 21935 |
| 24222 | 15078 | 26508 | 17364 | 28794 | 19650 | 31080 | 21936 |
| 24223 | 15079 | 26509 | 17365 | 28795 | 19651 | 31081 | 21937 |
| 24224 | 15080 | 26510 | 17366 | 28796 | 19652 | 31082 | 21938 |
| 24225 | 15081 | 26511 | 17367 | 28797 | 19653 | 31083 | 21939 |
| 24226 | 15082 | 26512 | 17368 | 28798 | 19654 | 31084 | 21940 |
| 24227 | 15083 | 26513 | 17369 | 28799 | 19655 | 31085 | 21941 |
| 24228 | 15084 | 26514 | 17370 | 28800 | 19656 | 31086 | 21942 |
| 24229 | 15085 | 26515 | 17371 | 28801 | 19657 | 31087 | 21943 |
| 24230 | 15086 | 26516 | 17372 | 28802 | 19658 | 31088 | 21944 |
| 24231 | 15087 | 26517 | 17373 | 28803 | 19659 | 31089 | 21945 |
| 24232 | 15088 | 26518 | 17374 | 28804 | 19660 | 31090 | 21946 |
| 24233 | 15089 | 26519 | 17375 | 28805 | 19661 | 31091 | 21947 |
| 24234 | 15090 | 26520 | 17376 | 28806 | 19662 | 31092 | 21948 |
| 24235 | 15091 | 26521 | 17377 | 28807 | 19663 | 31093 | 21949 |
| 24236 | 15092 | 26522 | 17378 | 28808 | 19664 | 31094 | 21950 |
| 24237 | 15093 | 26523 | 17379 | 28809 | 19665 | 31095 | 21951 |
| 24238 | 15094 | 26524 | 17380 | 28810 | 19666 | 31096 | 21952 |
| 24239 | 15095 | 26525 | 17381 | 28811 | 19667 | 31097 | 21953 |
| 24240 | 15096 | 26526 | 17382 | 28812 | 19668 | 31098 | 21954 |
| 24241 | 15097 | 26527 | 17383 | 28813 | 19669 | 31099 | 21955 |
| 24242 | 15098 | 26528 | 17384 | 28814 | 19670 | 31100 | 21956 |
| 24243 | 15099 | 26529 | 17385 | 28815 | 19671 | 31101 | 21957 |
| 24244 | 15100 | 26530 | 17386 | 28816 | 19672 | 31102 | 21958 |
| 24245 | 15101 | 26531 | 17387 | 28817 | 19673 | 31103 | 21959 |
| 24246 | 15102 | 26532 | 17388 | 28818 | 19674 | 31104 | 21960 |
| 24247 | 15103 | 26533 | 17389 | 28819 | 19675 | 31105 | 21961 |
| 24248 | 15104 | 26534 | 17390 | 28820 | 19676 | 31106 | 21962 |
| 24249 | 15105 | 26535 | 17391 | 28821 | 19677 | 31107 | 21963 |
| 24250 | 15106 | 26536 | 17392 | 28822 | 19678 | 31108 | 21964 |
| 24251 | 15107 | 26537 | 17393 | 28823 | 19679 | 31109 | 21965 |
| 24252 | 15108 | 26538 | 17394 | 28824 | 19680 | 31110 | 21966 |
| 24253 | 15109 | 26539 | 17395 | 28825 | 19681 | 31111 | 21967 |
| 24254 | 15110 | 26540 | 17396 | 28826 | 19682 | 31112 | 21968 |
| 24255 | 15111 | 26541 | 17397 | 28827 | 19683 | 31113 | 21969 |
| 24256 | 15112 | 26542 | 17398 | 28828 | 19684 | 31114 | 21970 |
| 24257 | 15113 | 26543 | 17399 | 28829 | 19685 | 31115 | 21971 |
| 24258 | 15114 | 26544 | 17400 | 28830 | 19686 | 31116 | 21972 |
| 24259 | 15115 | 26545 | 17401 | 28831 | 19687 | 31117 | 21973 |
| 24260 | 15116 | 26546 | 17402 | 28832 | 19688 | 31118 | 21974 |
| 24261 | 15117 | 26547 | 17403 | 28833 | 19689 | 31119 | 21975 |
| 24262 | 15118 | 26548 | 17404 | 28834 | 19690 | 31120 | 21976 |
| 24263 | 15119 | 26549 | 17405 | 28835 | 19691 | 31121 | 21977 |
| 24264 | 15120 | 26550 | 17406 | 28836 | 19692 | 31122 | 21978 |
| 24265 | 15121 | 26551 | 17407 | 28837 | 19693 | 31123 | 21979 |
| 24266 | 15122 | 26552 | 17408 | 28838 | 19694 | 31124 | 21980 |
| 24267 | 15123 | 26553 | 17409 | 28839 | 19695 | 31125 | 21981 |
| 24268 | 15124 | 26554 | 17410 | 28840 | 19696 | 31126 | 21982 |
| 24269 | 15125 | 26555 | 17411 | 28841 | 19697 | 31127 | 21983 |
| 24270 | 15126 | 26556 | 17412 | 28842 | 19698 | 31128 | 21984 |
| 24271 | 15127 | 26557 | 17413 | 28843 | 19699 | 31129 | 21985 |
| 24272 | 15128 | 26558 | 17414 | 28844 | 19700 | 31130 | 21986 |
| 24273 | 15129 | 26559 | 17415 | 28845 | 19701 | 31131 | 21987 |
| 24274 | 15130 | 26560 | 17416 | 28846 | 19702 | 31132 | 21988 |
| 24275 | 15131 | 26561 | 17417 | 28847 | 19703 | 31133 | 21989 |
| 24276 | 15132 | 26562 | 17418 | 28848 | 19704 | 31134 | 21990 |
| 24277 | 15133 | 26563 | 17419 | 28849 | 19705 | 31135 | 21991 |
| 24278 | 15134 | 26564 | 17420 | 28850 | 19706 | 31136 | 21992 |
| 24279 | 15135 | 26565 | 17421 | 28851 | 19707 | 31137 | 21993 |
| 24280 | 15136 | 26566 | 17422 | 28852 | 19708 | 31138 | 21994 |
| 24281 | 15137 | 26567 | 17423 | 28853 | 19709 | 31139 | 21995 |
| 24282 | 15138 | 26568 | 17424 | 28854 | 19710 | 31140 | 21996 |
| 24283 | 15139 | 26569 | 17425 | 28855 | 19711 | 31141 | 21997 |
| 24284 | 15140 | 26570 | 17426 | 28856 | 19712 | 31142 | 21998 |
| 24285 | 15141 | 26571 | 17427 | 28857 | 19713 | 31143 | 21999 |
| 24286 | 15142 | 26572 | 17428 | 28858 | 19714 | 31144 | 22000 |
| 24287 | 15143 | 26573 | 17429 | 28859 | 19715 | 31145 | 22001 |
| 24288 | 15144 | 26574 | 17430 | 28860 | 19716 | 31146 | 22002 |
| 24289 | 15145 | 26575 | 17431 | 28861 | 19717 | 31147 | 22003 |
| 24290 | 15146 | 26576 | 17432 | 28862 | 19718 | 31148 | 22004 |
| 24291 | 15147 | 26577 | 17433 | 28863 | 19719 | 31149 | 22005 |
| 24292 | 15148 | 26578 | 17434 | 28864 | 19720 | 31150 | 22006 |
| 24293 | 15149 | 26579 | 17435 | 28865 | 19721 | 31151 | 22007 |
| 24294 | 15150 | 26580 | 17436 | 28866 | 19722 | 31152 | 22008 |
| 24295 | 15151 | 26581 | 17437 | 28867 | 19723 | 31153 | 22009 |
| 24296 | 15152 | 26582 | 17438 | 28868 | 19724 | 31154 | 22010 |
| 24297 | 15153 | 26583 | 17439 | 28869 | 19725 | 31155 | 22011 |
| 24298 | 15154 | 26584 | 17440 | 28870 | 19726 | 31156 | 22012 |
| 24299 | 15155 | 26585 | 17441 | 28871 | 19727 | 31157 | 22013 |
| 24300 | 15156 | 26586 | 17442 | 28872 | 19728 | 31158 | 22014 |
| 24301 | 15157 | 26587 | 17443 | 28873 | 19729 | 31159 | 22015 |
| 24302 | 15158 | 26588 | 17444 | 28874 | 19730 | 31160 | 22016 |
| 24303 | 15159 | 26589 | 17445 | 28875 | 19731 | 31161 | 22017 |
| 24304 | 15160 | 26590 | 17446 | 28876 | 19732 | 31162 | 22018 |
| 24305 | 15161 | 26591 | 17447 | 28877 | 19733 | 31163 | 22019 |
| 24306 | 15162 | 26592 | 17448 | 28878 | 19734 | 31164 | 22020 |
| 24307 | 15163 | 26593 | 17449 | 28879 | 19735 | 31165 | 22021 |
| 24308 | 15164 | 26594 | 17450 | 28880 | 19736 | 31166 | 22022 |
| 24309 | 15165 | 26595 | 17451 | 28881 | 19737 | 31167 | 22023 |
| 24310 | 15166 | 26596 | 17452 | 28882 | 19738 | 31168 | 22024 |
| 24311 | 15167 | 26597 | 17453 | 28883 | 19739 | 31169 | 22025 |
| 24312 | 15168 | 26598 | 17454 | 28884 | 19740 | 31170 | 22026 |
| 24313 | 15169 | 26599 | 17455 | 28885 | 19741 | 31171 | 22027 |
| 24314 | 15170 | 26600 | 17456 | 28886 | 19742 | 31172 | 22028 |
| 24315 | 15171 | 26601 | 17457 | 28887 | 19743 | 31173 | 22029 |
| 24316 | 15172 | 26602 | 17458 | 28888 | 19744 | 31174 | 22030 |
| 24317 | 15173 | 26603 | 17459 | 28889 | 19745 | 31175 | 22031 |
| 24318 | 15174 | 26604 | 17460 | 28890 | 19746 | 31176 | 22032 |
| 24319 | 15175 | 26605 | 17461 | 28891 | 19747 | 31177 | 22033 |
| 24320 | 15176 | 26606 | 17462 | 28892 | 19748 | 31178 | 22034 |
| 24321 | 15177 | 26607 | 17463 | 28893 | 19749 | 31179 | 22035 |
| 24322 | 15178 | 26608 | 17464 | 28894 | 19750 | 31180 | 22036 |
| 24323 | 15179 | 26609 | 17465 | 28895 | 19751 | 31181 | 22037 |
| 24324 | 15180 | 26610 | 17466 | 28896 | 19752 | 31182 | 22038 |
| 24325 | 15181 | 26611 | 17467 | 28897 | 19753 | 31183 | 22039 |
| 24326 | 15182 | 26612 | 17468 | 28898 | 19754 | 31184 | 22040 |
| 24327 | 15183 | 26613 | 17469 | 28899 | 19755 | 31185 | 22041 |
| 24328 | 15184 | 26614 | 17470 | 28900 | 19756 | 31186 | 22042 |
| 24329 | 15185 | 26615 | 17471 | 28901 | 19757 | 31187 | 22043 |
| 24330 | 15186 | 26616 | 17472 | 28902 | 19758 | 31188 | 22044 |
| 24331 | 15187 | 26617 | 17473 | 28903 | 19759 | 31189 | 22045 |
| 24332 | 15188 | 26618 | 17474 | 28904 | 19760 | 31190 | 22046 |
| 24333 | 15189 | 26619 | 17475 | 28905 | 19761 | 31191 | 22047 |
| 24334 | 15190 | 26620 | 17476 | 28906 | 19762 | 31192 | 22048 |
| 24335 | 15191 | 26621 | 17477 | 28907 | 19763 | 31193 | 22049 |
| 24336 | 15192 | 26622 | 17478 | 28908 | 19764 | 31194 | 22050 |
| 24337 | 15193 | 26623 | 17479 | 28909 | 19765 | 31195 | 22051 |
| 24338 | 15194 | 26624 | 17480 | 28910 | 19766 | 31196 | 22052 |
| 24339 | 15195 | 26625 | 17481 | 28911 | 19767 | 31197 | 22053 |
| 24340 | 15196 | 26626 | 17482 | 28912 | 19768 | 31198 | 22054 |
| 24341 | 15197 | 26627 | 17483 | 28913 | 19769 | 31199 | 22055 |
| 24342 | 15198 | 26628 | 17484 | 28914 | 19770 | 31200 | 22056 |
| 24343 | 15199 | 26629 | 17485 | 28915 | 19771 | 31201 | 22057 |
| 24344 | 15200 | 26630 | 17486 | 28916 | 19772 | 31202 | 22058 |
| 24345 | 15201 | 26631 | 17487 | 28917 | 19773 | 31203 | 22059 |
| 24346 | 15202 | 26632 | 17488 | 28918 | 19774 | 31204 | 22060 |
| 24347 | 15203 | 26633 | 17489 | 28919 | 19775 | 31205 | 22061 |
| 24348 | 15204 | 26634 | 17490 | 28920 | 19776 | 31206 | 22062 |
| 24349 | 15205 | 26635 | 17491 | 28921 | 19777 | 31207 | 22063 |
| 24350 | 15206 | 26636 | 17492 | 28922 | 19778 | 31208 | 22064 |
| 24351 | 15207 | 26637 | 17493 | 28923 | 19779 | 31209 | 22065 |
| 24352 | 15208 | 26638 | 17494 | 28924 | 19780 | 31210 | 22066 |
| 24353 | 15209 | 26639 | 17495 | 28925 | 19781 | 31211 | 22067 |
| 24354 | 15210 | 26640 | 17496 | 28926 | 19782 | 31212 | 22068 |
| 24355 | 15211 | 26641 | 17497 | 28927 | 19783 | 31213 | 22069 |
| 24356 | 15212 | 26642 | 17498 | 28928 | 19784 | 31214 | 22070 |
| 24357 | 15213 | 26643 | 17499 | 28929 | 19785 | 31215 | 22071 |
| 24358 | 15214 | 26644 | 17500 | 28930 | 19786 | 31216 | 22072 |
| 24359 | 15215 | 26645 | 17501 | 28931 | 19787 | 31217 | 22073 |
| 24360 | 15216 | 26646 | 17502 | 28932 | 19788 | 31218 | 22074 |
| 24361 | 15217 | 26647 | 17503 | 28933 | 19789 | 31219 | 22075 |
| 24362 | 15218 | 26648 | 17504 | 28934 | 19790 | 31220 | 22076 |
| 24363 | 15219 | 26649 | 17505 | 28935 | 19791 | 31221 | 22077 |
| 24364 | 15220 | 26650 | 17506 | 28936 | 19792 | 31222 | 22078 |
| 24365 | 15221 | 26651 | 17507 | 28937 | 19793 | 31223 | 22079 |
| 24366 | 15222 | 26652 | 17508 | 28938 | 19794 | 31224 | 22080 |
| 24367 | 15223 | 26653 | 17509 | 28939 | 19795 | 31225 | 22081 |
| 24368 | 15224 | 26654 | 17510 | 28940 | 19796 | 31226 | 22082 |
| 24369 | 15225 | 26655 | 17511 | 28941 | 19797 | 31227 | 22083 |
| 24370 | 15226 | 26656 | 17512 | 28942 | 19798 | 31228 | 22084 |
| 24371 | 15227 | 26657 | 17513 | 28943 | 19799 | 31229 | 22085 |
| 24372 | 15228 | 26658 | 17514 | 28944 | 19800 | 31230 | 22086 |
| 24373 | 15229 | 26659 | 17515 | 28945 | 19801 | 31231 | 22087 |
| 24374 | 15230 | 26660 | 17516 | 28946 | 19802 | 31232 | 22088 |
| 24375 | 15231 | 26661 | 17517 | 28947 | 19803 | 31233 | 22089 |
| 24376 | 15232 | 26662 | 17518 | 28948 | 19804 | 31234 | 22090 |
| 24377 | 15233 | 26663 | 17519 | 28949 | 19805 | 31235 | 22091 |
| 24378 | 15234 | 26664 | 17520 | 28950 | 19806 | 31236 | 22092 |
| 24379 | 15235 | 26665 | 17521 | 28951 | 19807 | 31237 | 22093 |
| 24380 | 15236 | 26666 | 17522 | 28952 | 19808 | 31238 | 22094 |
| 24381 | 15237 | 26667 | 17523 | 28953 | 19809 | 31239 | 22095 |
| 24382 | 15238 | 26668 | 17524 | 28954 | 19810 | 31240 | 22096 |
| 24383 | 15239 | 26669 | 17525 | 28955 | 19811 | 31241 | 22097 |
| 24384 | 15240 | 26670 | 17526 | 28956 | 19812 | 31242 | 22098 |
| 24385 | 15241 | 26671 | 17527 | 28957 | 19813 | 31243 | 22099 |
| 24386 | 15242 | 26672 | 17528 | 28958 | 19814 | 31244 | 22100 |
| 24387 | 15243 | 26673 | 17529 | 28959 | 19815 | 31245 | 22101 |
| 24388 | 15244 | 26674 | 17530 | 28960 | 19816 | 31246 | 22102 |
| 24389 | 15245 | 26675 | 17531 | 28961 | 19817 | 31247 | 22103 |
| 24390 | 15246 | 26676 | 17532 | 28962 | 19818 | 31248 | 22104 |
| 24391 | 15247 | 26677 | 17533 | 28963 | 19819 | 31249 | 22105 |
| 24392 | 15248 | 26678 | 17534 | 28964 | 19820 | 31250 | 22106 |
| 24393 | 15249 | 26679 | 17535 | 28965 | 19821 | 31251 | 22107 |
| 24394 | 15250 | 26680 | 17536 | 28966 | 19822 | 31252 | 22108 |
| 24395 | 15251 | 26681 | 17537 | 28967 | 19823 | 31253 | 22109 |
| 24396 | 15252 | 26682 | 17538 | 28968 | 19824 | 31254 | 22110 |
| 24397 | 15253 | 26683 | 17539 | 28969 | 19825 | 31255 | 22111 |
| 24398 | 15254 | 26684 | 17540 | 28970 | 19826 | 31256 | 22112 |
| 24399 | 15255 | 26685 | 17541 | 28971 | 19827 | 31257 | 22113 |
| 24400 | 15256 | 26686 | 17542 | 28972 | 19828 | 31258 | 22114 |
| 24401 | 15257 | 26687 | 17543 | 28973 | 19829 | 31259 | 22115 |
| 24402 | 15258 | 26688 | 17544 | 28974 | 19830 | 31260 | 22116 |
| 24403 | 15259 | 26689 | 17545 | 28975 | 19831 | 31261 | 22117 |
| 24404 | 15260 | 26690 | 17546 | 28976 | 19832 | 31262 | 22118 |
| 24405 | 15261 | 26691 | 17547 | 28977 | 19833 | 31263 | 22119 |
| 24406 | 15262 | 26692 | 17548 | 28978 | 19834 | 31264 | 22120 |
| 24407 | 15263 | 26693 | 17549 | 28979 | 19835 | 31265 | 22121 |
| 24408 | 15264 | 26694 | 17550 | 28980 | 19836 | 31266 | 22122 |
| 24409 | 15265 | 26695 | 17551 | 28981 | 19837 | 31267 | 22123 |
| 24410 | 15266 | 26696 | 17552 | 28982 | 19838 | 31268 | 22124 |
| 24411 | 15267 | 26697 | 17553 | 28983 | 19839 | 31269 | 22125 |
| 24412 | 15268 | 26698 | 17554 | 28984 | 19840 | 31270 | 22126 |
| 24413 | 15269 | 26699 | 17555 | 28985 | 19841 | 31271 | 22127 |
| 24414 | 15270 | 26700 | 17556 | 28986 | 19842 | 31272 | 22128 |
| 24415 | 15271 | 26701 | 17557 | 28987 | 19843 | 31273 | 22129 |
| 24416 | 15272 | 26702 | 17558 | 28988 | 19844 | 31274 | 22130 |
| 24417 | 15273 | 26703 | 17559 | 28989 | 19845 | 31275 | 22131 |
| 24418 | 15274 | 26704 | 17560 | 28990 | 19846 | 31276 | 22132 |
| 24419 | 15275 | 26705 | 17561 | 28991 | 19847 | 31277 | 22133 |
| 24420 | 15276 | 26706 | 17562 | 28992 | 19848 | 31278 | 22134 |
| 24421 | 15277 | 26707 | 17563 | 28993 | 19849 | 31279 | 22135 |
| 24422 | 15278 | 26708 | 17564 | 28994 | 19850 | 31280 | 22136 |
| 24423 | 15279 | 26709 | 17565 | 28995 | 19851 | 31281 | 22137 |
| 24424 | 15280 | 26710 | 17566 | 28996 | 19852 | 31282 | 22138 |
| 24425 | 15281 | 26711 | 17567 | 28997 | 19853 | 31283 | 22139 |
| 24426 | 15282 | 26712 | 17568 | 28998 | 19854 | 31284 | 22140 |
| 24427 | 15283 | 26713 | 17569 | 28999 | 19855 | 31285 | 22141 |
| 24428 | 15284 | 26714 | 17570 | 29000 | 19856 | 31286 | 22142 |
| 24429 | 15285 | 26715 | 17571 | 29001 | 19857 | 31287 | 22143 |
| 24430 | 15286 | 26716 | 17572 | 29002 | 19858 | 31288 | 22144 |
| 24431 | 15287 | 26717 | 17573 | 29003 | 19859 | 31289 | 22145 |
| 24432 | 15288 | 26718 | 17574 | 29004 | 19860 | 31290 | 22146 |
| 24433 | 15289 | 26719 | 17575 | 29005 | 19861 | 31291 | 22147 |
| 24434 | 15290 | 26720 | 17576 | 29006 | 19862 | 31292 | 22148 |
| 24435 | 15291 | 26721 | 17577 | 29007 | 19863 | 31293 | 22149 |
| 24436 | 15292 | 26722 | 17578 | 29008 | 19864 | 31294 | 22150 |
| 24437 | 15293 | 26723 | 17579 | 29009 | 19865 | 31295 | 22151 |
| 24438 | 15294 | 26724 | 17580 | 29010 | 19866 | 31296 | 22152 |
| 24439 | 15295 | 26725 | 17581 | 29011 | 19867 | 31297 | 22153 |
| 24440 | 15296 | 26726 | 17582 | 29012 | 19868 | 31298 | 22154 |
| 24441 | 15297 | 26727 | 17583 | 29013 | 19869 | 31299 | 22155 |
| 24442 | 15298 | 26728 | 17584 | 29014 | 19870 | 31300 | 22156 |
| 24443 | 15299 | 26729 | 17585 | 29015 | 19871 | 31301 | 22157 |
| 24444 | 15300 | 26730 | 17586 | 29016 | 19872 | 31302 | 22158 |
| 24445 | 15301 | 26731 | 17587 | 29017 | 19873 | 31303 | 22159 |
| 24446 | 15302 | 26732 | 17588 | 29018 | 19874 | 31304 | 22160 |
| 24447 | 15303 | 26733 | 17589 | 29019 | 19875 | 31305 | 22161 |
| 24448 | 15304 | 26734 | 17590 | 29020 | 19876 | 31306 | 22162 |
| 24449 | 15305 | 26735 | 17591 | 29021 | 19877 | 31307 | 22163 |
| 24450 | 15306 | 26736 | 17592 | 29022 | 19878 | 31308 | 22164 |
| 24451 | 15307 | 26737 | 17593 | 29023 | 19879 | 31309 | 22165 |
| 24452 | 15308 | 26738 | 17594 | 29024 | 19880 | 31310 | 22166 |
| 24453 | 15309 | 26739 | 17595 | 29025 | 19881 | 31311 | 22167 |
| 24454 | 15310 | 26740 | 17596 | 29026 | 19882 | 31312 | 22168 |
| 24455 | 15311 | 26741 | 17597 | 29027 | 19883 | 31313 | 22169 |
| 24456 | 15312 | 26742 | 17598 | 29028 | 19884 | 31314 | 22170 |
| 24457 | 15313 | 26743 | 17599 | 29029 | 19885 | 31315 | 22171 |
| 24458 | 15314 | 26744 | 17600 | 29030 | 19886 | 31316 | 22172 |
| 24459 | 15315 | 26745 | 17601 | 29031 | 19887 | 31317 | 22173 |
| 24460 | 15316 | 26746 | 17602 | 29032 | 19888 | 31318 | 22174 |
| 24461 | 15317 | 26747 | 17603 | 29033 | 19889 | 31319 | 22175 |
| 24462 | 15318 | 26748 | 17604 | 29034 | 19890 | | 22176 |
| 24463 | 15319 | 26749 | 17605 | 29035 | 19891 | | 22177 |
| 24464 | 15320 | 26750 | 17606 | 29036 | 19892 | | 22178 |
| 24465 | 15321 | 26751 | 17607 | 29037 | 19893 | | 22179 |
| 24466 | 15322 | 26752 | 17608 | 29038 | 19894 | | 22180 |
| 24467 | 15323 | 26753 | 17609 | 29039 | 19895 | | 22181 |
| 24468 | 15324 | 26754 | 17610 | 29040 | 19896 | | 22182 |
| 24469 | 15325 | 26755 | 17611 | 29041 | 19897 | | 22183 |
| 24470 | 15326 | 26756 | 17612 | 29042 | 19898 | | 22184 |
| 24471 | 15327 | 26757 | 17613 | 29043 | 19899 | | 22185 |
| 24472 | 15328 | 26758 | 17614 | 29044 | 19900 | | 22186 |
| 24473 | 15329 | 26759 | 17615 | 29045 | 19901 | | 22187 |
| 24474 | 15330 | 26760 | 17616 | 29046 | 19902 | | 22188 |
| 24475 | 15331 | 26761 | 17617 | 29047 | 19903 | | 22189 |
| 24476 | 15332 | 26762 | 17618 | 29048 | 19904 | | 22190 |
| 24477 | 15333 | 26763 | 17619 | 29049 | 19905 | | 22191 |
| 24478 | 15334 | 26764 | 17620 | 29050 | 19906 | | 22192 |
| 24479 | 15335 | 26765 | 17621 | 29051 | 19907 | | 22193 |
| 24480 | 15336 | 26766 | 17622 | 29052 | 19908 | | 22194 |
| 24481 | 15337 | 26767 | 17623 | 29053 | 19909 | | 22195 |
| 24482 | 15338 | 26768 | 17624 | 29054 | 19910 | | 22196 |
| 24483 | 15339 | 26769 | 17625 | 29055 | 19911 | | 22197 |
| 24484 | 15340 | 26770 | 17626 | 29056 | 19912 | | 22198 |
| 24485 | 15341 | 26771 | 17627 | 29057 | 19913 | | 22199 |
| 24486 | 15342 | 26772 | 17628 | 29058 | 19914 | | 22200 |
| 24487 | 15343 | 26773 | 17629 | 29059 | 19915 | | 22201 |
| 24488 | 15344 | 26774 | 17630 | 29060 | 19916 | | 22202 |
| 24489 | 15345 | 26775 | 17631 | 29061 | 19917 | | 22203 |
| 24490 | 15346 | 26776 | 17632 | 29062 | 19918 | | 22204 |
| 24491 | 15347 | 26777 | 17633 | 29063 | 19919 | | 22205 |
| 24492 | 15348 | 26778 | 17634 | 29064 | 19920 | | 22206 |
| 24493 | 15349 | 26779 | 17635 | 29065 | 19921 | | 22207 |
| 24494 | 15350 | 26780 | 17636 | 29066 | 19922 | | 22208 |
| 24495 | 15351 | 26781 | 17637 | 29067 | 19923 | | 22209 |
| 24496 | 15352 | 26782 | 17638 | 29068 | 19924 | | 22210 |
| 24497 | 15353 | 26783 | 17639 | 29069 | 19925 | | 22211 |
| 24498 | 15354 | 26784 | 17640 | 29070 | 19926 | | 22212 |
| 24499 | 15355 | 26785 | 17641 | 29071 | 19927 | | 22213 |
| 24500 | 15356 | 26786 | 17642 | 29072 | 19928 | | 22214 |
| 24501 | 15357 | 26787 | 17643 | 29073 | 19929 | | 22215 |
| 24502 | 15358 | 26788 | 17644 | 29074 | 19930 | | 22216 |
| 24503 | 15359 | 26789 | 17645 | 29075 | 19931 | | 22217 |
| 24504 | 15360 | 26790 | 17646 | 29076 | 19932 | | 22218 |
| 24505 | 15361 | 26791 | 17647 | 29077 | 19933 | | 22219 |
| 24506 | 15362 | 26792 | 17648 | 29078 | 19934 | | 22220 |
| 24507 | 15363 | 26793 | 17649 | 29079 | 19935 | | 22221 |
| 24508 | 15364 | 26794 | 17650 | 29080 | 19936 | | 22222 |
| 24509 | 15365 | 26795 | 17651 | 29081 | 19937 | | 22223 |
| 24510 | 15366 | 26796 | 17652 | 29082 | 19938 | | 22224 |
| 24511 | 15367 | 26797 | 17653 | 29083 | 19939 | | 22225 |
| 24512 | 15368 | 26798 | 17654 | 29084 | 19940 | | 22226 |
| 24513 | 15369 | 26799 | 17655 | 29085 | 19941 | | 22227 |
| 24514 | 15370 | 26800 | 17656 | 29086 | 19942 | | 22228 |
| 24515 | 15371 | 26801 | 17657 | 29087 | 19943 | | 22229 |
| 24516 | 15372 | 26802 | 17658 | 29088 | 19944 | | 22230 |
| 24517 | 15373 | 26803 | 17659 | 29089 | 19945 | | 22231 |
| 24518 | 15374 | 26804 | 17660 | 29090 | 19946 | | 22232 |
| 24519 | 15375 | 26805 | 17661 | 29091 | 19947 | | 22233 |
| 24520 | 15376 | 26806 | 17662 | 29092 | 19948 | | 22234 |
| 24521 | 15377 | 26807 | 17663 | 29093 | 19949 | | 22235 |
| 24522 | 15378 | 26808 | 17664 | 29094 | 19950 | | 22236 |
| 24523 | 15379 | 26809 | 17665 | 29095 | 19951 | | 22237 |
| 24524 | 15380 | 26810 | 17666 | 29096 | 19952 | | 22238 |
| 24525 | 15381 | 26811 | 17667 | 29097 | 19953 | | 22239 |
| 24526 | 15382 | 26812 | 17668 | 29098 | 19954 | | 22240 |
| 24527 | 15383 | 26813 | 17669 | 29099 | 19955 | | 22241 |
| 24528 | 15384 | 26814 | 17670 | 29100 | 19956 | | 22242 |
| 24529 | 15385 | 26815 | 17671 | 29101 | 19957 | | 22243 |
| 24530 | 15386 | 26816 | 17672 | 29102 | 19958 | | 22244 |
| 24531 | 15387 | 26817 | 17673 | 29103 | 19959 | | 22245 |
| 24532 | 15388 | 26818 | 17674 | 29104 | 19960 | | 22246 |
| 24533 | 15389 | 26819 | 17675 | 29105 | 19961 | | 22247 |
| 24534 | 15390 | 26820 | 17676 | 29106 | 19962 | | 22248 |
| 24535 | 15391 | 26821 | 17677 | 29107 | 19963 | | 22249 |
| 24536 | 15392 | 26822 | 17678 | 29108 | 19964 | | 22250 |
| 24537 | 15393 | 26823 | 17679 | 29109 | 19965 | | 22251 |
| 24538 | 15394 | 26824 | 17680 | 29110 | 19966 | | 22252 |
| 24539 | 15395 | 26825 | 17681 | 29111 | 19967 | | 22253 |
| 24540 | 15396 | 26826 | 17682 | 29112 | 19968 | | 22254 |
| 24541 | 15397 | 26827 | 17683 | 29113 | 19969 | | 22255 |
| 24542 | 15398 | 26828 | 17684 | 29114 | 19970 | | 22256 |
| 24543 | 15399 | 26829 | 17685 | 29115 | 19971 | | 22257 |
| 24544 | 15400 | 26830 | 17686 | 29116 | 19972 | | 22258 |
| 24545 | 15401 | 26831 | 17687 | 29117 | 19973 | | 22259 |
| 24546 | 15402 | 26832 | 17688 | 29118 | 19974 | | 22260 |
| 24547 | 15403 | 26833 | 17689 | 29119 | 19975 | | 22261 |
| 24548 | 15404 | 26834 | 17690 | 29120 | 19976 | | 22262 |
| 24549 | 15405 | 26835 | 17691 | 29121 | 19977 | | 22263 |
| 24550 | 15406 | 26836 | 17692 | 29122 | 19978 | | 22264 |
| 24551 | 15407 | 26837 | 17693 | 29123 | 19979 | | 22265 |
| 24552 | 15408 | 26838 | 17694 | 29124 | 19980 | | 22266 |
| 24553 | 15409 | 26839 | 17695 | 29125 | 19981 | | 22267 |
| 24554 | 15410 | 26840 | 17696 | 29126 | 19982 | | 22268 |
| 24555 | 15411 | 26841 | 17697 | 29127 | 19983 | | 22269 |
| 24556 | 15412 | 26842 | 17698 | 29128 | 19984 | | 22270 |
| 24557 | 15413 | 26843 | 17699 | 29129 | 19985 | | 22271 |
| 24558 | 15414 | 26844 | 17700 | 29130 | 19986 | | 22272 |
| 24559 | 15415 | 26845 | 17701 | 29131 | 19987 | | 22273 |
| 24560 | 15416 | 26846 | 17702 | 29132 | 19988 | | 22274 |
| 24561 | 15417 | 26847 | 17703 | 29133 | 19989 | | 22275 |
| 24562 | 15418 | 26848 | 17704 | 29134 | 19990 | | 22276 |
| 24563 | 15419 | 26849 | 17705 | 29135 | 19991 | | 22277 |
| 24564 | 15420 | 26850 | 17706 | 29136 | 19992 | | 22278 |
| 24565 | 15421 | 26851 | 17707 | 29137 | 19993 | | 22279 |
| 24566 | 15422 | 26852 | 17708 | 29138 | 19994 | | 22280 |
| 24567 | 15423 | 26853 | 17709 | 29139 | 19995 | | 22281 |
| 24568 | 15424 | 26854 | 17710 | 29140 | 19996 | | 22282 |
| 24569 | 15425 | 26855 | 17711 | 29141 | 19997 | | 22283 |
| 24570 | 15426 | 26856 | 17712 | 29142 | 19998 | | 22284 |
| 24571 | 15427 | 26857 | 17713 | 29143 | 19999 | | 22285 |
| 24572 | 15428 | 26858 | 17714 | 29144 | 20000 | | 22286 |
| 24573 | 15429 | 26859 | 17715 | 29145 | 20001 | | 22287 |
| 24574 | 15430 | 26860 | 17716 | 29146 | 20002 | | 22288 |
| 24575 | 15431 | 26861 | 17717 | 29147 | 20003 | | 22289 |
| 24576 | 15432 | 26862 | 17718 | 29148 | 20004 | | 22290 |
| 24577 | 15433 | 26863 | 17719 | 29149 | 20005 | | 22291 |
| 24578 | 15434 | 26864 | 17720 | 29150 | 20006 | | 22292 |
| 24579 | 15435 | 26865 | 17721 | 29151 | 20007 | | 22293 |
| 24580 | 15436 | 26866 | 17722 | 29152 | 20008 | | 22294 |
| 24581 | 15437 | 26867 | 17723 | 29153 | 20009 | | 22295 |
| 24582 | 15438 | 26868 | 17724 | 29154 | 20010 | | 22296 |
| 24583 | 15439 | 26869 | 17725 | 29155 | 20011 | | 22297 |
| 24584 | 15440 | 26870 | 17726 | 29156 | 20012 | | 22298 |
| 24585 | 15441 | 26871 | 17727 | 29157 | 20013 | | 22299 |
| 24586 | 15442 | 26872 | 17728 | 29158 | 20014 | | 22300 |
| 24587 | 15443 | 26873 | 17729 | 29159 | 20015 | | 22301 |
| 24588 | 15444 | 26874 | 17730 | 29160 | 20016 | | 22302 |
| 24589 | 15445 | 26875 | 17731 | 29161 | 20017 | | 22303 |
| 24590 | 15446 | 26876 | 17732 | 29162 | 20018 | | 22304 |
| 24591 | 15447 | 26877 | 17733 | 29163 | 20019 | | 22305 |
| 24592 | 15448 | 26878 | 17734 | 29164 | 20020 | | 22306 |
| 24593 | 15449 | 26879 | 17735 | 29165 | 20021 | | 22307 |
| 24594 | 15450 | 26880 | 17736 | 29166 | 20022 | | 22308 |
| 24595 | 15451 | 26881 | 17737 | 29167 | 20023 | | 22309 |
| 24596 | 15452 | 26882 | 17738 | 29168 | 20024 | | 22310 |
| 24597 | 15453 | 26883 | 17739 | 29169 | 20025 | | 22311 |
| 24598 | 15454 | 26884 | 17740 | 29170 | 20026 | | 22312 |
| 24599 | 15455 | 26885 | 17741 | 29171 | 20027 | | 22313 |
| 24600 | 15456 | 26886 | 17742 | 29172 | 20028 | | 22314 |
| 24601 | 15457 | 26887 | 17743 | 29173 | 20029 | | 22315 |
| 24602 | 15458 | 26888 | 17744 | 29174 | 20030 | | 22316 |
| 24603 | 15459 | 26889 | 17745 | 29175 | 20031 | | 22317 |
| 24604 | 15460 | 26890 | 17746 | 29176 | 20032 | | 22318 |
| 24605 | 15461 | 26891 | 17747 | 29177 | 20033 | | 22319 |
| 24606 | 15462 | 26892 | 17748 | 29178 | 20034 | | 22320 |
| 24607 | 15463 | 26893 | 17749 | 29179 | 20035 | | 22321 |
| 24608 | 15464 | 26894 | 17750 | 29180 | 20036 | | 22322 |
| 24609 | 15465 | 26895 | 17751 | 29181 | 20037 | | 22323 |
| 24610 | 15466 | 26896 | 17752 | 29182 | 20038 | | 22324 |
| 24611 | 15467 | 26897 | 17753 | 29183 | 20039 | | 22325 |
| 24612 | 15468 | 26898 | 17754 | 29184 | 20040 | | 22326 |
| 24613 | 15469 | 26899 | 17755 | 29185 | 20041 | | 22327 |
| 24614 | 15470 | 26900 | 17756 | 29186 | 20042 | | 22328 |
| 24615 | 15471 | 26901 | 17757 | 29187 | 20043 | | 22329 |
| 24616 | 15472 | 26902 | 17758 | 29188 | 20044 | | 22330 |
| 24617 | 15473 | 26903 | 17759 | 29189 | 20045 | | 22331 |
| 24618 | 15474 | 26904 | 17760 | 29190 | 20046 | | 22332 |
| 24619 | 15475 | 26905 | 17761 | 29191 | 20047 | | 22333 |
| 24620 | 15476 | 26906 | 17762 | 29192 | 20048 | | 22334 |
| 24621 | 15477 | 26907 | 17763 | 29193 | 20049 | | 22335 |
| 24622 | 15478 | 26908 | 17764 | 29194 | 20050 | | 22336 |
| 24623 | 15479 | 26909 | 17765 | 29195 | 20051 | | 22337 |
| 24624 | 15480 | 26910 | 17766 | 29196 | 20052 | | 22338 |
| 24625 | 15481 | 26911 | 17767 | 29197 | 20053 | | 22339 |
| 24626 | 15482 | 26912 | 17768 | 29198 | 20054 | | 22340 |
| 24627 | 15483 | 26913 | 17769 | 29199 | 20055 | | 22341 |
| 24628 | 15484 | 26914 | 17770 | 29200 | 20056 | | 22342 |
| 24629 | 15485 | 26915 | 17771 | 29201 | 20057 | | 22343 |
| 24630 | 15486 | 26916 | 17772 | 29202 | 20058 | | 22344 |
| 24631 | 15487 | 26917 | 17773 | 29203 | 20059 | | 22345 |
| 24632 | 15488 | 26918 | 17774 | 29204 | 20060 | | 22346 |
| 24633 | 15489 | 26919 | 17775 | 29205 | 20061 | | 22347 |
| 24634 | 15490 | 26920 | 17776 | 29206 | 20062 | | 22348 |
| 24635 | 15491 | 26921 | 17777 | 29207 | 20063 | | 22349 |
| 24636 | 15492 | 26922 | 17778 | 29208 | 20064 | | 22350 |
| 24637 | 15493 | 26923 | 17779 | 29209 | 20065 | | 22351 |
| 24638 | 15494 | 26924 | 17780 | 29210 | 20066 | | 22352 |
| 24639 | 15495 | 26925 | 17781 | 29211 | 20067 | | 22353 |
| 24640 | 15496 | 26926 | 17782 | 29212 | 20068 | | 22354 |
| 24641 | 15497 | 26927 | 17783 | 29213 | 20069 | | 22355 |
| 24642 | 15498 | 26928 | 17784 | 29214 | 20070 | | 22356 |
| 24643 | 15499 | 26929 | 17785 | 29215 | 20071 | | 22357 |
| 24644 | 15500 | 26930 | 17786 | 29216 | 20072 | | 22358 |
| 24645 | 15501 | 26931 | 17787 | 29217 | 20073 | | 22359 |
| 24646 | 15502 | 26932 | 17788 | 29218 | 20074 | | 22360 |
| 24647 | 15503 | 26933 | 17789 | 29219 | 20075 | | 22361 |
| 24648 | 15504 | 26934 | 17790 | 29220 | 20076 | | 22362 |
| 24649 | 15505 | 26935 | 17791 | 29221 | 20077 | | 22363 |
| 24650 | 15506 | 26936 | 17792 | 29222 | 20078 | | 22364 |
| 24651 | 15507 | 26937 | 17793 | 29223 | 20079 | | 22365 |
| 24652 | 15508 | 26938 | 17794 | 29224 | 20080 | | 22366 |
| 24653 | 15509 | 26939 | 17795 | 29225 | 20081 | | 22367 |
| 24654 | 15510 | 26940 | 17796 | 29226 | 20082 | | 22368 |
| 24655 | 15511 | 26941 | 17797 | 29227 | 20083 | | 22369 |
| 24656 | 15512 | 26942 | 17798 | 29228 | 20084 | | 22370 |
| 24657 | 15513 | 26943 | 17799 | 29229 | 20085 | | 22371 |
| 24658 | 15514 | 26944 | 17800 | 29230 | 20086 | | 22372 |
| 24659 | 15515 | 26945 | 17801 | 29231 | 20087 | | 22373 |
| 24660 | 15516 | 26946 | 17802 | 29232 | 20088 | | 22374 |
| 24661 | 15517 | 26947 | 17803 | 29233 | 20089 | | 22375 |
| 24662 | 15518 | 26948 | 17804 | 29234 | 20090 | | 22376 |
| 24663 | 15519 | 26949 | 17805 | 29235 | 20091 | | 22377 |
| 24664 | 15520 | 26950 | 17806 | 29236 | 20092 | | 22378 |
| 24665 | 15521 | 26951 | 17807 | 29237 | 20093 | | 22379 |
| 24666 | 15522 | 26952 | 17808 | 29238 | 20094 | | 22380 |
| 24667 | 15523 | 26953 | 17809 | 29239 | 20095 | | 22381 |
| 24668 | 15524 | 26954 | 17810 | 29240 | 20096 | | 22382 |
| 24669 | 15525 | 26955 | 17811 | 29241 | 20097 | | 22383 |
| 24670 | 15526 | 26956 | 17812 | 29242 | 20098 | | 22384 |
| 24671 | 15527 | 26957 | 17813 | 29243 | 20099 | | 22385 |
| 24672 | 15528 | 26958 | 17814 | 29244 | 20100 | | 22386 |
| 24673 | 15529 | 26959 | 17815 | 29245 | 20101 | | 22387 |
| 24674 | 15530 | 26960 | 17816 | 29246 | 20102 | | 22388 |
| 24675 | 15531 | 26961 | 17817 | 29247 | 20103 | | 22389 |
| 24676 | 15532 | 26962 | 17818 | 29248 | 20104 | | 22390 |
| 24677 | 15533 | 26963 | 17819 | 29249 | 20105 | | 22391 |
| 24678 | 15534 | 26964 | 17820 | 29250 | 20106 | | 22392 |
| 24679 | 15535 | 26965 | 17821 | 29251 | 20107 | | 22393 |
| 24680 | 15536 | 26966 | 17822 | 29252 | 20108 | | 22394 |
| 24681 | 15537 | 26967 | 17823 | 29253 | 20109 | | 22395 |
| 24682 | 15538 | 26968 | 17824 | 29254 | 20110 | | 22396 |
| 24683 | 15539 | 26969 | 17825 | 29255 | 20111 | | 22397 |
| 24684 | 15540 | 26970 | 17826 | 29256 | 20112 | | 22398 |
| 24685 | 15541 | 26971 | 17827 | 29257 | 20113 | | 22399 |
| 24686 | 15542 | 26972 | 17828 | 29258 | 20114 | | 22400 |
| 24687 | 15543 | 26973 | 17829 | 29259 | 20115 | | 22401 |
| 24688 | 15544 | 26974 | 17830 | 29260 | 20116 | | 22402 |
| 24689 | 15545 | 26975 | 17831 | 29261 | 20117 | | 22403 |
| 24690 | 15546 | 26976 | 17832 | 29262 | 20118 | | 22404 |
| 24691 | 15547 | 26977 | 17833 | 29263 | 20119 | | 22405 |
| 24692 | 15548 | 26978 | 17834 | 29264 | 20120 | | 22406 |
| 24693 | 15549 | 26979 | 17835 | 29265 | 20121 | | 22407 |
| 24694 | 15550 | 26980 | 17836 | 29266 | 20122 | | 22408 |
| 24695 | 15551 | 26981 | 17837 | 29267 | 20123 | | 22409 |
| 24696 | 15552 | 26982 | 17838 | 29268 | 20124 | | 22410 |
| 24697 | 15553 | 26983 | 17839 | 29269 | 20125 | | 22411 |
| 24698 | 15554 | 26984 | 17840 | 29270 | 20126 | | 22412 |
| 24699 | 15555 | 26985 | 17841 | 29271 | 20127 | | 22413 |
| 24700 | 15556 | 26986 | 17842 | 29272 | 20128 | | 22414 |
| 24701 | 15557 | 26987 | 17843 | 29273 | 20129 | | 22415 |
| 24702 | 15558 | 26988 | 17844 | 29274 | 20130 | | 22416 |
| 24703 | 15559 | 26989 | 17845 | 29275 | 20131 | | 22417 |
| 24704 | 15560 | 26990 | 17846 | 29276 | 20132 | | 22418 |
| 24705 | 15561 | 26991 | 17847 | 29277 | 20133 | | 22419 |
| 24706 | 15562 | 26992 | 17848 | 29278 | 20134 | | 22420 |
| 24707 | 15563 | 26993 | 17849 | 29279 | 20135 | | 22421 |
| 24708 | 15564 | 26994 | 17850 | 29280 | 20136 | | 22422 |
| 24709 | 15565 | 26995 | 17851 | 29281 | 20137 | | 22423 |
| 24710 | 15566 | 26996 | 17852 | 29282 | 20138 | | 22424 |
| 24711 | 15567 | 26997 | 17853 | 29283 | 20139 | | 22425 |
| 24712 | 15568 | 26998 | 17854 | 29284 | 20140 | | 22426 |
| 24713 | 15569 | 26999 | 17855 | 29285 | 20141 | | 22427 |
| 24714 | 15570 | 27000 | 17856 | 29286 | 20142 | | 22428 |
| 24715 | 15571 | 27001 | 17857 | 29287 | 20143 | | 22429 |
| 24716 | 15572 | 27002 | 17858 | 29288 | 20144 | | 22430 |
| 24717 | 15573 | 27003 | 17859 | 29289 | 20145 | | 22431 |
| 24718 | 15574 | 27004 | 17860 | 29290 | 20146 | | 22432 |
| 24719 | 15575 | 27005 | 17861 | 29291 | 20147 | | 22433 |
| 24720 | 15576 | 27006 | 17862 | 29292 | 20148 | | 22434 |
| 24721 | 15577 | 27007 | 17863 | 29293 | 20149 | | 22435 |
| 24722 | 15578 | 27008 | 17864 | 29294 | 20150 | | 22436 |
| 24723 | 15579 | 27009 | 17865 | 29295 | 20151 | | 22437 |
| 24724 | 15580 | 27010 | 17866 | 29296 | 20152 | | 22438 |
| 24725 | 15581 | 27011 | 17867 | 29297 | 20153 | | 22439 |
| 24726 | 15582 | 27012 | 17868 | 29298 | 20154 | | 22440 |
| 24727 | 15583 | 27013 | 17869 | 29299 | 20155 | | 22441 |
| 24728 | 15584 | 27014 | 17870 | 29300 | 20156 | | 22442 |
| 24729 | 15585 | 27015 | 17871 | 29301 | 20157 | | 22443 |
| 24730 | 15586 | 27016 | 17872 | 29302 | 20158 | | 22444 |
| 24731 | 15587 | 27017 | 17873 | 29303 | 20159 | | 22445 |
| 24732 | 15588 | 27018 | 17874 | 29304 | 20160 | | 22446 |
| 24733 | 15589 | 27019 | 17875 | 29305 | 20161 | | 22447 |
| 24734 | 15590 | 27020 | 17876 | 29306 | 20162 | | 22448 |
| 24735 | 15591 | 27021 | 17877 | 29307 | 20163 | | 22449 |
| 24736 | 15592 | 27022 | 17878 | 29308 | 20164 | | 22450 |
| 24737 | 15593 | 27023 | 17879 | 29309 | 20165 | | 22451 |
| 24738 | 15594 | 27024 | 17880 | 29310 | 20166 | | 22452 |
| 24739 | 15595 | 27025 | 17881 | 29311 | 20167 | | 22453 |
| 24740 | 15596 | 27026 | 17882 | 29312 | 20168 | | 22454 |
| 24741 | 15597 | 27027 | 17883 | 29313 | 20169 | | 22455 |
| 24742 | 15598 | 27028 | 17884 | 29314 | 20170 | | 22456 |
| 24743 | 15599 | 27029 | 17885 | 29315 | 20171 | | 22457 |
| 24744 | 15600 | 27030 | 17886 | 29316 | 20172 | | 22458 |
| 24745 | 15601 | 27031 | 17887 | 29317 | 20173 | | 22459 |
| 24746 | 15602 | 27032 | 17888 | 29318 | 20174 | | 22460 |
| 24747 | 15603 | 27033 | 17889 | 29319 | 20175 | | 22461 |
| 24748 | 15604 | 27034 | 17890 | 29320 | 20176 | | 22462 |
| 24749 | 15605 | 27035 | 17891 | 29321 | 20177 | | 22463 |
| 24750 | 15606 | 27036 | 17892 | 29322 | 20178 | | 22464 |
| 24751 | 15607 | 27037 | 17893 | 29323 | 20179 | | 22465 |
| 24752 | 15608 | 27038 | 17894 | 29324 | 20180 | | 22466 |
| 24753 | 15609 | 27039 | 17895 | 29325 | 20181 | | 22467 |
| 24754 | 15610 | 27040 | 17896 | 29326 | 20182 | | 22468 |
| 24755 | 15611 | 27041 | 17897 | 29327 | 20183 | | 22469 |
| 24756 | 15612 | 27042 | 17898 | 29328 | 20184 | | 22470 |
| 24757 | 15613 | 27043 | 17899 | 29329 | 20185 | | 22471 |
| 24758 | 15614 | 27044 | 17900 | 29330 | 20186 | | 22472 |
| 24759 | 15615 | 27045 | 17901 | 29331 | 20187 | | 22473 |
| 24760 | 15616 | 27046 | 17902 | 29332 | 20188 | | 22474 |
| 24761 | 15617 | 27047 | 17903 | 29333 | 20189 | | 22475 |
| 24762 | 15618 | 27048 | 17904 | 29334 | 20190 | | 22476 |
| 24763 | 15619 | 27049 | 17905 | 29335 | 20191 | | 22477 |
| 24764 | 15620 | 27050 | 17906 | 29336 | 20192 | | 22478 |
| 24765 | 15621 | 27051 | 17907 | 29337 | 20193 | | 22479 |
| 24766 | 15622 | 27052 | 17908 | 29338 | 20194 | | 22480 |
| 24767 | 15623 | 27053 | 17909 | 29339 | 20195 | | 22481 |
| 24768 | 15624 | 27054 | 17910 | 29340 | 20196 | | 22482 |
| 24769 | 15625 | 27055 | 17911 | 29341 | 20197 | | 22483 |
| 24770 | 15626 | 27056 | 17912 | 29342 | 20198 | | 22484 |
| 24771 | 15627 | 27057 | 17913 | 29343 | 20199 | | 22485 |
| 24772 | 15628 | 27058 | 17914 | 29344 | 20200 | | 22486 |
| 24773 | 15629 | 27059 | 17915 | 29345 | 20201 | | 22487 |
| 24774 | 15630 | 27060 | 17916 | 29346 | 20202 | | 22488 |
| 24775 | 15631 | 27061 | 17917 | 29347 | 20203 | | 22489 |
| 24776 | 15632 | 27062 | 17918 | 29348 | 20204 | | 22490 |
| 24777 | 15633 | 27063 | 17919 | 29349 | 20205 | | 22491 |
| 24778 | 15634 | 27064 | 17920 | 29350 | 20206 | | 22492 |
| 24779 | 15635 | 27065 | 17921 | 29351 | 20207 | | 22493 |
| 24780 | 15636 | 27066 | 17922 | 29352 | 20208 | | 22494 |
| 24781 | 15637 | 27067 | 17923 | 29353 | 20209 | | 22495 |
| 24782 | 15638 | 27068 | 17924 | 29354 | 20210 | | 22496 |
| 24783 | 15639 | 27069 | 17925 | 29355 | 20211 | | 22497 |
| 24784 | 15640 | 27070 | 17926 | 29356 | 20212 | | 22498 |
| 24785 | 15641 | 27071 | 17927 | 29357 | 20213 | | 22499 |
| 24786 | 15642 | 27072 | 17928 | 29358 | 20214 | | 22500 |
| 24787 | 15643 | 27073 | 17929 | 29359 | 20215 | | 22501 |
| 24788 | 15644 | 27074 | 17930 | 29360 | 20216 | | 22502 |
| 24789 | 15645 | 27075 | 17931 | 29361 | 20217 | | 22503 |
| 24790 | 15646 | 27076 | 17932 | 29362 | 20218 | | 22504 |
| 24791 | 15647 | 27077 | 17933 | 29363 | 20219 | | 22505 |
| 24792 | 15648 | 27078 | 17934 | 29364 | 20220 | | 22506 |
| 24793 | 15649 | 27079 | 17935 | 29365 | 20221 | | 22507 |
| 24794 | 15650 | 27080 | 17936 | 29366 | 20222 | | 22508 |
| 24795 | 15651 | 27081 | 17937 | 29367 | 20223 | | 22509 |
| 24796 | 15652 | 27082 | 17938 | 29368 | 20224 | | 22510 |
| 24797 | 15653 | 27083 | 17939 | 29369 | 20225 | | 22511 |
| 24798 | 15654 | 27084 | 17940 | 29370 | 20226 | | 22512 |
| 24799 | 15655 | 27085 | 17941 | 29371 | 20227 | | 22513 |
| 24800 | 15656 | 27086 | 17942 | 29372 | 20228 | | 22514 |
| 24801 | 15657 | 27087 | 17943 | 29373 | 20229 | | 22515 |
| 24802 | 15658 | 27088 | 17944 | 29374 | 20230 | | 22516 |
| 24803 | 15659 | 27089 | 17945 | 29375 | 20231 | | 22517 |
| 24804 | 15660 | 27090 | 17946 | 29376 | 20232 | | 22518 |
| 24805 | 15661 | 27091 | 17947 | 29377 | 20233 | | 22519 |
| 24806 | 15662 | 27092 | 17948 | 29378 | 20234 | | 22520 |
| 24807 | 15663 | 27093 | 17949 | 29379 | 20235 | | 22521 |
| 24808 | 15664 | 27094 | 17950 | 29380 | 20236 | | 22522 |
| 24809 | 15665 | 27095 | 17951 | 29381 | 20237 | | 22523 |
| 24810 | 15666 | 27096 | 17952 | 29382 | 20238 | | 22524 |
| 24811 | 15667 | 27097 | 17953 | 29383 | 20239 | | 22525 |
| 24812 | 15668 | 27098 | 17954 | 29384 | 20240 | | 22526 |
| 24813 | 15669 | 27099 | 17955 | 29385 | 20241 | | 22527 |
| 24814 | 15670 | 27100 | 17956 | 29386 | 20242 | | 22528 |
| 24815 | 15671 | 27101 | 17957 | 29387 | 20243 | | 22529 |
| 24816 | 15672 | 27102 | 17958 | 29388 | 20244 | | 22530 |
| 24817 | 15673 | 27103 | 17959 | 29389 | 20245 | | 22531 |
| 24818 | 15674 | 27104 | 17960 | 29390 | 20246 | | 22532 |
| 24819 | 15675 | 27105 | 17961 | 29391 | 20247 | | 22533 |
| 24820 | 15676 | 27106 | 17962 | 29392 | 20248 | | 22534 |
| 24821 | 15677 | 27107 | 17963 | 29393 | 20249 | | 22535 |
| 24822 | 15678 | 27108 | 17964 | 29394 | 20250 | | 22536 |
| 24823 | 15679 | 27109 | 17965 | 29395 | 20251 | | 22537 |
| 24824 | 15680 | 27110 | 17966 | 29396 | 20252 | | 22538 |
| 24825 | 15681 | 27111 | 17967 | 29397 | 20253 | | 22539 |
| 24826 | 15682 | 27112 | 17968 | 29398 | 20254 | | 22540 |
| 24827 | 15683 | 27113 | 17969 | 29399 | 20255 | | 22541 |
| 24828 | 15684 | 27114 | 17970 | 29400 | 20256 | | 22542 |
| 24829 | 15685 | 27115 | 17971 | 29401 | 20257 | | 22543 |
| 24830 | 15686 | 27116 | 17972 | 29402 | 20258 | | 22544 |
| 24831 | 15687 | 27117 | 17973 | 29403 | 20259 | | 22545 |
| 24832 | 15688 | 27118 | 17974 | 29404 | 20260 | | 22546 |
| 24833 | 15689 | 27119 | 17975 | 29405 | 20261 | | 22547 |
| 24834 | 15690 | 27120 | 17976 | 29406 | 20262 | | 22548 |
| 24835 | 15691 | 27121 | 17977 | 29407 | 20263 | | 22549 |
| 24836 | 15692 | 27122 | 17978 | 29408 | 20264 | | 22550 |
| 24837 | 15693 | 27123 | 17979 | 29409 | 20265 | | 22551 |
| 24838 | 15694 | 27124 | 17980 | 29410 | 20266 | | 22552 |
| 24839 | 15695 | 27125 | 17981 | 29411 | 20267 | | 22553 |
| 24840 | 15696 | 27126 | 17982 | 29412 | 20268 | | 22554 |
| 24841 | 15697 | 27127 | 17983 | 29413 | 20269 | | 22555 |
| 24842 | 15698 | 27128 | 17984 | 29414 | 20270 | | 22556 |
| 24843 | 15699 | 27129 | 17985 | 29415 | 20271 | | 22557 |
| 24844 | 15700 | 27130 | 17986 | 29416 | 20272 | | 22558 |
| 24845 | 15701 | 27131 | 17987 | 29417 | 20273 | | 22559 |
| 24846 | 15702 | 27132 | 17988 | 29418 | 20274 | | 22560 |
| 24847 | 15703 | 27133 | 17989 | 29419 | 20275 | | 22561 |
| 24848 | 15704 | 27134 | 17990 | 29420 | 20276 | | 22562 |
| 24849 | 15705 | 27135 | 17991 | 29421 | 20277 | | 22563 |
| 24850 | 15706 | 27136 | 17992 | 29422 | 20278 | | 22564 |
| 24851 | 15707 | 27137 | 17993 | 29423 | 20279 | | 22565 |
| 24852 | 15708 | 27138 | 17994 | 29424 | 20280 | | 22566 |
| 24853 | 15709 | 27139 | 17995 | 29425 | 20281 | | 22567 |
| 24854 | 15710 | 27140 | 17996 | 29426 | 20282 | | 22568 |
| 24855 | 15711 | 27141 | 17997 | 29427 | 20283 | | 22569 |
| 24856 | 15712 | 27142 | 17998 | 29428 | 20284 | | 22570 |
| 24857 | 15713 | 27143 | 17999 | 29429 | 20285 | | 22571 |
| 24858 | 15714 | 27144 | 18000 | 29430 | 20286 | | 22572 |
| 24859 | 15715 | 27145 | 18001 | 29431 | 20287 | | 22573 |
| 24860 | 15716 | 27146 | 18002 | 29432 | 20288 | | 22574 |
| 24861 | 15717 | 27147 | 18003 | 29433 | 20289 | | 22575 |
| 24862 | 15718 | 27148 | 18004 | 29434 | 20290 | | 22576 |
| 24863 | 15719 | 27149 | 18005 | 29435 | 20291 | | 22577 |
| 24864 | 15720 | 27150 | 18006 | 29436 | 20292 | | 22578 |
| 24865 | 15721 | 27151 | 18007 | 29437 | 20293 | | 22579 |
| 24866 | 15722 | 27152 | 18008 | 29438 | 20294 | | 22580 |
| 24867 | 15723 | 27153 | 18009 | 29439 | 20295 | | 22581 |
| 24868 | 15724 | 27154 | 18010 | 29440 | 20296 | | 22582 |
| 24869 | 15725 | 27155 | 18011 | 29441 | 20297 | | 22583 |
| 24870 | 15726 | 27156 | 18012 | 29442 | 20298 | | 22584 |
| 24871 | 15727 | 27157 | 18013 | 29443 | 20299 | | 22585 |
| 24872 | 15728 | 27158 | 18014 | 29444 | 20300 | | 22586 |
| 24873 | 15729 | 27159 | 18015 | 29445 | 20301 | | 22587 |
| 24874 | 15730 | 27160 | 18016 | 29446 | 20302 | | 22588 |
| 24875 | 15731 | 27161 | 18017 | 29447 | 20303 | | 22589 |
| 24876 | 15732 | 27162 | 18018 | 29448 | 20304 | | 22590 |
| 24877 | 15733 | 27163 | 18019 | 29449 | 20305 | | 22591 |
| 24878 | 15734 | 27164 | 18020 | 29450 | 20306 | | 22592 |
| 24879 | 15735 | 27165 | 18021 | 29451 | 20307 | | 22593 |
| 24880 | 15736 | 27166 | 18022 | 29452 | 20308 | | 22594 |
| 24881 | 15737 | 27167 | 18023 | 29453 | 20309 | | 22595 |
| 24882 | 15738 | 27168 | 18024 | 29454 | 20310 | | 22596 |
| 24883 | 15739 | 27169 | 18025 | 29455 | 20311 | | 22597 |
| 24884 | 15740 | 27170 | 18026 | 29456 | 20312 | | 22598 |
| 24885 | 15741 | 27171 | 18027 | 29457 | 20313 | | 22599 |
| 24886 | 15742 | 27172 | 18028 | 29458 | 20314 | | 22600 |
| 24887 | 15743 | 27173 | 18029 | 29459 | 20315 | | 22601 |
| 24888 | 15744 | 27174 | 18030 | 29460 | 20316 | | 22602 |
| 24889 | 15745 | 27175 | 18031 | 29461 | 20317 | | 22603 |
| 24890 | 15746 | 27176 | 18032 | 29462 | 20318 | | 22604 |
| 24891 | 15747 | 27177 | 18033 | 29463 | 20319 | | 22605 |
| 24892 | 15748 | 27178 | 18034 | 29464 | 20320 | | 22606 |
| 24893 | 15749 | 27179 | 18035 | 29465 | 20321 | | 22607 |
| 24894 | 15750 | 27180 | 18036 | 29466 | 20322 | | 22608 |
| 24895 | 15751 | 27181 | 18037 | 29467 | 20323 | | 22609 |
| 24896 | 15752 | 27182 | 18038 | 29468 | 20324 | | 22610 |
| 24897 | 15753 | 27183 | 18039 | 29469 | 20325 | | 22611 |
| 24898 | 15754 | 27184 | 18040 | 29470 | 20326 | | 22612 |
| 24899 | 15755 | 27185 | 18041 | 29471 | 20327 | | 22613 |
| 24900 | 15756 | 27186 | 18042 | 29472 | 20328 | | 22614 |
| 24901 | 15757 | 27187 | 18043 | 29473 | 20329 | | 22615 |
| 24902 | 15758 | 27188 | 18044 | 29474 | 20330 | | 22616 |
| 24903 | 15759 | 27189 | 18045 | 29475 | 20331 | | 22617 |
| 24904 | 15760 | 27190 | 18046 | 29476 | 20332 | | 22618 |
| 24905 | 15761 | 27191 | 18047 | 29477 | 20333 | | 22619 |
| 24906 | 15762 | 27192 | 18048 | 29478 | 20334 | | 22620 |
| 24907 | 15763 | 27193 | 18049 | 29479 | 20335 | | 22621 |
| 24908 | 15764 | 27194 | 18050 | 29480 | 20336 | | 22622 |
| 24909 | 15765 | 27195 | 18051 | 29481 | 20337 | | 22623 |
| 24910 | 15766 | 27196 | 18052 | 29482 | 20338 | | 22624 |
| 24911 | 15767 | 27197 | 18053 | 29483 | 20339 | | 22625 |
| 24912 | 15768 | 27198 | 18054 | 29484 | 20340 | | 22626 |
| 24913 | 15769 | 27199 | 18055 | 29485 | 20341 | | 22627 |
| 24914 | 15770 | 27200 | 18056 | 29486 | 20342 | | 22628 |
| 24915 | 15771 | 27201 | 18057 | 29487 | 20343 | | 22629 |
| 24916 | 15772 | 27202 | 18058 | 29488 | 20344 | | 22630 |
| 24917 | 15773 | 27203 | 18059 | 29489 | 20345 | | 22631 |
| 24918 | 15774 | 27204 | 18060 | 29490 | 20346 | | 22632 |
| 24919 | 15775 | 27205 | 18061 | 29491 | 20347 | | 22633 |
| 24920 | 15776 | 27206 | 18062 | 29492 | 20348 | | 22634 |
| 24921 | 15777 | 27207 | 18063 | 29493 | 20349 | | 22635 |
| 24922 | 15778 | 27208 | 18064 | 29494 | 20350 | | 22636 |
| 24923 | 15779 | 27209 | 18065 | 29495 | 20351 | | 22637 |
| 24924 | 15780 | 27210 | 18066 | 29496 | 20352 | | 22638 |
| 24925 | 15781 | 27211 | 18067 | 29497 | 20353 | | 22639 |
| 24926 | 15782 | 27212 | 18068 | 29498 | 20354 | | 22640 |
| 24927 | 15783 | 27213 | 18069 | 29499 | 20355 | | 22641 |
| 24928 | 15784 | 27214 | 18070 | 29500 | 20356 | | 22642 |
| 24929 | 15785 | 27215 | 18071 | 29501 | 20357 | | 22643 |
| 24930 | 15786 | 27216 | 18072 | 29502 | 20358 | | 22644 |
| 24931 | 15787 | 27217 | 18073 | 29503 | 20359 | | 22645 |
| 24932 | 15788 | 27218 | 18074 | 29504 | 20360 | | 22646 |
| 24933 | 15789 | 27219 | 18075 | 29505 | 20361 | | 22647 |
| 24934 | 15790 | 27220 | 18076 | 29506 | 20362 | | 22648 |
| 24935 | 15791 | 27221 | 18077 | 29507 | 20363 | | 22649 |
| 24936 | 15792 | 27222 | 18078 | 29508 | 20364 | | 22650 |
| 24937 | 15793 | 27223 | 18079 | 29509 | 20365 | | 22651 |
| 24938 | 15794 | 27224 | 18080 | 29510 | 20366 | | 22652 |
| 24939 | 15795 | 27225 | 18081 | 29511 | 20367 | | 22653 |
| 24940 | 15796 | 27226 | 18082 | 29512 | 20368 | | 22654 |
| 24941 | 15797 | 27227 | 18083 | 29513 | 20369 | | 22655 |
| 24942 | 15798 | 27228 | 18084 | 29514 | 20370 | | 22656 |
| 24943 | 15799 | 27229 | 18085 | 29515 | 20371 | | 22657 |
| 24944 | 15800 | 27230 | 18086 | 29516 | 20372 | | 22658 |
| 24945 | 15801 | 27231 | 18087 | 29517 | 20373 | | 22659 |
| 24946 | 15802 | 27232 | 18088 | 29518 | 20374 | | 22660 |
| 24947 | 15803 | 27233 | 18089 | 29519 | 20375 | | 22661 |
| 24948 | 15804 | 27234 | 18090 | 29520 | 20376 | | 22662 |
| 24949 | 15805 | 27235 | 18091 | 29521 | 20377 | | 22663 |
| 24950 | 15806 | 27236 | 18092 | 29522 | 20378 | | 22664 |
| 24951 | 15807 | 27237 | 18093 | 29523 | 20379 | | 22665 |
| 24952 | 15808 | 27238 | 18094 | 29524 | 20380 | | 22666 |
| 24953 | 15809 | 27239 | 18095 | 29525 | 20381 | | 22667 |
| 24954 | 15810 | 27240 | 18096 | 29526 | 20382 | | 22668 |
| 24955 | 15811 | 27241 | 18097 | 29527 | 20383 | | 22669 |
| 24956 | 15812 | 27242 | 18098 | 29528 | 20384 | | 22670 |
| 24957 | 15813 | 27243 | 18099 | 29529 | 20385 | | 22671 |
| 24958 | 15814 | 27244 | 18100 | 29530 | 20386 | | 22672 |
| 24959 | 15815 | 27245 | 18101 | 29531 | 20387 | | 22673 |
| 24960 | 15816 | 27246 | 18102 | 29532 | 20388 | | 22674 |
| 24961 | 15817 | 27247 | 18103 | 29533 | 20389 | | 22675 |
| 24962 | 15818 | 27248 | 18104 | 29534 | 20390 | | 22676 |
| 24963 | 15819 | 27249 | 18105 | 29535 | 20391 | | 22677 |
| 24964 | 15820 | 27250 | 18106 | 29536 | 20392 | | 22678 |
| 24965 | 15821 | 27251 | 18107 | 29537 | 20393 | | 22679 |
| 24966 | 15822 | 27252 | 18108 | 29538 | 20394 | | 22680 |
| 24967 | 15823 | 27253 | 18109 | 29539 | 20395 | | 22681 |
| 24968 | 15824 | 27254 | 18110 | 29540 | 20396 | | 22682 |
| 24969 | 15825 | 27255 | 18111 | 29541 | 20397 | | 22683 |
| 24970 | 15826 | 27256 | 18112 | 29542 | 20398 | | 22684 |
| 24971 | 15827 | 27257 | 18113 | 29543 | 20399 | | 22685 |
| 24972 | 15828 | 27258 | 18114 | 29544 | 20400 | | 22686 |
| 24973 | 15829 | 27259 | 18115 | 29545 | 20401 | | 22687 |
| 24974 | 15830 | 27260 | 18116 | 29546 | 20402 | | 22688 |
| 24975 | 15831 | 27261 | 18117 | 29547 | 20403 | | 22689 |
| 24976 | 15832 | 27262 | 18118 | 29548 | 20404 | | 22690 |
| 24977 | 15833 | 27263 | 18119 | 29549 | 20405 | | 22691 |
| 24978 | 15834 | 27264 | 18120 | 29550 | 20406 | | 22692 |
| 24979 | 15835 | 27265 | 18121 | 29551 | 20407 | | 22693 |
| 24980 | 15836 | 27266 | 18122 | 29552 | 20408 | | 22694 |
| 24981 | 15837 | 27267 | 18123 | 29553 | 20409 | | 22695 |
| 24982 | 15838 | 27268 | 18124 | 29554 | 20410 | | 22696 |
| 24983 | 15839 | 27269 | 18125 | 29555 | 20411 | | 22697 |
| 24984 | 15840 | 27270 | 18126 | 29556 | 20412 | | 22698 |
| 24985 | 15841 | 27271 | 18127 | 29557 | 20413 | | 22699 |
| 24986 | 15842 | 27272 | 18128 | 29558 | 20414 | | 22700 |
| 24987 | 15843 | 27273 | 18129 | 29559 | 20415 | | 22701 |
| 24988 | 15844 | 27274 | 18130 | 29560 | 20416 | | 22702 |
| 24989 | 15845 | 27275 | 18131 | 29561 | 20417 | | 22703 |
| 24990 | 15846 | 27276 | 18132 | 29562 | 20418 | | 22704 |
| 24991 | 15847 | 27277 | 18133 | 29563 | 20419 | | 22705 |
| 24992 | 15848 | 27278 | 18134 | 29564 | 20420 | | 22706 |
| 24993 | 15849 | 27279 | 18135 | 29565 | 20421 | | 22707 |
| 24994 | 15850 | 27280 | 18136 | 29566 | 20422 | | 22708 |
| 24995 | 15851 | 27281 | 18137 | 29567 | 20423 | | 22709 |
| 24996 | 15852 | 27282 | 18138 | 29568 | 20424 | | 22710 |
| 24997 | 15853 | 27283 | 18139 | 29569 | 20425 | | 22711 |
| 24998 | 15854 | 27284 | 18140 | 29570 | 20426 | | 22712 |
| 24999 | 15855 | 27285 | 18141 | 29571 | 20427 | | 22713 |
| 25000 | 15856 | 27286 | 18142 | 29572 | 20428 | | 22714 |
| 25001 | 15857 | 27287 | 18143 | 29573 | 20429 | | 22715 |
| 25002 | 15858 | 27288 | 18144 | 29574 | 20430 | | 22716 |
| 25003 | 15859 | 27289 | 18145 | 29575 | 20431 | | 22717 |
| 25004 | 15860 | 27290 | 18146 | 29576 | 20432 | | 22718 |
| 25005 | 15861 | 27291 | 18147 | 29577 | 20433 | | 22719 |
| 25006 | 15862 | 27292 | 18148 | 29578 | 20434 | | 22720 |
| 25007 | 15863 | 27293 | 18149 | 29579 | 20435 | | 22721 |
| 25008 | 15864 | 27294 | 18150 | 29580 | 20436 | | 22722 |
| 25009 | 15865 | 27295 | 18151 | 29581 | 20437 | | 22723 |
| 25010 | 15866 | 27296 | 18152 | 29582 | 20438 | | 22724 |
| 25011 | 15867 | 27297 | 18153 | 29583 | 20439 | | 22725 |
| 25012 | 15868 | 27298 | 18154 | 29584 | 20440 | | 22726 |
| 25013 | 15869 | 27299 | 18155 | 29585 | 20441 | | 22727 |
| 25014 | 15870 | 27300 | 18156 | 29586 | 20442 | | 22728 |
| 25015 | 15871 | 27301 | 18157 | 29587 | 20443 | | 22729 |
| 25016 | 15872 | 27302 | 18158 | 29588 | 20444 | | 22730 |
| 25017 | 15873 | 27303 | 18159 | 29589 | 20445 | | 22731 |
| 25018 | 15874 | 27304 | 18160 | 29590 | 20446 | | 22732 |
| 25019 | 15875 | 27305 | 18161 | 29591 | 20447 | | 22733 |
| 25020 | 15876 | 27306 | 18162 | 29592 | 20448 | | 22734 |
| 25021 | 15877 | 27307 | 18163 | 29593 | 20449 | | 22735 |
| 25022 | 15878 | 27308 | 18164 | 29594 | 20450 | | 22736 |
| 25023 | 15879 | 27309 | 18165 | 29595 | 20451 | | 22737 |
| 25024 | 15880 | 27310 | 18166 | 29596 | 20452 | | 22738 |
| 25025 | 15881 | 27311 | 18167 | 29597 | 20453 | | 22739 |
| 25026 | 15882 | 27312 | 18168 | 29598 | 20454 | | 22740 |
| 25027 | 15883 | 27313 | 18169 | 29599 | 20455 | | 22741 |
| 25028 | 15884 | 27314 | 18170 | 29600 | 20456 | | 22742 |
| 25029 | 15885 | 27315 | 18171 | 29601 | 20457 | | 22743 |
| 25030 | 15886 | 27316 | 18172 | 29602 | 20458 | | 22744 |
| 25031 | 15887 | 27317 | 18173 | 29603 | 20459 | | 22745 |
| 25032 | 15888 | 27318 | 18174 | 29604 | 20460 | | 22746 |
| 25033 | 15889 | 27319 | 18175 | 29605 | 20461 | | 22747 |
| 25034 | 15890 | 27320 | 18176 | 29606 | 20462 | | 22748 |
| 25035 | 15891 | 27321 | 18177 | 29607 | 20463 | | 22749 |
| 25036 | 15892 | 27322 | 18178 | 29608 | 20464 | | 22750 |
| 25037 | 15893 | 27323 | 18179 | 29609 | 20465 | | 22751 |
| 25038 | 15894 | 27324 | 18180 | 29610 | 20466 | | 22752 |
| 25039 | 15895 | 27325 | 18181 | 29611 | 20467 | | 22753 |
| 25040 | 15896 | 27326 | 18182 | 29612 | 20468 | | 22754 |
| 25041 | 15897 | 27327 | 18183 | 29613 | 20469 | | 22755 |
| 25042 | 15898 | 27328 | 18184 | 29614 | 20470 | | 22756 |
| 25043 | 15899 | 27329 | 18185 | 29615 | 20471 | | 22757 |
| 25044 | 15900 | 27330 | 18186 | 29616 | 20472 | | 22758 |
| 25045 | 15901 | 27331 | 18187 | 29617 | 20473 | | 22759 |
| 25046 | 15902 | 27332 | 18188 | 29618 | 20474 | | 22760 |
| 25047 | 15903 | 27333 | 18189 | 29619 | 20475 | | 22761 |
| 25048 | 15904 | 27334 | 18190 | 29620 | 20476 | | 22762 |
| 25049 | 15905 | 27335 | 18191 | 29621 | 20477 | | 22763 |
| 25050 | 15906 | 27336 | 18192 | 29622 | 20478 | | 22764 |
| 25051 | 15907 | 27337 | 18193 | 29623 | 20479 | | 22765 |
| 25052 | 15908 | 27338 | 18194 | 29624 | 20480 | | 22766 |
| 25053 | 15909 | 27339 | 18195 | 29625 | 20481 | | 22767 |
| 25054 | 15910 | 27340 | 18196 | 29626 | 20482 | | 22768 |
| 25055 | 15911 | 27341 | 18197 | 29627 | 20483 | | 22769 |
| 25056 | 15912 | 27342 | 18198 | 29628 | 20484 | | 22770 |
| 25057 | 15913 | 27343 | 18199 | 29629 | 20485 | | 22771 |
| 25058 | 15914 | 27344 | 18200 | 29630 | 20486 | | 22772 |
| 25059 | 15915 | 27345 | 18201 | 29631 | 20487 | | 22773 |
| 25060 | 15916 | 27346 | 18202 | 29632 | 20488 | | 22774 |
| 25061 | 15917 | 27347 | 18203 | 29633 | 20489 | | 22775 |
| 25062 | 15918 | 27348 | 18204 | 29634 | 20490 | | 22776 |
| 25063 | 15919 | 27349 | 18205 | 29635 | 20491 | | 22777 |
| 25064 | 15920 | 27350 | 18206 | 29636 | 20492 | | 22778 |
| 25065 | 15921 | 27351 | 18207 | 29637 | 20493 | | 22779 |
| 25066 | 15922 | 27352 | 18208 | 29638 | 20494 | | 22780 |
| 25067 | 15923 | 27353 | 18209 | 29639 | 20495 | | 22781 |
| 25068 | 15924 | 27354 | 18210 | 29640 | 20496 | | 22782 |
| 25069 | 15925 | 27355 | 18211 | 29641 | 20497 | | 22783 |
| 25070 | 15926 | 27356 | 18212 | 29642 | 20498 | | 22784 |
| 25071 | 15927 | 27357 | 18213 | 29643 | 20499 | | 22785 |
| 25072 | 15928 | 27358 | 18214 | 29644 | 20500 | | 22786 |
| 25073 | 15929 | 27359 | 18215 | 29645 | 20501 | | 22787 |
| 25074 | 15930 | 27360 | 18216 | 29646 | 20502 | | 22788 |
| 25075 | 15931 | 27361 | 18217 | 29647 | 20503 | | 22789 |
| 25076 | 15932 | 27362 | 18218 | 29648 | 20504 | | 22790 |
| 25077 | 15933 | 27363 | 18219 | 29649 | 20505 | | 22791 |
| 25078 | 15934 | 27364 | 18220 | 29650 | 20506 | | 22792 |
| 25079 | 15935 | 27365 | 18221 | 29651 | 20507 | | 22793 |
| 25080 | 15936 | 27366 | 18222 | 29652 | 20508 | | 22794 |
| 25081 | 15937 | 27367 | 18223 | 29653 | 20509 | | 22795 |
| 25082 | 15938 | 27368 | 18224 | 29654 | 20510 | | 22796 |
| 25083 | 15939 | 27369 | 18225 | 29655 | 20511 | | 22797 |
| 25084 | 15940 | 27370 | 18226 | 29656 | 20512 | | 22798 |
| 25085 | 15941 | 27371 | 18227 | 29657 | 20513 | | 22799 |
| 25086 | 15942 | 27372 | 18228 | 29658 | 20514 | | 22800 |
| 25087 | 15943 | 27373 | 18229 | 29659 | 20515 | | 22801 |
| 25088 | 15944 | 27374 | 18230 | 29660 | 20516 | | 22802 |
| 25089 | 15945 | 27375 | 18231 | 29661 | 20517 | | 22803 |
| 25090 | 15946 | 27376 | 18232 | 29662 | 20518 | | 22804 |
| 25091 | 15947 | 27377 | 18233 | 29663 | 20519 | | 22805 |
| 25092 | 15948 | 27378 | 18234 | 29664 | 20520 | | 22806 |
| 25093 | 15949 | 27379 | 18235 | 29665 | 20521 | | 22807 |
| 25094 | 15950 | 27380 | 18236 | 29666 | 20522 | | 22808 |
| 25095 | 15951 | 27381 | 18237 | 29667 | 20523 | | 22809 |
| 25096 | 15952 | 27382 | 18238 | 29668 | 20524 | | 22810 |
| 25097 | 15953 | 27383 | 18239 | 29669 | 20525 | | 22811 |
| 25098 | 15954 | 27384 | 18240 | 29670 | 20526 | | 22812 |
| 25099 | 15955 | 27385 | 18241 | 29671 | 20527 | | 22813 |
| 25100 | 15956 | 27386 | 18242 | 29672 | 20528 | | 22814 |
| 25101 | 15957 | 27387 | 18243 | 29673 | 20529 | | 22815 |
| 25102 | 15958 | 27388 | 18244 | 29674 | 20530 | | 22816 |
| 25103 | 15959 | 27389 | 18245 | 29675 | 20531 | | 22817 |
| 25104 | 15960 | 27390 | 18246 | 29676 | 20532 | | 22818 |
| 25105 | 15961 | 27391 | 18247 | 29677 | 20533 | | 22819 |
| 25106 | 15962 | 27392 | 18248 | 29678 | 20534 | | 22820 |
| 25107 | 15963 | 27393 | 18249 | 29679 | 20535 | | 22821 |
| 25108 | 15964 | 27394 | 18250 | 29680 | 20536 | | 22822 |
| 25109 | 15965 | 27395 | 18251 | 29681 | 20537 | | 22823 |
| 25110 | 15966 | 27396 | 18252 | 29682 | 20538 | | 22824 |
| 25111 | 15967 | 27397 | 18253 | 29683 | 20539 | | 22825 |
| 25112 | 15968 | 27398 | 18254 | 29684 | 20540 | | 22826 |
| 25113 | 15969 | 27399 | 18255 | 29685 | 20541 | | 22827 |
| 25114 | 15970 | 27400 | 18256 | 29686 | 20542 | | 22828 |
| 25115 | 15971 | 27401 | 18257 | 29687 | 20543 | | 22829 |
| 25116 | 15972 | 27402 | 18258 | 29688 | 20544 | | 22830 |
| 25117 | 15973 | 27403 | 18259 | 29689 | 20545 | | 22831 |
| 25118 | 15974 | 27404 | 18260 | 29690 | 20546 | | 22832 |
| 25119 | 15975 | 27405 | 18261 | 29691 | 20547 | | 22833 |
| 25120 | 15976 | 27406 | 18262 | 29692 | 20548 | | 22834 |
| 25121 | 15977 | 27407 | 18263 | 29693 | 20549 | | 22835 |
| 25122 | 15978 | 27408 | 18264 | 29694 | 20550 | | 22836 |
| 25123 | 15979 | 27409 | 18265 | 29695 | 20551 | | 22837 |
| 25124 | 15980 | 27410 | 18266 | 29696 | 20552 | | 22838 |
| 25125 | 15981 | 27411 | 18267 | 29697 | 20553 | | 22839 |
| 25126 | 15982 | 27412 | 18268 | 29698 | 20554 | | 22840 |
| 25127 | 15983 | 27413 | 18269 | 29699 | 20555 | | 22841 |
| 25128 | 15984 | 27414 | 18270 | 29700 | 20556 | | 22842 |
| 25129 | 15985 | 27415 | 18271 | 29701 | 20557 | | 22843 |
| 25130 | 15986 | 27416 | 18272 | 29702 | 20558 | | 22844 |
| 25131 | 15987 | 27417 | 18273 | 29703 | 20559 | | 22845 |
| 25132 | 15988 | 27418 | 18274 | 29704 | 20560 | | 22846 |
| 25133 | 15989 | 27419 | 18275 | 29705 | 20561 | | 22847 |
| 25134 | 15990 | 27420 | 18276 | 29706 | 20562 | | 22848 |
| 25135 | 15991 | 27421 | 18277 | 29707 | 20563 | | 22849 |
| 25136 | 15992 | 27422 | 18278 | 29708 | 20564 | | 22850 |
| 25137 | 15993 | 27423 | 18279 | 29709 | 20565 | | 22851 |
| 25138 | 15994 | 27424 | 18280 | 29710 | 20566 | | 22852 |
| 25139 | 15995 | 27425 | 18281 | 29711 | 20567 | | 22853 |
| 25140 | 15996 | 27426 | 18282 | 29712 | 20568 | | 22854 |
| 25141 | 15997 | 27427 | 18283 | 29713 | 20569 | | 22855 |
| 25142 | 15998 | 27428 | 18284 | 29714 | 20570 | | 22856 |
| 25143 | 15999 | 27429 | 18285 | 29715 | 20571 | | 22857 |
| 25144 | 16000 | 27430 | 18286 | 29716 | 20572 | | 22858 |
| 25145 | 16001 | 27431 | 18287 | 29717 | 20573 | | 22859 |
| 25146 | 16002 | 27432 | 18288 | 29718 | 20574 | | 22860 |
| 25147 | 16003 | 27433 | 18289 | 29719 | 20575 | | 22861 |
| 25148 | 16004 | 27434 | 18290 | 29720 | 20576 | | 22862 |
| 25149 | 16005 | 27435 | 18291 | 29721 | 20577 | | 22863 |
| 25150 | 16006 | 27436 | 18292 | 29722 | 20578 | | 22864 |
| 25151 | 16007 | 27437 | 18293 | 29723 | 20579 | | 22865 |
| 25152 | 16008 | 27438 | 18294 | 29724 | 20580 | | 22866 |
| 25153 | 16009 | 27439 | 18295 | 29725 | 20581 | | 22867 |
| 25154 | 16010 | 27440 | 18296 | 29726 | 20582 | | 22868 |
| 25155 | 16011 | 27441 | 18297 | 29727 | 20583 | | 22869 |
| 25156 | 16012 | 27442 | 18298 | 29728 | 20584 | | 22870 |
| 25157 | 16013 | 27443 | 18299 | 29729 | 20585 | | 22871 |
| 25158 | 16014 | 27444 | 18300 | 29730 | 20586 | | 22872 |
| 25159 | 16015 | 27445 | 18301 | 29731 | 20587 | | 22873 |
| 25160 | 16016 | 27446 | 18302 | 29732 | 20588 | | 22874 |
| 25161 | 16017 | 27447 | 18303 | 29733 | 20589 | | 22875 |
| 25162 | 16018 | 27448 | 18304 | 29734 | 20590 | | 22876 |
| 25163 | 16019 | 27449 | 18305 | 29735 | 20591 | | 22877 |
| 25164 | 16020 | 27450 | 18306 | 29736 | 20592 | | 22878 |
| 25165 | 16021 | 27451 | 18307 | 29737 | 20593 | | 22879 |
| 25166 | 16022 | 27452 | 18308 | 29738 | 20594 | | 22880 |
| 25167 | 16023 | 27453 | 18309 | 29739 | 20595 | | 22881 |
| 25168 | 16024 | 27454 | 18310 | 29740 | 20596 | | 22882 |
| 25169 | 16025 | 27455 | 18311 | 29741 | 20597 | | 22883 |
| 25170 | 16026 | 27456 | 18312 | 29742 | 20598 | | 22884 |
| 25171 | 16027 | 27457 | 18313 | 29743 | 20599 | | 22885 |
| 25172 | 16028 | 27458 | 18314 | 29744 | 20600 | | 22886 |
| 25173 | 16029 | 27459 | 18315 | 29745 | 20601 | | 22887 |
| 25174 | 16030 | 27460 | 18316 | 29746 | 20602 | | 22888 |
| 25175 | 16031 | 27461 | 18317 | 29747 | 20603 | | 22889 |
| 25176 | 16032 | 27462 | 18318 | 29748 | 20604 | | 22890 |
| 25177 | 16033 | 27463 | 18319 | 29749 | 20605 | | 22891 |
| 25178 | 16034 | 27464 | 18320 | 29750 | 20606 | | 22892 |
| 25179 | 16035 | 27465 | 18321 | 29751 | 20607 | | 22893 |
| 25180 | 16036 | 27466 | 18322 | 29752 | 20608 | | 22894 |
| 25181 | 16037 | 27467 | 18323 | 29753 | 20609 | | 22895 |
| 25182 | 16038 | 27468 | 18324 | 29754 | 20610 | | 22896 |
| 25183 | 16039 | 27469 | 18325 | 29755 | 20611 | | 22897 |
| 25184 | 16040 | 27470 | 18326 | 29756 | 20612 | | 22898 |
| 25185 | 16041 | 27471 | 18327 | 29757 | 20613 | | 22899 |
| 25186 | 16042 | 27472 | 18328 | 29758 | 20614 | | 22900 |
| 25187 | 16043 | 27473 | 18329 | 29759 | 20615 | | 22901 |
| 25188 | 16044 | 27474 | 18330 | 29760 | 20616 | | 22902 |
| 25189 | 16045 | 27475 | 18331 | 29761 | 20617 | | 22903 |
| 25190 | 16046 | 27476 | 18332 | 29762 | 20618 | | 22904 |
| 25191 | 16047 | 27477 | 18333 | 29763 | 20619 | | 22905 |
| 25192 | 16048 | 27478 | 18334 | 29764 | 20620 | | 22906 |
| 25193 | 16049 | 27479 | 18335 | 29765 | 20621 | | 22907 |
| 25194 | 16050 | 27480 | 18336 | 29766 | 20622 | | 22908 |
| 25195 | 16051 | 27481 | 18337 | 29767 | 20623 | | 22909 |
| 25196 | 16052 | 27482 | 18338 | 29768 | 20624 | | 22910 |
| 25197 | 16053 | 27483 | 18339 | 29769 | 20625 | | 22911 |
| 25198 | 16054 | 27484 | 18340 | 29770 | 20626 | | 22912 |
| 25199 | 16055 | 27485 | 18341 | 29771 | 20627 | | 22913 |
| 25200 | 16056 | 27486 | 18342 | 29772 | 20628 | | 22914 |
| 25201 | 16057 | 27487 | 18343 | 29773 | 20629 | | 22915 |
| 25202 | 16058 | 27488 | 18344 | 29774 | 20630 | | 22916 |
| 25203 | 16059 | 27489 | 18345 | 29775 | 20631 | | 22917 |
| 25204 | 16060 | 27490 | 18346 | 29776 | 20632 | | 22918 |
| 25205 | 16061 | 27491 | 18347 | 29777 | 20633 | | 22919 |
| 25206 | 16062 | 27492 | 18348 | 29778 | 20634 | | 22920 |
| 25207 | 16063 | 27493 | 18349 | 29779 | 20635 | | 22921 |
| 25208 | 16064 | 27494 | 18350 | 29780 | 20636 | | 22922 |
| 25209 | 16065 | 27495 | 18351 | 29781 | 20637 | | 22923 |
| 25210 | 16066 | 27496 | 18352 | 29782 | 20638 | | 22924 |
| 25211 | 16067 | 27497 | 18353 | 29783 | 20639 | | 22925 |
| 25212 | 16068 | 27498 | 18354 | 29784 | 20640 | | 22926 |
| 25213 | 16069 | 27499 | 18355 | 29785 | 20641 | | 22927 |
| 25214 | 16070 | 27500 | 18356 | 29786 | 20642 | | 22928 |
| 25215 | 16071 | 27501 | 18357 | 29787 | 20643 | | 22929 |
| 25216 | 16072 | 27502 | 18358 | 29788 | 20644 | | 22930 |
| 25217 | 16073 | 27503 | 18359 | 29789 | 20645 | | 22931 |
| 25218 | 16074 | 27504 | 18360 | 29790 | 20646 | | 22932 |
| 25219 | 16075 | 27505 | 18361 | 29791 | 20647 | | 22933 |
| 25220 | 16076 | 27506 | 18362 | 29792 | 20648 | | 22934 |
| 25221 | 16077 | 27507 | 18363 | 29793 | 20649 | | 22935 |
| 25222 | 16078 | 27508 | 18364 | 29794 | 20650 | | 22936 |
| 25223 | 16079 | 27509 | 18365 | 29795 | 20651 | | 22937 |
| 25224 | 16080 | 27510 | 18366 | 29796 | 20652 | | 22938 |
| 25225 | 16081 | 27511 | 18367 | 29797 | 20653 | | 22939 |
| 25226 | 16082 | 27512 | 18368 | 29798 | 20654 | | 22940 |
| 25227 | 16083 | 27513 | 18369 | 29799 | 20655 | | 22941 |
| 25228 | 16084 | 27514 | 18370 | 29800 | 20656 | | 22942 |
| 25229 | 16085 | 27515 | 18371 | 29801 | 20657 | | 22943 |
| 25230 | 16086 | 27516 | 18372 | 29802 | 20658 | | 22944 |
| 25231 | 16087 | 27517 | 18373 | 29803 | 20659 | | 22945 |
| 25232 | 16088 | 27518 | 18374 | 29804 | 20660 | | 22946 |
| 25233 | 16089 | 27519 | 18375 | 29805 | 20661 | | 22947 |
| 25234 | 16090 | 27520 | 18376 | 29806 | 20662 | | 22948 |
| 25235 | 16091 | 27521 | 18377 | 29807 | 20663 | | 22949 |
| 25236 | 16092 | 27522 | 18378 | 29808 | 20664 | | 22950 |
| 25237 | 16093 | 27523 | 18379 | 29809 | 20665 | | 22951 |
| 25238 | 16094 | 27524 | 18380 | 29810 | 20666 | | 22952 |
| 25239 | 16095 | 27525 | 18381 | 29811 | 20667 | | 22953 |
| 25240 | 16096 | 27526 | 18382 | 29812 | 20668 | | 22954 |
| 25241 | 16097 | 27527 | 18383 | 29813 | 20669 | | 22955 |
| 25242 | 16098 | 27528 | 18384 | 29814 | 20670 | | 22956 |
| 25243 | 16099 | 27529 | 18385 | 29815 | 20671 | | 22957 |
| 25244 | 16100 | 27530 | 18386 | 29816 | 20672 | | 22958 |
| 25245 | 16101 | 27531 | 18387 | 29817 | 20673 | | 22959 |
| 25246 | 16102 | 27532 | 18388 | 29818 | 20674 | | 22960 |
| 25247 | 16103 | 27533 | 18389 | 29819 | 20675 | | 22961 |
| 25248 | 16104 | 27534 | 18390 | 29820 | 20676 | | 22962 |
| 25249 | 16105 | 27535 | 18391 | 29821 | 20677 | | 22963 |
| 25250 | 16106 | 27536 | 18392 | 29822 | 20678 | | 22964 |
| 25251 | 16107 | 27537 | 18393 | 29823 | 20679 | | 22965 |
| 25252 | 16108 | 27538 | 18394 | 29824 | 20680 | | 22966 |
| 25253 | 16109 | 27539 | 18395 | 29825 | 20681 | | 22967 |
| 25254 | 16110 | 27540 | 18396 | 29826 | 20682 | | 22968 |
| 25255 | 16111 | 27541 | 18397 | 29827 | 20683 | | 22969 |
| 25256 | 16112 | 27542 | 18398 | 29828 | 20684 | | 22970 |
| 25257 | 16113 | 27543 | 18399 | 29829 | 20685 | | 22971 |
| 25258 | 16114 | 27544 | 18400 | 29830 | 20686 | | 22972 |
| 25259 | 16115 | 27545 | 18401 | 29831 | 20687 | | 22973 |
| 25260 | 16116 | 27546 | 18402 | 29832 | 20688 | | 22974 |
| 25261 | 16117 | 27547 | 18403 | 29833 | 20689 | | 22975 |
| 25262 | 16118 | 27548 | 18404 | 29834 | 20690 | | 22976 |
| 25263 | 16119 | 27549 | 18405 | 29835 | 20691 | | 22977 |
| 25264 | 16120 | 27550 | 18406 | 29836 | 20692 | | 22978 |
| 25265 | 16121 | 27551 | 18407 | 29837 | 20693 | | 22979 |
| 25266 | 16122 | 27552 | 18408 | 29838 | 20694 | | 22980 |
| 25267 | 16123 | 27553 | 18409 | 29839 | 20695 | | 22981 |
| 25268 | 16124 | 27554 | 18410 | 29840 | 20696 | | 22982 |
| 25269 | 16125 | 27555 | 18411 | 29841 | 20697 | | 22983 |
| 25270 | 16126 | 27556 | 18412 | 29842 | 20698 | | 22984 |
| 25271 | 16127 | 27557 | 18413 | 29843 | 20699 | | 22985 |
| 25272 | 16128 | 27558 | 18414 | 29844 | 20700 | | 22986 |
| 25273 | 16129 | 27559 | 18415 | 29845 | 20701 | | 22987 |
| 25274 | 16130 | 27560 | 18416 | 29846 | 20702 | | 22988 |
| 25275 | 16131 | 27561 | 18417 | 29847 | 20703 | | 22989 |
| 25276 | 16132 | 27562 | 18418 | 29848 | 20704 | | 22990 |
| 25277 | 16133 | 27563 | 18419 | 29849 | 20705 | | 22991 |
| 25278 | 16134 | 27564 | 18420 | 29850 | 20706 | | 22992 |
| 25279 | 16135 | 27565 | 18421 | 29851 | 20707 | | 22993 |
| 25280 | 16136 | 27566 | 18422 | 29852 | 20708 | | 22994 |
| 25281 | 16137 | 27567 | 18423 | 29853 | 20709 | | 22995 |
| 25282 | 16138 | 27568 | 18424 | 29854 | 20710 | | 22996 |
| 25283 | 16139 | 27569 | 18425 | 29855 | 20711 | | 22997 |
| 25284 | 16140 | 27570 | 18426 | 29856 | 20712 | | 22998 |
| 25285 | 16141 | 27571 | 18427 | 29857 | 20713 | | 22999 |
| 25286 | 16142 | 27572 | 18428 | 29858 | 20714 | | 23000 |
| 25287 | 16143 | 27573 | 18429 | 29859 | 20715 | | 23001 |
| 25288 | 16144 | 27574 | 18430 | 29860 | 20716 | | 23002 |
| 25289 | 16145 | 27575 | 18431 | 29861 | 20717 | | 23003 |
| 25290 | 16146 | 27576 | 18432 | 29862 | 20718 | | 23004 |
| 25291 | 16147 | 27577 | 18433 | 29863 | 20719 | | 23005 |
| 25292 | 16148 | 27578 | 18434 | 29864 | 20720 | | 23006 |
| 25293 | 16149 | 27579 | 18435 | 29865 | 20721 | | 23007 |
| 25294 | 16150 | 27580 | 18436 | 29866 | 20722 | | 23008 |
| 25295 | 16151 | 27581 | 18437 | 29867 | 20723 | | 23009 |
| 25296 | 16152 | 27582 | 18438 | 29868 | 20724 | | 23010 |
| 25297 | 16153 | 27583 | 18439 | 29869 | 20725 | | 23011 |
| 25298 | 16154 | 27584 | 18440 | 29870 | 20726 | | 23012 |
| 25299 | 16155 | 27585 | 18441 | 29871 | 20727 | | 23013 |
| 25300 | 16156 | 27586 | 18442 | 29872 | 20728 | | 23014 |
| 25301 | 16157 | 27587 | 18443 | 29873 | 20729 | | 23015 |
| 25302 | 16158 | 27588 | 18444 | 29874 | 20730 | | 23016 |
| 25303 | 16159 | 27589 | 18445 | 29875 | 20731 | | 23017 |
| 25304 | 16160 | 27590 | 18446 | 29876 | 20732 | | 23018 |
| 25305 | 16161 | 27591 | 18447 | 29877 | 20733 | | 23019 |
| 25306 | 16162 | 27592 | 18448 | 29878 | 20734 | | 23020 |
| 25307 | 16163 | 27593 | 18449 | 29879 | 20735 | | 23021 |
| 25308 | 16164 | 27594 | 18450 | 29880 | 20736 | | 23022 |
| 25309 | 16165 | 27595 | 18451 | 29881 | 20737 | | 23023 |
| 25310 | 16166 | 27596 | 18452 | 29882 | 20738 | | 23024 |
| 25311 | 16167 | 27597 | 18453 | 29883 | 20739 | | 23025 |
| 25312 | 16168 | 27598 | 18454 | 29884 | 20740 | | 23026 |
| 25313 | 16169 | 27599 | 18455 | 29885 | 20741 | | 23027 |
| 25314 | 16170 | 27600 | 18456 | 29886 | 20742 | | 23028 |
| 25315 | 16171 | 27601 | 18457 | 29887 | 20743 | | 23029 |
| 25316 | 16172 | 27602 | 18458 | 29888 | 20744 | | 23030 |
| 25317 | 16173 | 27603 | 18459 | 29889 | 20745 | | 23031 |
| 25318 | 16174 | 27604 | 18460 | 29890 | 20746 | | 23032 |
| 25319 | 16175 | 27605 | 18461 | 29891 | 20747 | | 23033 |
| 25320 | 16176 | 27606 | 18462 | 29892 | 20748 | | 23034 |
| 25321 | 16177 | 27607 | 18463 | 29893 | 20749 | | 23035 |
| 25322 | 16178 | 27608 | 18464 | 29894 | 20750 | | 23036 |
| 25323 | 16179 | 27609 | 18465 | 29895 | 20751 | | 23037 |
| 25324 | 16180 | 27610 | 18466 | 29896 | 20752 | | 23038 |
| 25325 | 16181 | 27611 | 18467 | 29897 | 20753 | | 23039 |
| 25326 | 16182 | 27612 | 18468 | 29898 | 20754 | | 23040 |
| 25327 | 16183 | 27613 | 18469 | 29899 | 20755 | | 23041 |
| 25328 | 16184 | 27614 | 18470 | 29900 | 20756 | | 23042 |
| 25329 | 16185 | 27615 | 18471 | 29901 | 20757 | | 23043 |
| 25330 | 16186 | 27616 | 18472 | 29902 | 20758 | | 23044 |
| 25331 | 16187 | 27617 | 18473 | 29903 | 20759 | | 23045 |
| 25332 | 16188 | 27618 | 18474 | 29904 | 20760 | | 23046 |
| 25333 | 16189 | 27619 | 18475 | 29905 | 20761 | | 23047 |
| 25334 | 16190 | 27620 | 18476 | 29906 | 20762 | | 23048 |
| 25335 | 16191 | 27621 | 18477 | 29907 | 20763 | | 23049 |
| 25336 | 16192 | 27622 | 18478 | 29908 | 20764 | | 23050 |
| 25337 | 16193 | 27623 | 18479 | 29909 | 20765 | | 23051 |
| 25338 | 16194 | 27624 | 18480 | 29910 | 20766 | | 23052 |
| 25339 | 16195 | 27625 | 18481 | 29911 | 20767 | | 23053 |
| 25340 | 16196 | 27626 | 18482 | 29912 | 20768 | | 23054 |
| 25341 | 16197 | 27627 | 18483 | 29913 | 20769 | | 23055 |
| 25342 | 16198 | 27628 | 18484 | 29914 | 20770 | | 23056 |
| 25343 | 16199 | 27629 | 18485 | 29915 | 20771 | | 23057 |
| 25344 | 16200 | 27630 | 18486 | 29916 | 20772 | | 23058 |
| 25345 | 16201 | 27631 | 18487 | 29917 | 20773 | | 23059 |
| 25346 | 16202 | 27632 | 18488 | 29918 | 20774 | | 23060 |
| 25347 | 16203 | 27633 | 18489 | 29919 | 20775 | | 23061 |
| 25348 | 16204 | 27634 | 18490 | 29920 | 20776 | | 23062 |
| 25349 | 16205 | 27635 | 18491 | 29921 | 20777 | | 23063 |
| 25350 | 16206 | 27636 | 18492 | 29922 | 20778 | | 23064 |
| 25351 | 16207 | 27637 | 18493 | 29923 | 20779 | | 23065 |
| 25352 | 16208 | 27638 | 18494 | 29924 | 20780 | | 23066 |
| 25353 | 16209 | 27639 | 18495 | 29925 | 20781 | | 23067 |
| 25354 | 16210 | 27640 | 18496 | 29926 | 20782 | | 23068 |
| 25355 | 16211 | 27641 | 18497 | 29927 | 20783 | | 23069 |
| 25356 | 16212 | 27642 | 18498 | 29928 | 20784 | | 23070 |
| 25357 | 16213 | 27643 | 18499 | 29929 | 20785 | | 23071 |
| 25358 | 16214 | 27644 | 18500 | 29930 | 20786 | | 23072 |
| 25359 | 16215 | 27645 | 18501 | 29931 | 20787 | | 23073 |
| 25360 | 16216 | 27646 | 18502 | 29932 | 20788 | | 23074 |
| 25361 | 16217 | 27647 | 18503 | 29933 | 20789 | | 23075 |
| 25362 | 16218 | 27648 | 18504 | 29934 | 20790 | | 23076 |
| 25363 | 16219 | 27649 | 18505 | 29935 | 20791 | | 23077 |
| 25364 | 16220 | 27650 | 18506 | 29936 | 20792 | | 23078 |
| 25365 | 16221 | 27651 | 18507 | 29937 | 20793 | | 23079 |
| 25366 | 16222 | 27652 | 18508 | 29938 | 20794 | | 23080 |
| 25367 | 16223 | 27653 | 18509 | 29939 | 20795 | | 23081 |
| 25368 | 16224 | 27654 | 18510 | 29940 | 20796 | | 23082 |
| 25369 | 16225 | 27655 | 18511 | 29941 | 20797 | | 23083 |
| 25370 | 16226 | 27656 | 18512 | 29942 | 20798 | | 23084 |
| 25371 | 16227 | 27657 | 18513 | 29943 | 20799 | | 23085 |
| 25372 | 16228 | 27658 | 18514 | 29944 | 20800 | | 23086 |
| 25373 | 16229 | 27659 | 18515 | 29945 | 20801 | | 23087 |
| 25374 | 16230 | 27660 | 18516 | 29946 | 20802 | | 23088 |
| 25375 | 16231 | 27661 | 18517 | 29947 | 20803 | | 23089 |
| 25376 | 16232 | 27662 | 18518 | 29948 | 20804 | | 23090 |
| 25377 | 16233 | 27663 | 18519 | 29949 | 20805 | | 23091 |
| 25378 | 16234 | 27664 | 18520 | 29950 | 20806 | | 23092 |
| 25379 | 16235 | 27665 | 18521 | 29951 | 20807 | | 23093 |
| 25380 | 16236 | 27666 | 18522 | 29952 | 20808 | | 23094 |
| 25381 | 16237 | 27667 | 18523 | 29953 | 20809 | | 23095 |
| 25382 | 16238 | 27668 | 18524 | 29954 | 20810 | | 23096 |
| 25383 | 16239 | 27669 | 18525 | 29955 | 20811 | | 23097 |
| 25384 | 16240 | 27670 | 18526 | 29956 | 20812 | | 23098 |
| 25385 | 16241 | 27671 | 18527 | 29957 | 20813 | | 23099 |
| 25386 | 16242 | 27672 | 18528 | 29958 | 20814 | | 23100 |
| 25387 | 16243 | 27673 | 18529 | 29959 | 20815 | | 23101 |
| 25388 | 16244 | 27674 | 18530 | 29960 | 20816 | | 23102 |
| 25389 | 16245 | 27675 | 18531 | 29961 | 20817 | | 23103 |
| 25390 | 16246 | 27676 | 18532 | 29962 | 20818 | | 23104 |
| 25391 | 16247 | 27677 | 18533 | 29963 | 20819 | | 23105 |
| 25392 | 16248 | 27678 | 18534 | 29964 | 20820 | | 23106 |
| 25393 | 16249 | 27679 | 18535 | 29965 | 20821 | | 23107 |
| 25394 | 16250 | 27680 | 18536 | 29966 | 20822 | | 23108 |
| 25395 | 16251 | 27681 | 18537 | 29967 | 20823 | | 23109 |
| 25396 | 16252 | 27682 | 18538 | 29968 | 20824 | | 23110 |
| 25397 | 16253 | 27683 | 18539 | 29969 | 20825 | | 23111 |
| 25398 | 16254 | 27684 | 18540 | 29970 | 20826 | | 23112 |
| 25399 | 16255 | 27685 | 18541 | 29971 | 20827 | | 23113 |
| 25400 | 16256 | 27686 | 18542 | 29972 | 20828 | | 23114 |
| 25401 | 16257 | 27687 | 18543 | 29973 | 20829 | | 23115 |
| 25402 | 16258 | 27688 | 18544 | 29974 | 20830 | | 23116 |
| 25403 | 16259 | 27689 | 18545 | 29975 | 20831 | | 23117 |
| 25404 | 16260 | 27690 | 18546 | 29976 | 20832 | | 23118 |
| 25405 | 16261 | 27691 | 18547 | 29977 | 20833 | | 23119 |
| 25406 | 16262 | 27692 | 18548 | 29978 | 20834 | | 23120 |
| 25407 | 16263 | 27693 | 18549 | 29979 | 20835 | | 23121 |
| 25408 | 16264 | 27694 | 18550 | 29980 | 20836 | | 23122 |
| 25409 | 16265 | 27695 | 18551 | 29981 | 20837 | | 23123 |
| 25410 | 16266 | 27696 | 18552 | 29982 | 20838 | | 23124 |
| 25411 | 16267 | 27697 | 18553 | 29983 | 20839 | | 23125 |
| 25412 | 16268 | 27698 | 18554 | 29984 | 20840 | | 23126 |
| 25413 | 16269 | 27699 | 18555 | 29985 | 20841 | | 23127 |
| 25414 | 16270 | 27700 | 18556 | 29986 | 20842 | | 23128 |
| 25415 | 16271 | 27701 | 18557 | 29987 | 20843 | | 23129 |
| 25416 | 16272 | 27702 | 18558 | 29988 | 20844 | | 23130 |
| 25417 | 16273 | 27703 | 18559 | 29989 | 20845 | | 23131 |
| 25418 | 16274 | 27704 | 18560 | 29990 | 20846 | | 23132 |
| 25419 | 16275 | 27705 | 18561 | 29991 | 20847 | | 23133 |
| 25420 | 16276 | 27706 | 18562 | 29992 | 20848 | | 23134 |
| 25421 | 16277 | 27707 | 18563 | 29993 | 20849 | | 23135 |
| 25422 | 16278 | 27708 | 18564 | 29994 | 20850 | | 23136 |
| 25423 | 16279 | 27709 | 18565 | 29995 | 20851 | | 23137 |
| 25424 | 16280 | 27710 | 18566 | 29996 | 20852 | | 23138 |
| 25425 | 16281 | 27711 | 18567 | 29997 | 20853 | | 23139 |
| 25426 | 16282 | 27712 | 18568 | 29998 | 20854 | | 23140 |
| 25427 | 16283 | 27713 | 18569 | 29999 | 20855 | | 23141 |
| 25428 | 16284 | 27714 | 18570 | 30000 | 20856 | | 23142 |
| 25429 | 16285 | 27715 | 18571 | 30001 | 20857 | | 23143 |
| 25430 | 16286 | 27716 | 18572 | 30002 | 20858 | | 23144 |
| 25431 | 16287 | 27717 | 18573 | 30003 | 20859 | | 23145 |
| 25432 | 16288 | 27718 | 18574 | 30004 | 20860 | | 23146 |
| 25433 | 16289 | 27719 | 18575 | 30005 | 20861 | | 23147 |
| 25434 | 16290 | 27720 | 18576 | 30006 | 20862 | | 23148 |
| 25435 | 16291 | 27721 | 18577 | 30007 | 20863 | | 23149 |
| 25436 | 16292 | 27722 | 18578 | 30008 | 20864 | | 23150 |
| 25437 | 16293 | 27723 | 18579 | 30009 | 20865 | | 23151 |
| 25438 | 16294 | 27724 | 18580 | 30010 | 20866 | | 23152 |
| 25439 | 16295 | 27725 | 18581 | 30011 | 20867 | | 23153 |
| 25440 | 16296 | 27726 | 18582 | 30012 | 20868 | | 23154 |
| 25441 | 16297 | 27727 | 18583 | 30013 | 20869 | | 23155 |
| 25442 | 16298 | 27728 | 18584 | 30014 | 20870 | | 23156 |
| 25443 | 16299 | 27729 | 18585 | 30015 | 20871 | | 23157 |
| 25444 | 16300 | 27730 | 18586 | 30016 | 20872 | | 23158 |
| 25445 | 16301 | 27731 | 18587 | 30017 | 20873 | | 23159 |
| 25446 | 16302 | 27732 | 18588 | 30018 | 20874 | | 23160 |
| 25447 | 16303 | 27733 | 18589 | 30019 | 20875 | | 23161 |
| 25448 | 16304 | 27734 | 18590 | 30020 | 20876 | | 23162 |
| 25449 | 16305 | 27735 | 18591 | 30021 | 20877 | | 23163 |
| 25450 | 16306 | 27736 | 18592 | 30022 | 20878 | | 23164 |
| 25451 | 16307 | 27737 | 18593 | 30023 | 20879 | | 23165 |
| 25452 | 16308 | 27738 | 18594 | 30024 | 20880 | | 23166 |
| 25453 | 16309 | 27739 | 18595 | 30025 | 20881 | | 23167 |
| 25454 | 16310 | 27740 | 18596 | 30026 | 20882 | | 23168 |
| 25455 | 16311 | 27741 | 18597 | 30027 | 20883 | | 23169 |
| 25456 | 16312 | 27742 | 18598 | 30028 | 20884 | | 23170 |
| 25457 | 16313 | 27743 | 18599 | 30029 | 20885 | | 23171 |
| 25458 | 16314 | 27744 | 18600 | 30030 | 20886 | | 23172 |
| 25459 | 16315 | 27745 | 18601 | 30031 | 20887 | | 23173 |
| 25460 | 16316 | 27746 | 18602 | 30032 | 20888 | | 23174 |
| 25461 | 16317 | 27747 | 18603 | 30033 | 20889 | | 23175 |
| 25462 | 16318 | 27748 | 18604 | 30034 | 20890 | | 23176 |
| 25463 | 16319 | 27749 | 18605 | 30035 | 20891 | | 23177 |
| 25464 | 16320 | 27750 | 18606 | 30036 | 20892 | | 23178 |
| 25465 | 16321 | 27751 | 18607 | 30037 | 20893 | | 23179 |
| 25466 | 16322 | 27752 | 18608 | 30038 | 20894 | | 23180 |
| 25467 | 16323 | 27753 | 18609 | 30039 | 20895 | | 23181 |
| 25468 | 16324 | 27754 | 18610 | 30040 | 20896 | | 23182 |
| 25469 | 16325 | 27755 | 18611 | 30041 | 20897 | | 23183 |
| 25470 | 16326 | 27756 | 18612 | 30042 | 20898 | | 23184 |
| 25471 | 16327 | 27757 | 18613 | 30043 | 20899 | | 23185 |
| 25472 | 16328 | 27758 | 18614 | 30044 | 20900 | | 23186 |
| 25473 | 16329 | 27759 | 18615 | 30045 | 20901 | | 23187 |
| 25474 | 16330 | 27760 | 18616 | 30046 | 20902 | | 23188 |
| 25475 | 16331 | 27761 | 18617 | 30047 | 20903 | | 23189 |
| 25476 | 16332 | 27762 | 18618 | 30048 | 20904 | | 23190 |
| 25477 | 16333 | 27763 | 18619 | 30049 | 20905 | | 23191 |
| 25478 | 16334 | 27764 | 18620 | 30050 | 20906 | | 23192 |
| 25479 | 16335 | 27765 | 18621 | 30051 | 20907 | | 23193 |
| 25480 | 16336 | 27766 | 18622 | 30052 | 20908 | | 23194 |
| 25481 | 16337 | 27767 | 18623 | 30053 | 20909 | | 23195 |
| 25482 | 16338 | 27768 | 18624 | 30054 | 20910 | | 23196 |
| 25483 | 16339 | 27769 | 18625 | 30055 | 20911 | | 23197 |
| 25484 | 16340 | 27770 | 18626 | 30056 | 20912 | | 23198 |
| 25485 | 16341 | 27771 | 18627 | 30057 | 20913 | | 23199 |
| 25486 | 16342 | 27772 | 18628 | 30058 | 20914 | | 23200 |
| 25487 | 16343 | 27773 | 18629 | 30059 | 20915 | | 23201 |
| 25488 | 16344 | 27774 | 18630 | 30060 | 20916 | | 23202 |
| 25489 | 16345 | 27775 | 18631 | 30061 | 20917 | | 23203 |
| 25490 | 16346 | 27776 | 18632 | 30062 | 20918 | | 23204 |
| 25491 | 16347 | 27777 | 18633 | 30063 | 20919 | | 23205 |
| 25492 | 16348 | 27778 | 18634 | 30064 | 20920 | | 23206 |
| 25493 | 16349 | 27779 | 18635 | 30065 | 20921 | | 23207 |
| 25494 | 16350 | 27780 | 18636 | 30066 | 20922 | | 23208 |
| 25495 | 16351 | 27781 | 18637 | 30067 | 20923 | | 23209 |
| 25496 | 16352 | 27782 | 18638 | 30068 | 20924 | | 23210 |
| 25497 | 16353 | 27783 | 18639 | 30069 | 20925 | | 23211 |
| 25498 | 16354 | 27784 | 18640 | 30070 | 20926 | | 23212 |
| 25499 | 16355 | 27785 | 18641 | 30071 | 20927 | | 23213 |
| 25500 | 16356 | 27786 | 18642 | 30072 | 20928 | | 23214 |
| 25501 | 16357 | 27787 | 18643 | 30073 | 20929 | | 23215 |
| 25502 | 16358 | 27788 | 18644 | 30074 | 20930 | | 23216 |
| 25503 | 16359 | 27789 | 18645 | 30075 | 20931 | | 23217 |
| 25504 | 16360 | 27790 | 18646 | 30076 | 20932 | | 23218 |
| 25505 | 16361 | 27791 | 18647 | 30077 | 20933 | | 23219 |
| 25506 | 16362 | 27792 | 18648 | 30078 | 20934 | | 23220 |
| 25507 | 16363 | 27793 | 18649 | 30079 | 20935 | | 23221 |
| 25508 | 16364 | 27794 | 18650 | 30080 | 20936 | | 23222 |
| 25509 | 16365 | 27795 | 18651 | 30081 | 20937 | | 23223 |
| 25510 | 16366 | 27796 | 18652 | 30082 | 20938 | | 23224 |
| 25511 | 16367 | 27797 | 18653 | 30083 | 20939 | | 23225 |
| 25512 | 16368 | 27798 | 18654 | 30084 | 20940 | | 23226 |
| 25513 | 16369 | 27799 | 18655 | 30085 | 20941 | | 23227 |
| 25514 | 16370 | 27800 | 18656 | 30086 | 20942 | | 23228 |
| 25515 | 16371 | 27801 | 18657 | 30087 | 20943 | | 23229 |
| 25516 | 16372 | 27802 | 18658 | 30088 | 20944 | | 23230 |
| 25517 | 16373 | 27803 | 18659 | 30089 | 20945 | | 23231 |
| 25518 | 16374 | 27804 | 18660 | 30090 | 20946 | | 23232 |
| 25519 | 16375 | 27805 | 18661 | 30091 | 20947 | | 23233 |
| 25520 | 16376 | 27806 | 18662 | 30092 | 20948 | | 23234 |
| 25521 | 16377 | 27807 | 18663 | 30093 | 20949 | | 23235 |
| 25522 | 16378 | 27808 | 18664 | 30094 | 20950 | | 23236 |
| 25523 | 16379 | 27809 | 18665 | 30095 | 20951 | | 23237 |
| 25524 | 16380 | 27810 | 18666 | 30096 | 20952 | | 23238 |
| 25525 | 16381 | 27811 | 18667 | 30097 | 20953 | | 23239 |
| 25526 | 16382 | 27812 | 18668 | 30098 | 20954 | | 23240 |
| 25527 | 16383 | 27813 | 18669 | 30099 | 20955 | | 23241 |
| 25528 | 16384 | 27814 | 18670 | 30100 | 20956 | | 23242 |
| 25529 | 16385 | 27815 | 18671 | 30101 | 20957 | | 23243 |
| 25530 | 16386 | 27816 | 18672 | 30102 | 20958 | | 23244 |
| 25531 | 16387 | 27817 | 18673 | 30103 | 20959 | | 23245 |
| 25532 | 16388 | 27818 | 18674 | 30104 | 20960 | | 23246 |
| 25533 | 16389 | 27819 | 18675 | 30105 | 20961 | | 23247 |
| 25534 | 16390 | 27820 | 18676 | 30106 | 20962 | | 23248 |
| 25535 | 16391 | 27821 | 18677 | 30107 | 20963 | | 23249 |
| 25536 | 16392 | 27822 | 18678 | 30108 | 20964 | | 23250 |
| 25537 | 16393 | 27823 | 18679 | 30109 | 20965 | | 23251 |
| 25538 | 16394 | 27824 | 18680 | 30110 | 20966 | | 23252 |
| 25539 | 16395 | 27825 | 18681 | 30111 | 20967 | | 23253 |
| 25540 | 16396 | 27826 | 18682 | 30112 | 20968 | | 23254 |
| 25541 | 16397 | 27827 | 18683 | 30113 | 20969 | | 23255 |
| 25542 | 16398 | 27828 | 18684 | 30114 | 20970 | | 23256 |
| 25543 | 16399 | 27829 | 18685 | 30115 | 20971 | | 23257 |
| 25544 | 16400 | 27830 | 18686 | 30116 | 20972 | | 23258 |
| 25545 | 16401 | 27831 | 18687 | 30117 | 20973 | | 23259 |
| 25546 | 16402 | 27832 | 18688 | 30118 | 20974 | | 23260 |
| 25547 | 16403 | 27833 | 18689 | 30119 | 20975 | | 23261 |
| 25548 | 16404 | 27834 | 18690 | 30120 | 20976 | | 23262 |
| 25549 | 16405 | 27835 | 18691 | 30121 | 20977 | | 23263 |
| 25550 | 16406 | 27836 | 18692 | 30122 | 20978 | | 23264 |
| 25551 | 16407 | 27837 | 18693 | 30123 | 20979 | | 23265 |
| 25552 | 16408 | 27838 | 18694 | 30124 | 20980 | | 23266 |
| 25553 | 16409 | 27839 | 18695 | 30125 | 20981 | | 23267 |
| 25554 | 16410 | 27840 | 18696 | 30126 | 20982 | | 23268 |
| 25555 | 16411 | 27841 | 18697 | 30127 | 20983 | | 23269 |
| 25556 | 16412 | 27842 | 18698 | 30128 | 20984 | | 23270 |
| 25557 | 16413 | 27843 | 18699 | 30129 | 20985 | | 23271 |
| 25558 | 16414 | 27844 | 18700 | 30130 | 20986 | | 23272 |
| 25559 | 16415 | 27845 | 18701 | 30131 | 20987 | | 23273 |
| 25560 | 16416 | 27846 | 18702 | 30132 | 20988 | | 23274 |
| 25561 | 16417 | 27847 | 18703 | 30133 | 20989 | | 23275 |
| 25562 | 16418 | 27848 | 18704 | 30134 | 20990 | | 23276 |
| 25563 | 16419 | 27849 | 18705 | 30135 | 20991 | | 23277 |
| 25564 | 16420 | 27850 | 18706 | 30136 | 20992 | | 23278 |
| 25565 | 16421 | 27851 | 18707 | 30137 | 20993 | | 23279 |
| 25566 | 16422 | 27852 | 18708 | 30138 | 20994 | | 23280 |
| 25567 | 16423 | 27853 | 18709 | 30139 | 20995 | | 23281 |
| 25568 | 16424 | 27854 | 18710 | 30140 | 20996 | | 23282 |
| 25569 | 16425 | 27855 | 18711 | 30141 | 20997 | | 23283 |
| 25570 | 16426 | 27856 | 18712 | 30142 | 20998 | | 23284 |
| 25571 | 16427 | 27857 | 18713 | 30143 | 20999 | | 23285 |
| 25572 | 16428 | 27858 | 18714 | 30144 | 21000 | | 23286 |
| 25573 | 16429 | 27859 | 18715 | 30145 | 21001 | | 23287 |
| 25574 | 16430 | 27860 | 18716 | 30146 | 21002 | | 23288 |
| 25575 | 16431 | 27861 | 18717 | 30147 | 21003 | | 23289 |
| 25576 | 16432 | 27862 | 18718 | 30148 | 21004 | | 23290 |
| 25577 | 16433 | 27863 | 18719 | 30149 | 21005 | | 23291 |
| 25578 | 16434 | 27864 | 18720 | 30150 | 21006 | | 23292 |
| 25579 | 16435 | 27865 | 18721 | 30151 | 21007 | | 23293 |
| 25580 | 16436 | 27866 | 18722 | 30152 | 21008 | | 23294 |
| 25581 | 16437 | 27867 | 18723 | 30153 | 21009 | | 23295 |
| 25582 | 16438 | 27868 | 18724 | 30154 | 21010 | | 23296 |
| 25583 | 16439 | 27869 | 18725 | 30155 | 21011 | | 23297 |
| 25584 | 16440 | 27870 | 18726 | 30156 | 21012 | | 23298 |
| 25585 | 16441 | 27871 | 18727 | 30157 | 21013 | | 23299 |
| 25586 | 16442 | 27872 | 18728 | 30158 | 21014 | | 23300 |
| 25587 | 16443 | 27873 | 18729 | 30159 | 21015 | | 23301 |
| 25588 | 16444 | 27874 | 18730 | 30160 | 21016 | | 23302 |
| 25589 | 16445 | 27875 | 18731 | 30161 | 21017 | | 23303 |
| 25590 | 16446 | 27876 | 18732 | 30162 | 21018 | | 23304 |
| 25591 | 16447 | 27877 | 18733 | 30163 | 21019 | | 23305 |
| 25592 | 16448 | 27878 | 18734 | 30164 | 21020 | | 23306 |
| 25593 | 16449 | 27879 | 18735 | 30165 | 21021 | | 23307 |
| 25594 | 16450 | 27880 | 18736 | 30166 | 21022 | | 23308 |
| 25595 | 16451 | 27881 | 18737 | 30167 | 21023 | | 23309 |
| 25596 | 16452 | 27882 | 18738 | 30168 | 21024 | | 23310 |
| 25597 | 16453 | 27883 | 18739 | 30169 | 21025 | | 23311 |
| 25598 | 16454 | 27884 | 18740 | 30170 | 21026 | | 23312 |
| 25599 | 16455 | 27885 | 18741 | 30171 | 21027 | | 23313 |
| 25600 | 16456 | 27886 | 18742 | 30172 | 21028 | | 23314 |
| 25601 | 16457 | 27887 | 18743 | 30173 | 21029 | | 23315 |
| 25602 | 16458 | 27888 | 18744 | 30174 | 21030 | | 23316 |
| 25603 | 16459 | 27889 | 18745 | 30175 | 21031 | | 23317 |
| 25604 | 16460 | 27890 | 18746 | 30176 | 21032 | | 23318 |
| 25605 | 16461 | 27891 | 18747 | 30177 | 21033 | | 23319 |
| 25606 | 16462 | 27892 | 18748 | 30178 | 21034 | | 23320 |
| 25607 | 16463 | 27893 | 18749 | 30179 | 21035 | | 23321 |
| 25608 | 16464 | 27894 | 18750 | 30180 | 21036 | | 23322 |
| 25609 | 16465 | 27895 | 18751 | 30181 | 21037 | | 23323 |
| 25610 | 16466 | 27896 | 18752 | 30182 | 21038 | | 23324 |
| 25611 | 16467 | 27897 | 18753 | 30183 | 21039 | | 23325 |
| 25612 | 16468 | 27898 | 18754 | 30184 | 21040 | | 23326 |
| 25613 | 16469 | 27899 | 18755 | 30185 | 21041 | | 23327 |
| 25614 | 16470 | 27900 | 18756 | 30186 | 21042 | | 23328 |
| 25615 | 16471 | 27901 | 18757 | 30187 | 21043 | | 23329 |
| 25616 | 16472 | 27902 | 18758 | 30188 | 21044 | | 23330 |
| 25617 | 16473 | 27903 | 18759 | 30189 | 21045 | | 23331 |
| 25618 | 16474 | 27904 | 18760 | 30190 | 21046 | | 23332 |
| 25619 | 16475 | 27905 | 18761 | 30191 | 21047 | | 23333 |
| 25620 | 16476 | 27906 | 18762 | 30192 | 21048 | | 23334 |
| 25621 | 16477 | 27907 | 18763 | 30193 | 21049 | | 23335 |
| 25622 | 16478 | 27908 | 18764 | 30194 | 21050 | | 23336 |
| 25623 | 16479 | 27909 | 18765 | 30195 | 21051 | | 23337 |
| 25624 | 16480 | 27910 | 18766 | 30196 | 21052 | | 23338 |
| 25625 | 16481 | 27911 | 18767 | 30197 | 21053 | | 23339 |
| 25626 | 16482 | 27912 | 18768 | 30198 | 21054 | | 23340 |
| 25627 | 16483 | 27913 | 18769 | 30199 | 21055 | | 23341 |
| 25628 | 16484 | 27914 | 18770 | 30200 | 21056 | | 23342 |
| 25629 | 16485 | 27915 | 18771 | 30201 | 21057 | | 23343 |
| 25630 | 16486 | 27916 | 18772 | 30202 | 21058 | | 23344 |
| 25631 | 16487 | 27917 | 18773 | 30203 | 21059 | | 23345 |
| 25632 | 16488 | 27918 | 18774 | 30204 | 21060 | | 23346 |
| 25633 | 16489 | 27919 | 18775 | 30205 | 21061 | | 23347 |
| 25634 | 16490 | 27920 | 18776 | 30206 | 21062 | | 23348 |
| 25635 | 16491 | 27921 | 18777 | 30207 | 21063 | | 23349 |
| 25636 | 16492 | 27922 | 18778 | 30208 | 21064 | | 23350 |
| 25637 | 16493 | 27923 | 18779 | 30209 | 21065 | | 23351 |
| 25638 | 16494 | 27924 | 18780 | 30210 | 21066 | | 23352 |
| 25639 | 16495 | 27925 | 18781 | 30211 | 21067 | | 23353 |
| 25640 | 16496 | 27926 | 18782 | 30212 | 21068 | | 23354 |
| 25641 | 16497 | 27927 | 18783 | 30213 | 21069 | | 23355 |
| 25642 | 16498 | 27928 | 18784 | 30214 | 21070 | | 23356 |
| 25643 | 16499 | 27929 | 18785 | 30215 | 21071 | | 23357 |
| 25644 | 16500 | 27930 | 18786 | 30216 | 21072 | | 23358 |
| 25645 | 16501 | 27931 | 18787 | 30217 | 21073 | | 23359 |
| 25646 | 16502 | 27932 | 18788 | 30218 | 21074 | | 23360 |
| 25647 | 16503 | 27933 | 18789 | 30219 | 21075 | | 23361 |
| 25648 | 16504 | 27934 | 18790 | 30220 | 21076 | | 23362 |
| 25649 | 16505 | 27935 | 18791 | 30221 | 21077 | | 23363 |
| 25650 | 16506 | 27936 | 18792 | 30222 | 21078 | | 23364 |
| 25651 | 16507 | 27937 | 18793 | 30223 | 21079 | | 23365 |
| 25652 | 16508 | 27938 | 18794 | 30224 | 21080 | | 23366 |
| 25653 | 16509 | 27939 | 18795 | 30225 | 21081 | | 23367 |
| 25654 | 16510 | 27940 | 18796 | 30226 | 21082 | | 23368 |
| 25655 | 16511 | 27941 | 18797 | 30227 | 21083 | | 23369 |
| 25656 | 16512 | 27942 | 18798 | 30228 | 21084 | | 23370 |
| 25657 | 16513 | 27943 | 18799 | 30229 | 21085 | | 23371 |
| 25658 | 16514 | 27944 | 18800 | 30230 | 21086 | | 23372 |
| 25659 | 16515 | 27945 | 18801 | 30231 | 21087 | | 23373 |
| 25660 | 16516 | 27946 | 18802 | 30232 | 21088 | | 23374 |
| 25661 | 16517 | 27947 | 18803 | 30233 | 21089 | | 23375 |
| 25662 | 16518 | 27948 | 18804 | 30234 | 21090 | | 23376 |
| 25663 | 16519 | 27949 | 18805 | 30235 | 21091 | | 23377 |
| 25664 | 16520 | 27950 | 18806 | 30236 | 21092 | | 23378 |
| 25665 | 16521 | 27951 | 18807 | 30237 | 21093 | | 23379 |
| 25666 | 16522 | 27952 | 18808 | 30238 | 21094 | | 23380 |
| 25667 | 16523 | 27953 | 18809 | 30239 | 21095 | | 23381 |
| 25668 | 16524 | 27954 | 18810 | 30240 | 21096 | | 23382 |
| 25669 | 16525 | 27955 | 18811 | 30241 | 21097 | | 23383 |
| 25670 | 16526 | 27956 | 18812 | 30242 | 21098 | | 23384 |
| 25671 | 16527 | 27957 | 18813 | 30243 | 21099 | | 23385 |
| 25672 | 16528 | 27958 | 18814 | 30244 | 21100 | | 23386 |
| 25673 | 16529 | 27959 | 18815 | 30245 | 21101 | | 23387 |
| 25674 | 16530 | 27960 | 18816 | 30246 | 21102 | | 23388 |
| 25675 | 16531 | 27961 | 18817 | 30247 | 21103 | | 23389 |
| 25676 | 16532 | 27962 | 18818 | 30248 | 21104 | | 23390 |
| 25677 | 16533 | 27963 | 18819 | 30249 | 21105 | | 23391 |
| 25678 | 16534 | 27964 | 18820 | 30250 | 21106 | | 23392 |
| 25679 | 16535 | 27965 | 18821 | 30251 | 21107 | | 23393 |
| 25680 | 16536 | 27966 | 18822 | 30252 | 21108 | | 23394 |
| 25681 | 16537 | 27967 | 18823 | 30253 | 21109 | | 23395 |
| 25682 | 16538 | 27968 | 18824 | 30254 | 21110 | | 23396 |
| 25683 | 16539 | 27969 | 18825 | 30255 | 21111 | | 23397 |
| 25684 | 16540 | 27970 | 18826 | 30256 | 21112 | | 23398 |
| 25685 | 16541 | 27971 | 18827 | 30257 | 21113 | | 23399 |
| 25686 | 16542 | 27972 | 18828 | 30258 | 21114 | | 23400 |
| 25687 | 16543 | 27973 | 18829 | 30259 | 21115 | | 23401 |
| 25688 | 16544 | 27974 | 18830 | 30260 | 21116 | | 23402 |
| 25689 | 16545 | 27975 | 18831 | 30261 | 21117 | | 23403 |
| 25690 | 16546 | 27976 | 18832 | 30262 | 21118 | | 23404 |
| 25691 | 16547 | 27977 | 18833 | 30263 | 21119 | | 23405 |
| 25692 | 16548 | 27978 | 18834 | 30264 | 21120 | | 23406 |
| 25693 | 16549 | 27979 | 18835 | 30265 | 21121 | | 23407 |
| 25694 | 16550 | 27980 | 18836 | 30266 | 21122 | | 23408 |
| 25695 | 16551 | 27981 | 18837 | 30267 | 21123 | | 23409 |
| 25696 | 16552 | 27982 | 18838 | 30268 | 21124 | | 23410 |
| 25697 | 16553 | 27983 | 18839 | 30269 | 21125 | | 23411 |
| 25698 | 16554 | 27984 | 18840 | 30270 | 21126 | | 23412 |
| 25699 | 16555 | 27985 | 18841 | 30271 | 21127 | | 23413 |
| 25700 | 16556 | 27986 | 18842 | 30272 | 21128 | | 23414 |
| 25701 | 16557 | 27987 | 18843 | 30273 | 21129 | | 23415 |
| 25702 | 16558 | 27988 | 18844 | 30274 | 21130 | | 23416 |
| 25703 | 16559 | 27989 | 18845 | 30275 | 21131 | | 23417 |
| 25704 | 16560 | 27990 | 18846 | 30276 | 21132 | | 23418 |
| 25705 | 16561 | 27991 | 18847 | 30277 | 21133 | | 23419 |
| 25706 | 16562 | 27992 | 18848 | 30278 | 21134 | | 23420 |
| 25707 | 16563 | 27993 | 18849 | 30279 | 21135 | | 23421 |
| 25708 | 16564 | 27994 | 18850 | 30280 | 21136 | | 23422 |
| 25709 | 16565 | 27995 | 18851 | 30281 | 21137 | | 23423 |
| 25710 | 16566 | 27996 | 18852 | 30282 | 21138 | | 23424 |
| 25711 | 16567 | 27997 | 18853 | 30283 | 21139 | | 23425 |
| 25712 | 16568 | 27998 | 18854 | 30284 | 21140 | | 23426 |
| 25713 | 16569 | 27999 | 18855 | 30285 | 21141 | | 23427 |
| 25714 | 16570 | 28000 | 18856 | 30286 | 21142 | | 23428 |
| 25715 | 16571 | 28001 | 18857 | 30287 | 21143 | | 23429 |
| 25716 | 16572 | 28002 | 18858 | 30288 | 21144 | | 23430 |
| 25717 | 16573 | 28003 | 18859 | 30289 | 21145 | | 23431 |
| 25718 | 16574 | 28004 | 18860 | 30290 | 21146 | | 23432 |
| 25719 | 16575 | 28005 | 18861 | 30291 | 21147 | | 23433 |
| 25720 | 16576 | 28006 | 18862 | 30292 | 21148 | | 23434 |
| 25721 | 16577 | 28007 | 18863 | 30293 | 21149 | | 23435 |
| 25722 | 16578 | 28008 | 18864 | 30294 | 21150 | | 23436 |
| 25723 | 16579 | 28009 | 18865 | 30295 | 21151 | | 23437 |
| 25724 | 16580 | 28010 | 18866 | 30296 | 21152 | | 23438 |
| 25725 | 16581 | 28011 | 18867 | 30297 | 21153 | | 23439 |
| 25726 | 16582 | 28012 | 18868 | 30298 | 21154 | | 23440 |
| 25727 | 16583 | 28013 | 18869 | 30299 | 21155 | | 23441 |
| 25728 | 16584 | 28014 | 18870 | 30300 | 21156 | | 23442 |
| 25729 | 16585 | 28015 | 18871 | 30301 | 21157 | | 23443 |
| 25730 | 16586 | 28016 | 18872 | 30302 | 21158 | | 23444 |
| 25731 | 16587 | 28017 | 18873 | 30303 | 21159 | | 23445 |
| 25732 | 16588 | 28018 | 18874 | 30304 | 21160 | | 23446 |
| 25733 | 16589 | 28019 | 18875 | 30305 | 21161 | | 23447 |
| 25734 | 16590 | 28020 | 18876 | 30306 | 21162 | | 23448 |
| 25735 | 16591 | 28021 | 18877 | 30307 | 21163 | | 23449 |
| 25736 | 16592 | 28022 | 18878 | 30308 | 21164 | | 23450 |
| 25737 | 16593 | 28023 | 18879 | 30309 | 21165 | | 23451 |
| 25738 | 16594 | 28024 | 18880 | 30310 | 21166 | | 23452 |
| 25739 | 16595 | 28025 | 18881 | 30311 | 21167 | | 23453 |
| 25740 | 16596 | 28026 | 18882 | 30312 | 21168 | | 23454 |
| 25741 | 16597 | 28027 | 18883 | 30313 | 21169 | | 23455 |
| 25742 | 16598 | 28028 | 18884 | 30314 | 21170 | | 23456 |
| 25743 | 16599 | 28029 | 18885 | 30315 | 21171 | | 23457 |
| 25744 | 16600 | 28030 | 18886 | 30316 | 21172 | | 23458 |
| 25745 | 16601 | 28031 | 18887 | 30317 | 21173 | | 23459 |
| 25746 | 16602 | 28032 | 18888 | 30318 | 21174 | | 23460 |
| 25747 | 16603 | 28033 | 18889 | 30319 | 21175 | | 23461 |
| 25748 | 16604 | 28034 | 18890 | 30320 | 21176 | | 23462 |
| 25749 | 16605 | 28035 | 18891 | 30321 | 21177 | | 23463 |
| 25750 | 16606 | 28036 | 18892 | 30322 | 21178 | | 23464 |
| 25751 | 16607 | 28037 | 18893 | 30323 | 21179 | | 23465 |
| 25752 | 16608 | 28038 | 18894 | 30324 | 21180 | | 23466 |
| 25753 | 16609 | 28039 | 18895 | 30325 | 21181 | | 23467 |
| 25754 | 16610 | 28040 | 18896 | 30326 | 21182 | | 23468 |
| 25755 | 16611 | 28041 | 18897 | 30327 | 21183 | | 23469 |
| 25756 | 16612 | 28042 | 18898 | 30328 | 21184 | | 23470 |
| 25757 | 16613 | 28043 | 18899 | 30329 | 21185 | | 23471 |
| 25758 | 16614 | 28044 | 18900 | 30330 | 21186 | | 23472 |
| 25759 | 16615 | 28045 | 18901 | 30331 | 21187 | | 23473 |
| 25760 | 16616 | 28046 | 18902 | 30332 | 21188 | | 23474 |
| 25761 | 16617 | 28047 | 18903 | 30333 | 21189 | | 23475 |
| 25762 | 16618 | 28048 | 18904 | 30334 | 21190 | | 23476 |
| 25763 | 16619 | 28049 | 18905 | 30335 | 21191 | | 23477 |
| 25764 | 16620 | 28050 | 18906 | 30336 | 21192 | | 23478 |
| 25765 | 16621 | 28051 | 18907 | 30337 | 21193 | | 23479 |
| 25766 | 16622 | 28052 | 18908 | 30338 | 21194 | | 23480 |
| 25767 | 16623 | 28053 | 18909 | 30339 | 21195 | | 23481 |
| 25768 | 16624 | 28054 | 18910 | 30340 | 21196 | | 23482 |
| 25769 | 16625 | 28055 | 18911 | 30341 | 21197 | | 23483 |
| 25770 | 16626 | 28056 | 18912 | 30342 | 21198 | | 23484 |
| 25771 | 16627 | 28057 | 18913 | 30343 | 21199 | | 23485 |
| 25772 | 16628 | 28058 | 18914 | 30344 | 21200 | | 23486 |
| 25773 | 16629 | 28059 | 18915 | 30345 | 21201 | | 23487 |
| 25774 | 16630 | 28060 | 18916 | 30346 | 21202 | | 23488 |
| 25775 | 16631 | 28061 | 18917 | 30347 | 21203 | | 23489 |
| 25776 | 16632 | 28062 | 18918 | 30348 | 21204 | | 23490 |
| 25777 | 16633 | 28063 | 18919 | 30349 | 21205 | | 23491 |
| 25778 | 16634 | 28064 | 18920 | 30350 | 21206 | | 23492 |
| 25779 | 16635 | 28065 | 18921 | 30351 | 21207 | | 23493 |
| 25780 | 16636 | 28066 | 18922 | 30352 | 21208 | | 23494 |
| 25781 | 16637 | 28067 | 18923 | 30353 | 21209 | | 23495 |
| 25782 | 16638 | 28068 | 18924 | 30354 | 21210 | | 23496 |
| 25783 | 16639 | 28069 | 18925 | 30355 | 21211 | | 23497 |
| 25784 | 16640 | 28070 | 18926 | 30356 | 21212 | | 23498 |
| 25785 | 16641 | 28071 | 18927 | 30357 | 21213 | | 23499 |
| 25786 | 16642 | 28072 | 18928 | 30358 | 21214 | | 23500 |
| 25787 | 16643 | 28073 | 18929 | 30359 | 21215 | | 23501 |
| 25788 | 16644 | 28074 | 18930 | 30360 | 21216 | | 23502 |
| 25789 | 16645 | 28075 | 18931 | 30361 | 21217 | | 23503 |
| 25790 | 16646 | 28076 | 18932 | 30362 | 21218 | | 23504 |
| 25791 | 16647 | 28077 | 18933 | 30363 | 21219 | | 23505 |
| 25792 | 16648 | 28078 | 18934 | 30364 | 21220 | | 23506 |
| 25793 | 16649 | 28079 | 18935 | 30365 | 21221 | | 23507 |
| 25794 | 16650 | 28080 | 18936 | 30366 | 21222 | | 23508 |
| 25795 | 16651 | 28081 | 18937 | 30367 | 21223 | | 23509 |
| 25796 | 16652 | 28082 | 18938 | 30368 | 21224 | | 23510 |
| 25797 | 16653 | 28083 | 18939 | 30369 | 21225 | | 23511 |
| 25798 | 16654 | 28084 | 18940 | 30370 | 21226 | | 23512 |
| 25799 | 16655 | 28085 | 18941 | 30371 | 21227 | | 23513 |
| 25800 | 16656 | 28086 | 18942 | 30372 | 21228 | | 23514 |
| 25801 | 16657 | 28087 | 18943 | 30373 | 21229 | | 23515 |
| 25802 | 16658 | 28088 | 18944 | 30374 | 21230 | | 23516 |
| 25803 | 16659 | 28089 | 18945 | 30375 | 21231 | | 23517 |
| 25804 | 16660 | 28090 | 18946 | 30376 | 21232 | | 23518 |
| 25805 | 16661 | 28091 | 18947 | 30377 | 21233 | | 23519 |
| 25806 | 16662 | 28092 | 18948 | 30378 | 21234 | | 23520 |
| 25807 | 16663 | 28093 | 18949 | 30379 | 21235 | | 23521 |
| 25808 | 16664 | 28094 | 18950 | 30380 | 21236 | | 23522 |
| 25809 | 16665 | 28095 | 18951 | 30381 | 21237 | | 23523 |
| 25810 | 16666 | 28096 | 18952 | 30382 | 21238 | | 23524 |
| 25811 | 16667 | 28097 | 18953 | 30383 | 21239 | | 23525 |
| 25812 | 16668 | 28098 | 18954 | 30384 | 21240 | | 23526 |
| 25813 | 16669 | 28099 | 18955 | 30385 | 21241 | | 23527 |
| 25814 | 16670 | 28100 | 18956 | 30386 | 21242 | | 23528 |
| 25815 | 16671 | 28101 | 18957 | 30387 | 21243 | | 23529 |
| 25816 | 16672 | 28102 | 18958 | 30388 | 21244 | | 23530 |
| 25817 | 16673 | 28103 | 18959 | 30389 | 21245 | | 23531 |
| 25818 | 16674 | 28104 | 18960 | 30390 | 21246 | | 23532 |
| 25819 | 16675 | 28105 | 18961 | 30391 | 21247 | | 23533 |
| 25820 | 16676 | 28106 | 18962 | 30392 | 21248 | | 23534 |
| 25821 | 16677 | 28107 | 18963 | 30393 | 21249 | | 23535 |
| 25822 | 16678 | 28108 | 18964 | 30394 | 21250 | | 23536 |
| 25823 | 16679 | 28109 | 18965 | 30395 | 21251 | | 23537 |
| 25824 | 16680 | 28110 | 18966 | 30396 | 21252 | | 23538 |
| 25825 | 16681 | 28111 | 18967 | 30397 | 21253 | | 23539 |
| 25826 | 16682 | 28112 | 18968 | 30398 | 21254 | | 23540 |
| 25827 | 16683 | 28113 | 18969 | 30399 | 21255 | | 23541 |
| 25828 | 16684 | 28114 | 18970 | 30400 | 21256 | | 23542 |
| 25829 | 16685 | 28115 | 18971 | 30401 | 21257 | | 23543 |
| 25830 | 16686 | 28116 | 18972 | 30402 | 21258 | | 23544 |
| 25831 | 16687 | 28117 | 18973 | 30403 | 21259 | | 23545 |
| 25832 | 16688 | 28118 | 18974 | 30404 | 21260 | | 23546 |
| 25833 | 16689 | 28119 | 18975 | 30405 | 21261 | | 23547 |
| 25834 | 16690 | 28120 | 18976 | 30406 | 21262 | | 23548 |
| 25835 | 16691 | 28121 | 18977 | 30407 | 21263 | | 23549 |
| 25836 | 16692 | 28122 | 18978 | 30408 | 21264 | | 23550 |
| 25837 | 16693 | 28123 | 18979 | 30409 | 21265 | | 23551 |
| 25838 | 16694 | 28124 | 18980 | 30410 | 21266 | | 23552 |
| 25839 | 16695 | 28125 | 18981 | 30411 | 21267 | | 23553 |
| 25840 | 16696 | 28126 | 18982 | 30412 | 21268 | | 23554 |
| 25841 | 16697 | 28127 | 18983 | 30413 | 21269 | | 23555 |
| 25842 | 16698 | 28128 | 18984 | 30414 | 21270 | | 23556 |
| 25843 | 16699 | 28129 | 18985 | 30415 | 21271 | | 23557 |
| 25844 | 16700 | 28130 | 18986 | 30416 | 21272 | | 23558 |
| 25845 | 16701 | 28131 | 18987 | 30417 | 21273 | | 23559 |
| 25846 | 16702 | 28132 | 18988 | 30418 | 21274 | | 23560 |
| 25847 | 16703 | 28133 | 18989 | 30419 | 21275 | | 23561 |
| 25848 | 16704 | 28134 | 18990 | 30420 | 21276 | | 23562 |
| 25849 | 16705 | 28135 | 18991 | 30421 | 21277 | | 23563 |
| 25850 | 16706 | 28136 | 18992 | 30422 | 21278 | | 23564 |
| 25851 | 16707 | 28137 | 18993 | 30423 | 21279 | | 23565 |
| 25852 | 16708 | 28138 | 18994 | 30424 | 21280 | | 23566 |
| 25853 | 16709 | 28139 | 18995 | 30425 | 21281 | | 23567 |
| 25854 | 16710 | 28140 | 18996 | 30426 | 21282 | | 23568 |
| 25855 | 16711 | 28141 | 18997 | 30427 | 21283 | | 23569 |
| 25856 | 16712 | 28142 | 18998 | 30428 | 21284 | | 23570 |
| 25857 | 16713 | 28143 | 18999 | 30429 | 21285 | | 23571 |
| 25858 | 16714 | 28144 | 19000 | 30430 | 21286 | | 23572 |
| 25859 | 16715 | 28145 | 19001 | 30431 | 21287 | | 23573 |
| 25860 | 16716 | 28146 | 19002 | 30432 | 21288 | | 23574 |
| 25861 | 16717 | 28147 | 19003 | 30433 | 21289 | | 23575 |
| 25862 | 16718 | 28148 | 19004 | 30434 | 21290 | | 23576 |
| 25863 | 16719 | 28149 | 19005 | 30435 | 21291 | | 23577 |
| 25864 | 16720 | 28150 | 19006 | 30436 | 21292 | | 23578 |
| 25865 | 16721 | 28151 | 19007 | 30437 | 21293 | | 23579 |
| 25866 | 16722 | 28152 | 19008 | 30438 | 21294 | | 23580 |
| 25867 | 16723 | 28153 | 19009 | 30439 | 21295 | | 23581 |
| 25868 | 16724 | 28154 | 19010 | 30440 | 21296 | | 23582 |
| 25869 | 16725 | 28155 | 19011 | 30441 | 21297 | | 23583 |
| 25870 | 16726 | 28156 | 19012 | 30442 | 21298 | | 23584 |
| 25871 | 16727 | 28157 | 19013 | 30443 | 21299 | | 23585 |
| 25872 | 16728 | 28158 | 19014 | 30444 | 21300 | | 23586 |
| 25873 | 16729 | 28159 | 19015 | 30445 | 21301 | | 23587 |
| 25874 | 16730 | 28160 | 19016 | 30446 | 21302 | | 23588 |
| 25875 | 16731 | 28161 | 19017 | 30447 | 21303 | | 23589 |
| 25876 | 16732 | 28162 | 19018 | 30448 | 21304 | | 23590 |
| 25877 | 16733 | 28163 | 19019 | 30449 | 21305 | | 23591 |
| 25878 | 16734 | 28164 | 19020 | 30450 | 21306 | | 23592 |
| 25879 | 16735 | 28165 | 19021 | 30451 | 21307 | | 23593 |
| 25880 | 16736 | 28166 | 19022 | 30452 | 21308 | | 23594 |
| 25881 | 16737 | 28167 | 19023 | 30453 | 21309 | | 23595 |
| 25882 | 16738 | 28168 | 19024 | 30454 | 21310 | | 23596 |
| 25883 | 16739 | 28169 | 19025 | 30455 | 21311 | | 23597 |
| 25884 | 16740 | 28170 | 19026 | 30456 | 21312 | | 23598 |
| 25885 | 16741 | 28171 | 19027 | 30457 | 21313 | | 23599 |
| 25886 | 16742 | 28172 | 19028 | 30458 | 21314 | | 23600 |
| 25887 | 16743 | 28173 | 19029 | 30459 | 21315 | | 23601 |
| 25888 | 16744 | 28174 | 19030 | 30460 | 21316 | | 23602 |
| 25889 | 16745 | 28175 | 19031 | 30461 | 21317 | | 23603 |
| 25890 | 16746 | 28176 | 19032 | 30462 | 21318 | | 23604 |
| 25891 | 16747 | 28177 | 19033 | 30463 | 21319 | | 23605 |
| 25892 | 16748 | 28178 | 19034 | 30464 | 21320 | | 23606 |
| 25893 | 16749 | 28179 | 19035 | 30465 | 21321 | | 23607 |
| 25894 | 16750 | 28180 | 19036 | 30466 | 21322 | | 23608 |
| 25895 | 16751 | 28181 | 19037 | 30467 | 21323 | | 23609 |
| 25896 | 16752 | 28182 | 19038 | 30468 | 21324 | | 23610 |
| 25897 | 16753 | 28183 | 19039 | 30469 | 21325 | | 23611 |
| 25898 | 16754 | 28184 | 19040 | 30470 | 21326 | | 23612 |
| 25899 | 16755 | 28185 | 19041 | 30471 | 21327 | | 23613 |
| 25900 | 16756 | 28186 | 19042 | 30472 | 21328 | | 23614 |
| 25901 | 16757 | 28187 | 19043 | 30473 | 21329 | | 23615 |
| 25902 | 16758 | 28188 | 19044 | 30474 | 21330 | | 23616 |
| 25903 | 16759 | 28189 | 19045 | 30475 | 21331 | | 23617 |
| 25904 | 16760 | 28190 | 19046 | 30476 | 21332 | | 23618 |
| 25905 | 16761 | 28191 | 19047 | 30477 | 21333 | | 23619 |
| 25906 | 16762 | 28192 | 19048 | 30478 | 21334 | | 23620 |
| 25907 | 16763 | 28193 | 19049 | 30479 | 21335 | | 23621 |
| 25908 | 16764 | 28194 | 19050 | 30480 | 21336 | | 23622 |
| 25909 | 16765 | 28195 | 19051 | 30481 | 21337 | | 23623 |
| 25910 | 16766 | 28196 | 19052 | 30482 | 21338 | | 23624 |
| 25911 | 16767 | 28197 | 19053 | 30483 | 21339 | | 23625 |
| 25912 | 16768 | 28198 | 19054 | 30484 | 21340 | | 23626 |
| 25913 | 16769 | 28199 | 19055 | 30485 | 21341 | | 23627 |
| 25914 | 16770 | 28200 | 19056 | 30486 | 21342 | | 23628 |
| 25915 | 16771 | 28201 | 19057 | 30487 | 21343 | | 23629 |
| 25916 | 16772 | 28202 | 19058 | 30488 | 21344 | | 23630 |
| 25917 | 16773 | 28203 | 19059 | 30489 | 21345 | | 23631 |
| 25918 | 16774 | 28204 | 19060 | 30490 | 21346 | | 23632 |
| 25919 | 16775 | 28205 | 19061 | 30491 | 21347 | | 23633 |
| 25920 | 16776 | 28206 | 19062 | 30492 | 21348 | | 23634 |
| 25921 | 16777 | 28207 | 19063 | 30493 | 21349 | | 23635 |
| 25922 | 16778 | 28208 | 19064 | 30494 | 21350 | | 23636 |
| 25923 | 16779 | 28209 | 19065 | 30495 | 21351 | | 23637 |
| 25924 | 16780 | 28210 | 19066 | 30496 | 21352 | | 23638 |
| 25925 | 16781 | 28211 | 19067 | 30497 | 21353 | | 23639 |
| 25926 | 16782 | 28212 | 19068 | 30498 | 21354 | | 23640 |
| 25927 | 16783 | 28213 | 19069 | 30499 | 21355 | | 23641 |
| 25928 | 16784 | 28214 | 19070 | 30500 | 21356 | | 23642 |
| 25929 | 16785 | 28215 | 19071 | 30501 | 21357 | | 23643 |
| 25930 | 16786 | 28216 | 19072 | 30502 | 21358 | | 23644 |
| 25931 | 16787 | 28217 | 19073 | 30503 | 21359 | | 23645 |
| 25932 | 16788 | 28218 | 19074 | 30504 | 21360 | | 23646 |
| 25933 | 16789 | 28219 | 19075 | 30505 | 21361 | | 23647 |
| 25934 | 16790 | 28220 | 19076 | 30506 | 21362 | | 23648 |
| 25935 | 16791 | 28221 | 19077 | 30507 | 21363 | | 23649 |
| 25936 | 16792 | 28222 | 19078 | 30508 | 21364 | | 23650 |
| 25937 | 16793 | 28223 | 19079 | 30509 | 21365 | | 23651 |
| 25938 | 16794 | 28224 | 19080 | 30510 | 21366 | | 23652 |
| 25939 | 16795 | 28225 | 19081 | 30511 | 21367 | | 23653 |
| 25940 | 16796 | 28226 | 19082 | 30512 | 21368 | | 23654 |
| 25941 | 16797 | 28227 | 19083 | 30513 | 21369 | | 23655 |
| 25942 | 16798 | 28228 | 19084 | 30514 | 21370 | | 23656 |
| 25943 | 16799 | 28229 | 19085 | 30515 | 21371 | | 23657 |
| 25944 | 16800 | 28230 | 19086 | 30516 | 21372 | | 23658 |
| 25945 | 16801 | 28231 | 19087 | 30517 | 21373 | | 23659 |
| 25946 | 16802 | 28232 | 19088 | 30518 | 21374 | | 23660 |
| 25947 | 16803 | 28233 | 19089 | 30519 | 21375 | | 23661 |
| 25948 | 16804 | 28234 | 19090 | 30520 | 21376 | | 23662 |
| 25949 | 16805 | 28235 | 19091 | 30521 | 21377 | | 23663 |
| 25950 | 16806 | 28236 | 19092 | 30522 | 21378 | | 23664 |
| 25951 | 16807 | 28237 | 19093 | 30523 | 21379 | | 23665 |
| 25952 | 16808 | 28238 | 19094 | 30524 | 21380 | | 23666 |
| 25953 | 16809 | 28239 | 19095 | 30525 | 21381 | | 23667 |
| 25954 | 16810 | 28240 | 19096 | 30526 | 21382 | | 23668 |
| 25955 | 16811 | 28241 | 19097 | 30527 | 21383 | | 23669 |
| 25956 | 16812 | 28242 | 19098 | 30528 | 21384 | | 23670 |
| 25957 | 16813 | 28243 | 19099 | 30529 | 21385 | | 23671 |
| 25958 | 16814 | 28244 | 19100 | 30530 | 21386 | | 23672 |
| 25959 | 16815 | 28245 | 19101 | 30531 | 21387 | | 23673 |
| 25960 | 16816 | 28246 | 19102 | 30532 | 21388 | | 23674 |
| 25961 | 16817 | 28247 | 19103 | 30533 | 21389 | | 23675 |
| 25962 | 16818 | 28248 | 19104 | 30534 | 21390 | | 23676 |
| 25963 | 16819 | 28249 | 19105 | 30535 | 21391 | | 23677 |
| 25964 | 16820 | 28250 | 19106 | 30536 | 21392 | | 23678 |
| 25965 | 16821 | 28251 | 19107 | 30537 | 21393 | | 23679 |
| 25966 | 16822 | 28252 | 19108 | 30538 | 21394 | | 23680 |
| 25967 | 16823 | 28253 | 19109 | 30539 | 21395 | | 23681 |
| 25968 | 16824 | 28254 | 19110 | 30540 | 21396 | | 23682 |
| 25969 | 16825 | 28255 | 19111 | 30541 | 21397 | | 23683 |
| 25970 | 16826 | 28256 | 19112 | 30542 | 21398 | | 23684 |
| 25971 | 16827 | 28257 | 19113 | 30543 | 21399 | | 23685 |
| 25972 | 16828 | 28258 | 19114 | 30544 | 21400 | | 23686 |
| 25973 | 16829 | 28259 | 19115 | 30545 | 21401 | | 23687 |
| 25974 | 16830 | 28260 | 19116 | 30546 | 21402 | | 23688 |
| 25975 | 16831 | 28261 | 19117 | 30547 | 21403 | | 23689 |
| 25976 | 16832 | 28262 | 19118 | 30548 | 21404 | | 23690 |
| 25977 | 16833 | 28263 | 19119 | 30549 | 21405 | | 23691 |
| 25978 | 16834 | 28264 | 19120 | 30550 | 21406 | | 23692 |
| 25979 | 16835 | 28265 | 19121 | 30551 | 21407 | | 23693 |
| 25980 | 16836 | 28266 | 19122 | 30552 | 21408 | | 23694 |
| 25981 | 16837 | 28267 | 19123 | 30553 | 21409 | | 23695 |
| 25982 | 16838 | 28268 | 19124 | 30554 | 21410 | | 23696 |
| 25983 | 16839 | 28269 | 19125 | 30555 | 21411 | | 23697 |
| 25984 | 16840 | 28270 | 19126 | 30556 | 21412 | | 23698 |
| 25985 | 16841 | 28271 | 19127 | 30557 | 21413 | | 23699 |
| 25986 | 16842 | 28272 | 19128 | 30558 | 21414 | | 23700 |
| 25987 | 16843 | 28273 | 19129 | 30559 | 21415 | | 23701 |
| 25988 | 16844 | 28274 | 19130 | 30560 | 21416 | | 23702 |
| 25989 | 16845 | 28275 | 19131 | 30561 | 21417 | | 23703 |
| 25990 | 16846 | 28276 | 19132 | 30562 | 21418 | | 23704 |
| 25991 | 16847 | 28277 | 19133 | 30563 | 21419 | | 23705 |
| 25992 | 16848 | 28278 | 19134 | 30564 | 21420 | | 23706 |
| 25993 | 16849 | 28279 | 19135 | 30565 | 21421 | | 23707 |
| 25994 | 16850 | 28280 | 19136 | 30566 | 21422 | | 23708 |
| 25995 | 16851 | 28281 | 19137 | 30567 | 21423 | | 23709 |
| 25996 | 16852 | 28282 | 19138 | 30568 | 21424 | | 23710 |
| 25997 | 16853 | 28283 | 19139 | 30569 | 21425 | | 23711 |
| 25998 | 16854 | 28284 | 19140 | 30570 | 21426 | | 23712 |
| 25999 | 16855 | 28285 | 19141 | 30571 | 21427 | | 23713 |
| 26000 | 16856 | 28286 | 19142 | 30572 | 21428 | | 23714 |
| 26001 | 16857 | 28287 | 19143 | 30573 | 21429 | | 23715 |
| 26002 | 16858 | 28288 | 19144 | 30574 | 21430 | | 23716 |
| 26003 | 16859 | 28289 | 19145 | 30575 | 21431 | | 23717 |
| 26004 | 16860 | 28290 | 19146 | 30576 | 21432 | | 23718 |
| 26005 | 16861 | 28291 | 19147 | 30577 | 21433 | | 23719 |
| 26006 | 16862 | 28292 | 19148 | 30578 | 21434 | | 23720 |
| 26007 | 16863 | 28293 | 19149 | 30579 | 21435 | | 23721 |
| 26008 | 16864 | 28294 | 19150 | 30580 | 21436 | | 23722 |
| 26009 | 16865 | 28295 | 19151 | 30581 | 21437 | | 23723 |
| 26010 | 16866 | 28296 | 19152 | 30582 | 21438 | | 23724 |
| 26011 | 16867 | 28297 | 19153 | 30583 | 21439 | | 23725 |
| 26012 | 16868 | 28298 | 19154 | 30584 | 21440 | | 23726 |
| 26013 | 16869 | 28299 | 19155 | 30585 | 21441 | | 23727 |
| 26014 | 16870 | 28300 | 19156 | 30586 | 21442 | | 23728 |
| 26015 | 16871 | 28301 | 19157 | 30587 | 21443 | | 23729 |
| 26016 | 16872 | 28302 | 19158 | 30588 | 21444 | | 23730 |
| 26017 | 16873 | 28303 | 19159 | 30589 | 21445 | | 23731 |
| 26018 | 16874 | 28304 | 19160 | 30590 | 21446 | | 23732 |
| 26019 | 16875 | 28305 | 19161 | 30591 | 21447 | | 23733 |
| 26020 | 16876 | 28306 | 19162 | 30592 | 21448 | | 23734 |
| 26021 | 16877 | 28307 | 19163 | 30593 | 21449 | | 23735 |
| 26022 | 16878 | 28308 | 19164 | 30594 | 21450 | | 23736 |
| 26023 | 16879 | 28309 | 19165 | 30595 | 21451 | | 23737 |
| 26024 | 16880 | 28310 | 19166 | 30596 | 21452 | | 23738 |
| 26025 | 16881 | 28311 | 19167 | 30597 | 21453 | | 23739 |
| 26026 | 16882 | 28312 | 19168 | 30598 | 21454 | | 23740 |
| 26027 | 16883 | 28313 | 19169 | 30599 | 21455 | | 23741 |
| 26028 | 16884 | 28314 | 19170 | 30600 | 21456 | | 23742 |
| 26029 | 16885 | 28315 | 19171 | 30601 | 21457 | | 23743 |
| 26030 | 16886 | 28316 | 19172 | 30602 | 21458 | | 23744 |
| 26031 | 16887 | 28317 | 19173 | 30603 | 21459 | | 23745 |
| 26032 | 16888 | 28318 | 19174 | 30604 | 21460 | | 23746 |
| 26033 | 16889 | 28319 | 19175 | 30605 | 21461 | | 23747 |
| 26034 | 16890 | 28320 | 19176 | 30606 | 21462 | | 23748 |
| 26035 | 16891 | 28321 | 19177 | 30607 | 21463 | | 23749 |
| 26036 | 16892 | 28322 | 19178 | 30608 | 21464 | | 23750 |
| 26037 | 16893 | 28323 | 19179 | 30609 | 21465 | | 23751 |
| 26038 | 16894 | 28324 | 19180 | 30610 | 21466 | | 23752 |
| 26039 | 16895 | 28325 | 19181 | 30611 | 21467 | | 23753 |
| 26040 | 16896 | 28326 | 19182 | 30612 | 21468 | | 23754 |
| 26041 | 16897 | 28327 | 19183 | 30613 | 21469 | | 23755 |
| 26042 | 16898 | 28328 | 19184 | 30614 | 21470 | | 23756 |
| 26043 | 16899 | 28329 | 19185 | 30615 | 21471 | | 23757 |
| 26044 | 16900 | 28330 | 19186 | 30616 | 21472 | | 23758 |
| 26045 | 16901 | 28331 | 19187 | 30617 | 21473 | | 23759 |
| 26046 | 16902 | 28332 | 19188 | 30618 | 21474 | | 23760 |
| 26047 | 16903 | 28333 | 19189 | 30619 | 21475 | | 23761 |
| 26048 | 16904 | 28334 | 19190 | 30620 | 21476 | | 23762 |
| 26049 | 16905 | 28335 | 19191 | 30621 | 21477 | | 23763 |
| 26050 | 16906 | 28336 | 19192 | 30622 | 21478 | | 23764 |
| 26051 | 16907 | 28337 | 19193 | 30623 | 21479 | | 23765 |
| 26052 | 16908 | 28338 | 19194 | 30624 | 21480 | | 23766 |
| 26053 | 16909 | 28339 | 19195 | 30625 | 21481 | | 23767 |
| 26054 | 16910 | 28340 | 19196 | 30626 | 21482 | | 23768 |
| 26055 | 16911 | 28341 | 19197 | 30627 | 21483 | | 23769 |
| 26056 | 16912 | 28342 | 19198 | 30628 | 21484 | | 23770 |
| 26057 | 16913 | 28343 | 19199 | 30629 | 21485 | | 23771 |
| 26058 | 16914 | 28344 | 19200 | 30630 | 21486 | | 23772 |
| 26059 | 16915 | 28345 | 19201 | 30631 | 21487 | | 23773 |
| 26060 | 16916 | 28346 | 19202 | 30632 | 21488 | | 23774 |
| 26061 | 16917 | 28347 | 19203 | 30633 | 21489 | | 23775 |
| 26062 | 16918 | 28348 | 19204 | 30634 | 21490 | | 23776 |
| 26063 | 16919 | 28349 | 19205 | 30635 | 21491 | | 23777 |
| 26064 | 16920 | 28350 | 19206 | 30636 | 21492 | | 23778 |
| 26065 | 16921 | 28351 | 19207 | 30637 | 21493 | | 23779 |
| 26066 | 16922 | 28352 | 19208 | 30638 | 21494 | | 23780 |
| 26067 | 16923 | 28353 | 19209 | 30639 | 21495 | | 23781 |
| 26068 | 16924 | 28354 | 19210 | 30640 | 21496 | | 23782 |
| 26069 | 16925 | 28355 | 19211 | 30641 | 21497 | | 23783 |
| 26070 | 16926 | 28356 | 19212 | 30642 | 21498 | | 23784 |
| 26071 | 16927 | 28357 | 19213 | 30643 | 21499 | | 23785 |
| 26072 | 16928 | 28358 | 19214 | 30644 | 21500 | | 23786 |
| 26073 | 16929 | 28359 | 19215 | 30645 | 21501 | | 23787 |
| 26074 | 16930 | 28360 | 19216 | 30646 | 21502 | | 23788 |
| 26075 | 16931 | 28361 | 19217 | 30647 | 21503 | | 23789 |
| 26076 | 16932 | 28362 | 19218 | 30648 | 21504 | | 23790 |
| 26077 | 16933 | 28363 | 19219 | 30649 | 21505 | | 23791 |
| 26078 | 16934 | 28364 | 19220 | 30650 | 21506 | | 23792 |
| 26079 | 16935 | 28365 | 19221 | 30651 | 21507 | | 23793 |
| 26080 | 16936 | 28366 | 19222 | 30652 | 21508 | | 23794 |
| 26081 | 16937 | 28367 | 19223 | 30653 | 21509 | | 23795 |
| 26082 | 16938 | 28368 | 19224 | 30654 | 21510 | | 23796 |
| 26083 | 16939 | 28369 | 19225 | 30655 | 21511 | | 23797 |
| 26084 | 16940 | 28370 | 19226 | 30656 | 21512 | | 23798 |
| 26085 | 16941 | 28371 | 19227 | 30657 | 21513 | | 23799 |
| 26086 | 16942 | 28372 | 19228 | 30658 | 21514 | | 23800 |
| 26087 | 16943 | 28373 | 19229 | 30659 | 21515 | | 23801 |
| 26088 | 16944 | 28374 | 19230 | 30660 | 21516 | | 23802 |
| 26089 | 16945 | 28375 | 19231 | 30661 | 21517 | | 23803 |
| 26090 | 16946 | 28376 | 19232 | 30662 | 21518 | | 23804 |
| 26091 | 16947 | 28377 | 19233 | 30663 | 21519 | | 23805 |
| 26092 | 16948 | 28378 | 19234 | 30664 | 21520 | | 23806 |
| 26093 | 16949 | 28379 | 19235 | 30665 | 21521 | | 23807 |
| 26094 | 16950 | 28380 | 19236 | 30666 | 21522 | | 23808 |
| 26095 | 16951 | 28381 | 19237 | 30667 | 21523 | | 23809 |
| 26096 | 16952 | 28382 | 19238 | 30668 | 21524 | | 23810 |
| 26097 | 16953 | 28383 | 19239 | 30669 | 21525 | | 23811 |
| 26098 | 16954 | 28384 | 19240 | 30670 | 21526 | | 23812 |
| 26099 | 16955 | 28385 | 19241 | 30671 | 21527 | | 23813 |
| 26100 | 16956 | 28386 | 19242 | 30672 | 21528 | | 23814 |
| 26101 | 16957 | 28387 | 19243 | 30673 | 21529 | | 23815 |
| 26102 | 16958 | 28388 | 19244 | 30674 | 21530 | | 23816 |
| 26103 | 16959 | 28389 | 19245 | 30675 | 21531 | | 23817 |
| 26104 | 16960 | 28390 | 19246 | 30676 | 21532 | | 23818 |
| 26105 | 16961 | 28391 | 19247 | 30677 | 21533 | | 23819 |
| 26106 | 16962 | 28392 | 19248 | 30678 | 21534 | | 23820 |
| 26107 | 16963 | 28393 | 19249 | 30679 | 21535 | | 23821 |
| 26108 | 16964 | 28394 | 19250 | 30680 | 21536 | | 23822 |
| 26109 | 16965 | 28395 | 19251 | 30681 | 21537 | | 23823 |
| 26110 | 16966 | 28396 | 19252 | 30682 | 21538 | | 23824 |
| 26111 | 16967 | 28397 | 19253 | 30683 | 21539 | | 23825 |
| 26112 | 16968 | 28398 | 19254 | 30684 | 21540 | | 23826 |
| 26113 | 16969 | 28399 | 19255 | 30685 | 21541 | | 23827 |
| 26114 | 16970 | 28400 | 19256 | 30686 | 21542 | | 23828 |
| 26115 | 16971 | 28401 | 19257 | 30687 | 21543 | | 23829 |
| 26116 | 16972 | 28402 | 19258 | 30688 | 21544 | | 23830 |
| 26117 | 16973 | 28403 | 19259 | 30689 | 21545 | | 23831 |
| 26118 | 16974 | 28404 | 19260 | 30690 | 21546 | | 23832 |
| 26119 | 16975 | 28405 | 19261 | 30691 | 21547 | | 23833 |
| 26120 | 16976 | 28406 | 19262 | 30692 | 21548 | | 23834 |
| 26121 | 16977 | 28407 | 19263 | 30693 | 21549 | | 23835 |
| 26122 | 16978 | 28408 | 19264 | 30694 | 21550 | | 23836 |
| 26123 | 16979 | 28409 | 19265 | 30695 | 21551 | | 23837 |
| 26124 | 16980 | 28410 | 19266 | 30696 | 21552 | | 23838 |
| 26125 | 16981 | 28411 | 19267 | 30697 | 21553 | | 23839 |
| 26126 | 16982 | 28412 | 19268 | 30698 | 21554 | | 23840 |
| 26127 | 16983 | 28413 | 19269 | 30699 | 21555 | | 23841 |
| 26128 | 16984 | 28414 | 19270 | 30700 | 21556 | | 23842 |
| 26129 | 16985 | 28415 | 19271 | 30701 | 21557 | | 23843 |
| 26130 | 16986 | 28416 | 19272 | 30702 | 21558 | | 23844 |
| 26131 | 16987 | 28417 | 19273 | 30703 | 21559 | | 23845 |
| 26132 | 16988 | 28418 | 19274 | 30704 | 21560 | | 23846 |
| 26133 | 16989 | 28419 | 19275 | 30705 | 21561 | | 23847 |
| 26134 | 16990 | 28420 | 19276 | 30706 | 21562 | | 23848 |
| 26135 | 16991 | 28421 | 19277 | 30707 | 21563 | | 23849 |
| 26136 | 16992 | 28422 | 19278 | 30708 | 21564 | | 23850 |
| 26137 | 16993 | 28423 | 19279 | 30709 | 21565 | | 23851 |
| 26138 | 16994 | 28424 | 19280 | 30710 | 21566 | | 23852 |
| 26139 | 16995 | 28425 | 19281 | 30711 | 21567 | | 23853 |
| 26140 | 16996 | 28426 | 19282 | 30712 | 21568 | | 23854 |
| 26141 | 16997 | 28427 | 19283 | 30713 | 21569 | | 23855 |
| 26142 | 16998 | 28428 | 19284 | 30714 | 21570 | | 23856 |
| 26143 | 16999 | 28429 | 19285 | 30715 | 21571 | | 23857 |
| 26144 | 17000 | 28430 | 19286 | 30716 | 21572 | | 23858 |
| 26145 | 17001 | 28431 | 19287 | 30717 | 21573 | | 23859 |
| 26146 | 17002 | 28432 | 19288 | 30718 | 21574 | | 23860 |
| 26147 | 17003 | 28433 | 19289 | 30719 | 21575 | | 23861 |
| 26148 | 17004 | 28434 | 19290 | 30720 | 21576 | | 23862 |
| 26149 | 17005 | 28435 | 19291 | 30721 | 21577 | | 23863 |
| 26150 | 17006 | 28436 | 19292 | 30722 | 21578 | | 23864 |
| 26151 | 17007 | 28437 | 19293 | 30723 | 21579 | | 23865 |
| 26152 | 17008 | 28438 | 19294 | 30724 | 21580 | | 23866 |
| 26153 | 17009 | 28439 | 19295 | 30725 | 21581 | | 23867 |
| 26154 | 17010 | 28440 | 19296 | 30726 | 21582 | | 23868 |
| 26155 | 17011 | 28441 | 19297 | 30727 | 21583 | | 23869 |
| 26156 | 17012 | 28442 | 19298 | 30728 | 21584 | | 23870 |
| 26157 | 17013 | 28443 | 19299 | 30729 | 21585 | | 23871 |
| 26158 | 17014 | 28444 | 19300 | 30730 | 21586 | | 23872 |
| 26159 | 17015 | 28445 | 19301 | 30731 | 21587 | | 23873 |
| 26160 | 17016 | 28446 | 19302 | 30732 | 21588 | | 23874 |
| 26161 | 17017 | 28447 | 19303 | 30733 | 21589 | | 23875 |
| 26162 | 17018 | 28448 | 19304 | 30734 | 21590 | | 23876 |
| 26163 | 17019 | 28449 | 19305 | 30735 | 21591 | | 23877 |
| 26164 | 17020 | 28450 | 19306 | 30736 | 21592 | | 23878 |
| 26165 | 17021 | 28451 | 19307 | 30737 | 21593 | | 23879 |
| 26166 | 17022 | 28452 | 19308 | 30738 | 21594 | | 23880 |
| 26167 | 17023 | 28453 | 19309 | 30739 | 21595 | | 23881 |
| 26168 | 17024 | 28454 | 19310 | 30740 | 21596 | | 23882 |
| 26169 | 17025 | 28455 | 19311 | 30741 | 21597 | | 23883 |
| 26170 | 17026 | 28456 | 19312 | 30742 | 21598 | | 23884 |
| 26171 | 17027 | 28457 | 19313 | 30743 | 21599 | | 23885 |
| 26172 | 17028 | 28458 | 19314 | 30744 | 21600 | | 23886 |
| 26173 | 17029 | 28459 | 19315 | 30745 | 21601 | | 23887 |
| 26174 | 17030 | 28460 | 19316 | 30746 | 21602 | | 23888 |
| 26175 | 17031 | 28461 | 19317 | 30747 | 21603 | | 23889 |
| 26176 | 17032 | 28462 | 19318 | 30748 | 21604 | | 23890 |
| 26177 | 17033 | 28463 | 19319 | 30749 | 21605 | | 23891 |
| 26178 | 17034 | 28464 | 19320 | 30750 | 21606 | | 23892 |
| 26179 | 17035 | 28465 | 19321 | 30751 | 21607 | | 23893 |
| 26180 | 17036 | 28466 | 19322 | 30752 | 21608 | | 23894 |
| 26181 | 17037 | 28467 | 19323 | 30753 | 21609 | | 23895 |
| 26182 | 17038 | 28468 | 19324 | 30754 | 21610 | | 23896 |
| 26183 | 17039 | 28469 | 19325 | 30755 | 21611 | | 23897 |
| 26184 | 17040 | 28470 | 19326 | 30756 | 21612 | | 23898 |
| 26185 | 17041 | 28471 | 19327 | 30757 | 21613 | | 23899 |
| 26186 | 17042 | 28472 | 19328 | 30758 | 21614 | | 23900 |
| 26187 | 17043 | 28473 | 19329 | 30759 | 21615 | | 23901 |
| 26188 | 17044 | 28474 | 19330 | 30760 | 21616 | | 23902 |
| 26189 | 17045 | 28475 | 19331 | 30761 | 21617 | | 23903 |
| 26190 | 17046 | 28476 | 19332 | 30762 | 21618 | | 23904 |
| 26191 | 17047 | 28477 | 19333 | 30763 | 21619 | | 23905 |
| 26192 | 17048 | 28478 | 19334 | 30764 | 21620 | | 23906 |
| 26193 | 17049 | 28479 | 19335 | 30765 | 21621 | | 23907 |
| 26194 | 17050 | 28480 | 19336 | 30766 | 21622 | | 23908 |
| 26195 | 17051 | 28481 | 19337 | 30767 | 21623 | | 23909 |
| 26196 | 17052 | 28482 | 19338 | 30768 | 21624 | | 23910 |
| 26197 | 17053 | 28483 | 19339 | 30769 | 21625 | | 23911 |
| 26198 | 17054 | 28484 | 19340 | 30770 | 21626 | | 23912 |
| 26199 | 17055 | 28485 | 19341 | 30771 | 21627 | | 23913 |
| 26200 | 17056 | 28486 | 19342 | 30772 | 21628 | | 23914 |
| 26201 | 17057 | 28487 | 19343 | 30773 | 21629 | | 23915 |
| 26202 | 17058 | 28488 | 19344 | 30774 | 21630 | | 23916 |
| 26203 | 17059 | 28489 | 19345 | 30775 | 21631 | | 23917 |
| 26204 | 17060 | 28490 | 19346 | 30776 | 21632 | | 23918 |
| 26205 | 17061 | 28491 | 19347 | 30777 | 21633 | | 23919 |
| 26206 | 17062 | 28492 | 19348 | 30778 | 21634 | | 23920 |
| 26207 | 17063 | 28493 | 19349 | 30779 | 21635 | | 23921 |
| 26208 | 17064 | 28494 | 19350 | 30780 | 21636 | | 23922 |
| 26209 | 17065 | 28495 | 19351 | 30781 | 21637 | | 23923 |
| 26210 | 17066 | 28496 | 19352 | 30782 | 21638 | | 23924 |
| 26211 | 17067 | 28497 | 19353 | 30783 | 21639 | | 23925 |
| 26212 | 17068 | 28498 | 19354 | 30784 | 21640 | | 23926 |
| 26213 | 17069 | 28499 | 19355 | 30785 | 21641 | | 23927 |
| 26214 | 17070 | 28500 | 19356 | 30786 | 21642 | | 23928 |
| 26215 | 17071 | 28501 | 19357 | 30787 | 21643 | | 23929 |
| 26216 | 17072 | 28502 | 19358 | 30788 | 21644 | | 23930 |
| 26217 | 17073 | 28503 | 19359 | 30789 | 21645 | | 23931 |
| 26218 | 17074 | 28504 | 19360 | 30790 | 21646 | | 23932 |
| 26219 | 17075 | 28505 | 19361 | 30791 | 21647 | | 23933 |
| 26220 | 17076 | 28506 | 19362 | 30792 | 21648 | | 23934 |
| 26221 | 17077 | 28507 | 19363 | 30793 | 21649 | | 23935 |
| 26222 | 17078 | 28508 | 19364 | 30794 | 21650 | | 23936 |
| 26223 | 17079 | 28509 | 19365 | 30795 | 21651 | | 23937 |
| 26224 | 17080 | 28510 | 19366 | 30796 | 21652 | | 23938 |
| 26225 | 17081 | 28511 | 19367 | 30797 | 21653 | | 23939 |
| 26226 | 17082 | 28512 | 19368 | 30798 | 21654 | | 23940 |
| 26227 | 17083 | 28513 | 19369 | 30799 | 21655 | | 23941 |
| 26228 | 17084 | 28514 | 19370 | 30800 | 21656 | | 23942 |
| 26229 | 17085 | 28515 | 19371 | 30801 | 21657 | | 23943 |
| 26230 | 17086 | 28516 | 19372 | 30802 | 21658 | | 23944 |
| 26231 | 17087 | 28517 | 19373 | 30803 | 21659 | | 23945 |
| 26232 | 17088 | 28518 | 19374 | 30804 | 21660 | | 23946 |
| 26233 | 17089 | 28519 | 19375 | 30805 | 21661 | | 23947 |
| 26234 | 17090 | 28520 | 19376 | 30806 | 21662 | | 23948 |
| 26235 | 17091 | 28521 | 19377 | 30807 | 21663 | | 23949 |
| 26236 | 17092 | 28522 | 19378 | 30808 | 21664 | | 23950 |
| 26237 | 17093 | 28523 | 19379 | 30809 | 21665 | | 23951 |
| 26238 | 17094 | 28524 | 19380 | 30810 | 21666 | | 23952 |
| 26239 | 17095 | 28525 | 19381 | 30811 | 21667 | | 23953 |
| 26240 | 17096 | 28526 | 19382 | 30812 | 21668 | | 23954 |
| 26241 | 17097 | 28527 | 19383 | 30813 | 21669 | | 23955 |
| 26242 | 17098 | 28528 | 19384 | 30814 | 21670 | | 23956 |
| 26243 | 17099 | 28529 | 19385 | 30815 | 21671 | | 23957 |
| 26244 | 17100 | 28530 | 19386 | 30816 | 21672 | | 23958 |
| 26245 | 17101 | 28531 | 19387 | 30817 | 21673 | | 23959 |
| 26246 | 17102 | 28532 | 19388 | 30818 | 21674 | | 23960 |
| 26247 | 17103 | 28533 | 19389 | 30819 | 21675 | | 23961 |
| 26248 | 17104 | 28534 | 19390 | 30820 | 21676 | | 23962 |
| 26249 | 17105 | 28535 | 19391 | 30821 | 21677 | | 23963 |
| 26250 | 17106 | 28536 | 19392 | 30822 | 21678 | | 23964 |
| 26251 | 17107 | 28537 | 19393 | 30823 | 21679 | | 23965 |
| 26252 | 17108 | 28538 | 19394 | 30824 | 21680 | | 23966 |
| 26253 | 17109 | 28539 | 19395 | 30825 | 21681 | | 23967 |
| 26254 | 17110 | 28540 | 19396 | 30826 | 21682 | | 23968 |
| 26255 | 17111 | 28541 | 19397 | 30827 | 21683 | | 23969 |
| 26256 | 17112 | 28542 | 19398 | 30828 | 21684 | | 23970 |
| 26257 | 17113 | 28543 | 19399 | 30829 | 21685 | | 23971 |
| 26258 | 17114 | 28544 | 19400 | 30830 | 21686 | | 23972 |
| 26259 | 17115 | 28545 | 19401 | 30831 | 21687 | | 23973 |
| 26260 | 17116 | 28546 | 19402 | 30832 | 21688 | | 23974 |
| 26261 | 17117 | 28547 | 19403 | 30833 | 21689 | | 23975 |
| 26262 | 17118 | 28548 | 19404 | 30834 | 21690 | | 23976 |
| 26263 | 17119 | 28549 | 19405 | 30835 | 21691 | | 23977 |
| 26264 | 17120 | 28550 | 19406 | 30836 | 21692 | | 23978 |
| 26265 | 17121 | 28551 | 19407 | 30837 | 21693 | | 23979 |
| 26266 | 17122 | 28552 | 19408 | 30838 | 21694 | | 23980 |
| 26267 | 17123 | 28553 | 19409 | 30839 | 21695 | | 23981 |
| 26268 | 17124 | 28554 | 19410 | 30840 | 21696 | | 23982 |
| 26269 | 17125 | 28555 | 19411 | 30841 | 21697 | | 23983 |
| 26270 | 17126 | 28556 | 19412 | 30842 | 21698 | | 23984 |
| 26271 | 17127 | 28557 | 19413 | 30843 | 21699 | | 23985 |
| 26272 | 17128 | 28558 | 19414 | 30844 | 21700 | | 23986 |
| 26273 | 17129 | 28559 | 19415 | 30845 | 21701 | | 23987 |
| 26274 | 17130 | 28560 | 19416 | 30846 | 21702 | | 23988 |
| 26275 | 17131 | 28561 | 19417 | 30847 | 21703 | | 23989 |
| 26276 | 17132 | 28562 | 19418 | 30848 | 21704 | | 23990 |
| 26277 | 17133 | 28563 | 19419 | 30849 | 21705 | | 23991 |
| 26278 | 17134 | 28564 | 19420 | 30850 | 21706 | | 23992 |
| 26279 | 17135 | 28565 | 19421 | 30851 | 21707 | | 23993 |
| 26280 | 17136 | 28566 | 19422 | 30852 | 21708 | | 23994 |
| 26281 | 17137 | 28567 | 19423 | 30853 | 21709 | | 23995 |
| 26282 | 17138 | 28568 | 19424 | 30854 | 21710 | | 23996 |
| 26283 | 17139 | 28569 | 19425 | 30855 | 21711 | | 23997 |
| 26284 | 17140 | 28570 | 19426 | 30856 | 21712 | | 23998 |
| 26285 | 17141 | 28571 | 19427 | 30857 | 21713 | | 23999 |
| 26286 | 17142 | 28572 | 19428 | 30858 | 21714 | | 24000 |
| 26287 | 17143 | 28573 | 19429 | 30859 | 21715 | | 24001 |
| 26288 | 17144 | 28574 | 19430 | 30860 | 21716 | | 24002 |
| 26289 | 17145 | 28575 | 19431 | 30861 | 21717 | | 24003 |
| 26290 | 17146 | 28576 | 19432 | 30862 | 21718 | | 24004 |
| 26291 | 17147 | 28577 | 19433 | 30863 | 21719 | | 24005 |
| 26292 | 17148 | 28578 | 19434 | 30864 | 21720 | | 24006 |
| 26293 | 17149 | 28579 | 19435 | 30865 | 21721 | | 24007 |
| 26294 | 17150 | 28580 | 19436 | 30866 | 21722 | | 24008 |
| 26295 | 17151 | 28581 | 19437 | 30867 | 21723 | | 24009 |
| 26296 | 17152 | 28582 | 19438 | 30868 | 21724 | | 24010 |
| 26297 | 17153 | 28583 | 19439 | 30869 | 21725 | | 24011 |
| 26298 | 17154 | 28584 | 19440 | 30870 | 21726 | | 24012 |
| 26299 | 17155 | 28585 | 19441 | 30871 | 21727 | | 24013 |
| 26300 | 17156 | 28586 | 19442 | 30872 | 21728 | | 24014 |
| 26301 | 17157 | 28587 | 19443 | 30873 | 21729 | | 24015 |
| 26302 | 17158 | 28588 | 19444 | 30874 | 21730 | | 24016 |
| 26303 | 17159 | 28589 | 19445 | 30875 | 21731 | | 24017 |
| 26304 | 17160 | 28590 | 19446 | 30876 | 21732 | | 24018 |
| 26305 | 17161 | 28591 | 19447 | 30877 | 21733 | | 24019 |
| 26306 | 17162 | 28592 | 19448 | 30878 | 21734 | | 24020 |
| 26307 | 17163 | 28593 | 19449 | 30879 | 21735 | | 24021 |
| 26308 | 17164 | 28594 | 19450 | 30880 | 21736 | | 24022 |
| 26309 | 17165 | 28595 | 19451 | 30881 | 21737 | | 24023 |
| 26310 | 17166 | 28596 | 19452 | 30882 | 21738 | | 24024 |
| 26311 | 17167 | 28597 | 19453 | 30883 | 21739 | | 24025 |
| 26312 | 17168 | 28598 | 19454 | 30884 | 21740 | | 24026 |
| 26313 | 17169 | 28599 | 19455 | 30885 | 21741 | | 24027 |
| 26314 | 17170 | 28600 | 19456 | 30886 | 21742 | | 24028 |
| 26315 | 17171 | 28601 | 19457 | 30887 | 21743 | | 24029 |
| 26316 | 17172 | 28602 | 19458 | 30888 | 21744 | | 24030 |
| 26317 | 17173 | 28603 | 19459 | 30889 | 21745 | | 24031 |
| 26318 | 17174 | 28604 | 19460 | 30890 | 21746 | | 24032 |
| 26319 | 17175 | 28605 | 19461 | 30891 | 21747 | | 24033 |
| 26320 | 17176 | 28606 | 19462 | 30892 | 21748 | | 24034 |
| 26321 | 17177 | 28607 | 19463 | 30893 | 21749 | | 24035 |
| 26322 | 17178 | 28608 | 19464 | 30894 | 21750 | | 24036 |
| 26323 | 17179 | 28609 | 19465 | 30895 | 21751 | | 24037 |
| 26324 | 17180 | 28610 | 19466 | 30896 | 21752 | | 24038 |
| 26325 | 17181 | 28611 | 19467 | 30897 | 21753 | | 24039 |
| 26326 | 17182 | 28612 | 19468 | 30898 | 21754 | | 24040 |
| 26327 | 17183 | 28613 | 19469 | 30899 | 21755 | | 24041 |
| 26328 | 17184 | 28614 | 19470 | 30900 | 21756 | | 24042 |
| 26329 | 17185 | 28615 | 19471 | 30901 | 21757 | | 24043 |
| 26330 | 17186 | 28616 | 19472 | 30902 | 21758 | | 24044 |
| 26331 | 17187 | 28617 | 19473 | 30903 | 21759 | | 24045 |
| 26332 | 17188 | 28618 | 19474 | 30904 | 21760 | | 24046 |
| 26333 | 17189 | 28619 | 19475 | 30905 | 21761 | | 24047 |
| 26334 | 17190 | 28620 | 19476 | 30906 | 21762 | | 24048 |
| 26335 | 17191 | 28621 | 19477 | 30907 | 21763 | | 24049 |
| 26336 | 17192 | 28622 | 19478 | 30908 | 21764 | | 24050 |
| 26337 | 17193 | 28623 | 19479 | 30909 | 21765 | | 24051 |
| 26338 | 17194 | 28624 | 19480 | 30910 | 21766 | | 24052 |
| 26339 | 17195 | 28625 | 19481 | 30911 | 21767 | | 24053 |
| 26340 | 17196 | 28626 | 19482 | 30912 | 21768 | | 24054 |
| 26341 | 17197 | 28627 | 19483 | 30913 | 21769 | | 24055 |
| 26342 | 17198 | 28628 | 19484 | 30914 | 21770 | | 24056 |
| 26343 | 17199 | 28629 | 19485 | 30915 | 21771 | | 24057 |
| 26344 | 17200 | 28630 | 19486 | 30916 | 21772 | | 24058 |
| 26345 | 17201 | 28631 | 19487 | 30917 | 21773 | | 24059 |
| 26346 | 17202 | 28632 | 19488 | 30918 | 21774 | | 24060 |
| 26347 | 17203 | 28633 | 19489 | 30919 | 21775 | | 24061 |
| 26348 | 17204 | 28634 | 19490 | 30920 | 21776 | | 24062 |
| 26349 | 17205 | 28635 | 19491 | 30921 | 21777 | | 24063 |
| 26350 | 17206 | 28636 | 19492 | 30922 | 21778 | | 24064 |
| 26351 | 17207 | 28637 | 19493 | 30923 | 21779 | | 24065 |
| 26352 | 17208 | 28638 | 19494 | 30924 | 21780 | | 24066 |
| 26353 | 17209 | 28639 | 19495 | 30925 | 21781 | | 24067 |
| 26354 | 17210 | 28640 | 19496 | 30926 | 21782 | | 24068 |
| 26355 | 17211 | 28641 | 19497 | 30927 | 21783 | | 24069 |
| 26356 | 17212 | 28642 | 19498 | 30928 | 21784 | | 24070 |
| 26357 | 17213 | 28643 | 19499 | 30929 | 21785 | | 24071 |
| 26358 | 17214 | 28644 | 19500 | 30930 | 21786 | | 24072 |
| 26359 | 17215 | 28645 | 19501 | 30931 | 21787 | | 24073 |
| 26360 | 17216 | 28646 | 19502 | 30932 | 21788 | | 24074 |
| 26361 | 17217 | 28647 | 19503 | 30933 | 21789 | | 24075 |
| 26362 | 17218 | 28648 | 19504 | 30934 | 21790 | | 24076 |
| 26363 | 17219 | 28649 | 19505 | 30935 | 21791 | | 24077 |
| 26364 | 17220 | 28650 | 19506 | 30936 | 21792 | | 24078 |
| 26365 | 17221 | 28651 | 19507 | 30937 | 21793 | | 24079 |
| 26366 | 17222 | 28652 | 19508 | 30938 | 21794 | | 24080 |
| 26367 | 17223 | 28653 | 19509 | 30939 | 21795 | | 24081 |
| 26368 | 17224 | 28654 | 19510 | 30940 | 21796 | | 24082 |
| 26369 | 17225 | 28655 | 19511 | 30941 | 21797 | | 24083 |
| 26370 | 17226 | 28656 | 19512 | 30942 | 21798 | | 24084 |
| 26371 | 17227 | 28657 | 19513 | 30943 | 21799 | | 24085 |
| 26372 | 17228 | 28658 | 19514 | 30944 | 21800 | | 24086 |
| 26373 | 17229 | 28659 | 19515 | 30945 | 21801 | | 24087 |
| 26374 | 17230 | 28660 | 19516 | 30946 | 21802 | | 24088 |
| 26375 | 17231 | 28661 | 19517 | 30947 | 21803 | | 24089 |
| 26376 | 17232 | 28662 | 19518 | 30948 | 21804 | | 24090 |
| 26377 | 17233 | 28663 | 19519 | 30949 | 21805 | | 24091 |
| 26378 | 17234 | 28664 | 19520 | 30950 | 21806 | | 24092 |
| 26379 | 17235 | 28665 | 19521 | 30951 | 21807 | | 24093 |
| 26380 | 17236 | 28666 | 19522 | 30952 | 21808 | | 24094 |
| 26381 | 17237 | 28667 | 19523 | 30953 | 21809 | | 24095 |
| 26382 | 17238 | 28668 | 19524 | 30954 | 21810 | | 24096 |
| 26383 | 17239 | 28669 | 19525 | 30955 | 21811 | | 24097 |
| 26384 | 17240 | 28670 | 19526 | 30956 | 21812 | | 24098 |
| 26385 | 17241 | 28671 | 19527 | 30957 | 21813 | | 24099 |
| 26386 | 17242 | 28672 | 19528 | 30958 | 21814 | | 24100 |
| 26387 | 17243 | 28673 | 19529 | 30959 | 21815 | | 24101 |
| 26388 | 17244 | 28674 | 19530 | 30960 | 21816 | | 24102 |
| 26389 | 17245 | 28675 | 19531 | 30961 | 21817 | | 24103 |
| 26390 | 17246 | 28676 | 19532 | 30962 | 21818 | | 24104 |
| 26391 | 17247 | 28677 | 19533 | 30963 | 21819 | | 24105 |
| 26392 | 17248 | 28678 | 19534 | 30964 | 21820 | | 24106 |
| 26393 | 17249 | 28679 | 19535 | 30965 | 21821 | | 24107 |
| 26394 | 17250 | 28680 | 19536 | 30966 | 21822 | | 24108 |
| 26395 | 17251 | 28681 | 19537 | 30967 | 21823 | | 24109 |
| 26396 | 17252 | 28682 | 19538 | 30968 | 21824 | | 24110 |
| 26397 | 17253 | 28683 | 19539 | 30969 | 21825 | | 24111 |
| 26398 | 17254 | 28684 | 19540 | 30970 | 21826 | | 24112 |
| 26399 | 17255 | 28685 | 19541 | 30971 | 21827 | | 24113 |
| 26400 | 17256 | 28686 | 19542 | 30972 | 21828 | | 24114 |
| 26401 | 17257 | 28687 | 19543 | 30973 | 21829 | | 24115 |
| 26402 | 17258 | 28688 | 19544 | 30974 | 21830 | | 24116 |
| 26403 | 17259 | 28689 | 19545 | 30975 | 21831 | | 24117 |
| 26404 | 17260 | 28690 | 19546 | 30976 | 21832 | | 24118 |
| 26405 | 17261 | 28691 | 19547 | 30977 | 21833 | | 24119 |
| 26406 | 17262 | 28692 | 19548 | 30978 | 21834 | | 24120 |
| 26407 | 17263 | 28693 | 19549 | 30979 | 21835 | | 24121 |
| 26408 | 17264 | 28694 | 19550 | 30980 | 21836 | | 24122 |
| 26409 | 17265 | 28695 | 19551 | 30981 | 21837 | | 24123 |
| 26410 | 17266 | 28696 | 19552 | 30982 | 21838 | | 24124 |
| 26411 | 17267 | 28697 | 19553 | 30983 | 21839 | | 24125 |
| 26412 | 17268 | 28698 | 19554 | 30984 | 21840 | | 24126 |
| 26413 | 17269 | 28699 | 19555 | 30985 | 21841 | | 24127 |
| 26414 | 17270 | 28700 | 19556 | 30986 | 21842 | | 24128 |
| 26415 | 17271 | 28701 | 19557 | 30987 | 21843 | | 24129 |
| 26416 | 17272 | 28702 | 19558 | 30988 | 21844 | | 24130 |
| 26417 | 17273 | 28703 | 19559 | 30989 | 21845 | | 24131 |
| 26418 | 17274 | 28704 | 19560 | 30990 | 21846 | | 24132 |
| 26419 | 17275 | 28705 | 19561 | 30991 | 21847 | | 24133 |
| 26420 | 17276 | 28706 | 19562 | 30992 | 21848 | | 24134 |
| 26421 | 17277 | 28707 | 19563 | 30993 | 21849 | | 24135 |
| 26422 | 17278 | 28708 | 19564 | 30994 | 21850 | | 24136 |
| 26423 | 17279 | 28709 | 19565 | 30995 | 21851 | | 24137 |
| 26424 | 17280 | 28710 | 19566 | 30996 | 21852 | | 24138 |
| 26425 | 17281 | 28711 | 19567 | 30997 | 21853 | | 24139 |
| 26426 | 17282 | 28712 | 19568 | 30998 | 21854 | | 24140 |
| 26427 | 17283 | 28713 | 19569 | 30999 | 21855 | | 24141 |
| 26428 | 17284 | 28714 | 19570 | 31000 | 21856 | | 24142 |
| 26429 | 17285 | 28715 | 19571 | 31001 | 21857 | | 24143 |
| 26430 | 17286 | 28716 | 19572 | 31002 | 21858 | | 24144 |
| 26431 | 17287 | 28717 | 19573 | 31003 | 21859 | | 24145 |
| 26432 | 17288 | 28718 | 19574 | 31004 | 21860 | | 24146 |
| 26433 | 17289 | 28719 | 19575 | 31005 | 21861 | | 24147 |
| 26434 | 17290 | 28720 | 19576 | 31006 | 21862 | | 24148 |
| 26435 | 17291 | 28721 | 19577 | 31007 | 21863 | | 24149 |
| 26436 | 17292 | 28722 | 19578 | 31008 | 21864 | | 24150 |
| 26437 | 17293 | 28723 | 19579 | 31009 | 21865 | | 24151 |
| 26438 | 17294 | 28724 | 19580 | 31010 | 21866 | | 24152 |
| 26439 | 17295 | 28725 | 19581 | 31011 | 21867 | | 24153 |
| 26440 | 17296 | 28726 | 19582 | 31012 | 21868 | | 24154 |
| 26441 | 17297 | 28727 | 19583 | 31013 | 21869 | | 24155 |
| 26442 | 17298 | 28728 | 19584 | 31014 | 21870 | | 24156 |
| 26443 | 17299 | 28729 | 19585 | 31015 | 21871 | | 24157 |
| 26444 | 17300 | 28730 | 19586 | 31016 | 21872 | | 24158 |
| 26445 | 17301 | 28731 | 19587 | 31017 | 21873 | | 24159 |
| 26446 | 17302 | 28732 | 19588 | 31018 | 21874 | | 24160 |
| 26447 | 17303 | 28733 | 19589 | 31019 | 21875 | | 24161 |
| 26448 | 17304 | 28734 | 19590 | 31020 | 21876 | | 24162 |
| 26449 | 17305 | 28735 | 19591 | 31021 | 21877 | | 24163 |
| 26450 | 17306 | 28736 | 19592 | 31022 | 21878 | | 24164 |
| 26451 | 17307 | 28737 | 19593 | 31023 | 21879 | | 24165 |

[0175] In some embodiments, compositions comprise an effector protein wherein the effector protein comprises about 100, about 120, about 140, about 160, about 180, about 200, about 220, about 240, about 260, about 280, about 300, about 320, about 340, about 360, about 380, about 400, about 420, about 440, about 460, about 480, about 500, about 520, about 540, about 560, about 580, about 600, about 620, about 640, about 660, about 680, about 700, about 720, about 740, about 760, about 780, about 800, about 820, about 840, about 860, about 880, about 900, about 920, about 940, about 960, about 980, about 1000, about 1020, about 1040, about 1060, about 1080, about 1100, about 1120, about 1140, about 1160, about 1180, about 1200, about 1220, about 1240, about 1260, about 1280, about 1300, about 1320, about 1340, about 1360, about 1380, about 1400, about 1420, about 1440, about 1460, about 1480, about 1490, about 1500, about 1520, about 1540, about 1560, about 1580, about 1600, about 1620, about 1640, about 1660, about 1680, about 1700, about 1720, about 1740, about 1760, about 1780, about 1800, about 1820, about 1840, about 1860, about 1880, about 1900, or about 1920 contiguous amino acids of a sequence selected from SEQ ID NOS: 1-10,484 or 15,022-24,165.

[0176] In some embodiments, compositions comprise an effector protein wherein the effector protein comprises the amino acid sequence located at positions 1-100, 150-250, 101-200, 250-350, 201-300, 350-450, 301-400, 350-450, 401-500, 450-550, 501-600, 550-650, 601-700, 650-750, 701-800, 750-850, 801-900, 850-950, 901-1000, 950-1050, 1001-1100, 1050-1150, 1101-1200, 1150-1250, 1201-1300, 1250-1350, 1301-1400, 1350-1450, 1401-1500, 1450-1550, 1501-1600, 1550-1650, 1601-1700, 1650-1750, 1701-1800, 1850-1950, 1801-1900, or 1850-1950 of a sequence selected from SEQ ID NOS: 1-10,484 or 15,022-24,165.

[0177] In some embodiments, compositions comprise an effector protein wherein the effector protein comprises an amino acid sequence that is at least 90%, at least 95%, or 100% identical to a portion of a sequence selected from SEQ ID NOS: 1-10,484 or 15,022-24,165, and wherein the portion of the sequence is about 30%, about 40% about 50%, about 60%, about 70%, about 80%, or about 90% of a sequence selected from SEQ ID NOS: 1-10,484 or 15,022-24,165.

[0178] In some embodiments, compositions comprise an effector protein, wherein portion of the amino acid sequence of the effector protein is at least 65%, at least 70%, at least 75%, at least 80%, at least 85%, at least 90%, at least 95%, at least 97%, or at least 98%, at least 99%, or 100% identical to an equal length portion of a sequence selected from SEQ ID NOs: 1-21. In some embodiments, the length of the portion is selected from: 20 to 40, 40 to 60, 60 to 80, 80 to 100, 100 to 120, 120 to 140, 140 to 160, 160 to 180, 180 to 200, 200 to 220, 220 to 240, 240 to 260, 260 to 280, 280 to 300, 320 to 340, 340 to 360, 360 to 380, and 380 to 400 linked amino acids. In some embodiments, the length of the portion is selected from: 400 to 420, 420 to 440, 440 to 460, 460 to 480, 480 to 500, 520 to 540, 540 to 560, 560 to 580, 580 to 600, 600 to 620, 620 to 640, 640 to 660, 660 to 680, and 680 to 700, 700 to 720, 720 to 740, 740 to 760, 760 to 780, 780 to 800, 820 to 840, 840 to 860, 860 to 880, 880 to 900, 900 to 920, 920 to 940, 940 to 960, 960 to 980, 980 to 1000 linked amino acids. In some embodiments, the length of the portion is selected from: 1000 to 1020, 1020 to 1040, 1040 to 1060, 1060 to 1080, 1080 to 1100, 1100 to 1120, 1120 to 1140, 1140 to 1160, 1160 to 1180, 1180 to 1200, 1220 to 1240, 1240 to 1260, 1260 to 1280, 1280 to 1300, 1300 to 1320, 1320 to 1340, 1340 to 1360, 1360 to 1380, 1380 to 1400, 1420 to 1440, 1440 to 1460, 1460 to 1480, 1480 to 1500, 1500 to 1520, 1520 to 1540, 1540 to 1560, 1560 to 1580, 1580 to 1600 linked amino acids.

[0179] In some embodiments, effector proteins comprise a functional domain. The functional domain may comprise nucleic acid binding activity. The functional domain may comprise catalytic activity, also referred to as enzymatic activity. The catalytic activity may be nuclease activity. The nuclease activity may comprise cleaving a strand of a nucleic acid. The nuclease activity may comprise cleaving only one strand of a double stranded nucleic acid, also referred to as nicking. In some embodiments, the functional domain is an HNH domain. In some embodiments, the functional domain is a RuvC domain. In some embodiments, the RuvC domain comprises multiple subdomains. In some embodiments, the functional domain is a zinc finger binding domain. In some embodiments, the functional domain is a HEPN domain. In some embodiments, effector proteins lack a certain functional domain. In some embodiments, the effector protein lacks an HNH domain. In some embodiments, effector proteins lack a zinc finger binding domain.

[0180] In some embodiments, effector proteins catalyze cleavage of a target nucleic acid in a cell or a sample. In some embodiments, the target nucleic acid is single stranded (ss). In some embodiments, the target nucleic acid is double stranded (ds). In some embodiments, the target nucleic acid is dsDNA. In some embodiments, the target nucleic acid is ssDNA. In some embodiments, the target nucleic acid is RNA. In some embodiments, effector proteins cleave the target nucleic acid within a target sequence of the target nucleic acid.

[0181] In some embodiments, effector proteins catalyze cis cleavage activity. In some embodiments, effector proteins cleave both strands of dsDNA.

[0182] In some embodiments, effector proteins cleave or nick a target nucleic acid within or near a protospacer adjacent motif (PAM) sequence of the target nucleic acid. In some embodiments, cleavage occurs within 1, 2, 3, 4, 5, 6, 7, 8, 9 or 10 nucleosides of a 5′ or 3′ terminus of a PAM sequence. A target nucleic acid may comprise a PAM sequence adjacent to a sequence that is complementary to a guide nucleic acid spacer sequence. In some embodiments, effector proteins do not require a PAM sequence to cleave or a nick a target nucleic acid.

### Engineered Proteins

[0183] In some embodiments, effector proteins disclosed herein are engineered proteins. Engineered proteins are not identical to a naturally-occurring protein. Engineered proteins may not comprise an amino acid sequence that is identical to that of a naturally-occurring protein. In some embodiments, the amino acid sequence of an engineered protein is not identical to that of a naturally occurring protein. Engineered proteins may provide an increased activity relative to a naturally occurring protein. Engineered proteins may provide a reduced activity relative to a naturally occurring protein. The activity may be nuclease activity. The activity may be nickase activity. The activity may be nucleic acid binding activity. In some embodiments, a modification of the effector proteins may include addition of one or more amino acids, deletion of one or more amino acids, substitution of one or more amino acids, or combinations thereof. In some embodiments, effector proteins disclosed herein are engineered proteins. Unless otherwise indicated, reference to effector proteins throughout the present disclosure include engineered proteins thereof.

[0184] Engineered proteins may provide an increased or reduced activity relative to a naturally occurring protein under a given condition of a cell or sample in which the activity occurs. The condition may be temperature. The temperature may be greater than 20° C., greater than 25° C., greater than 30° C., greater than 35° C., greater than 40° C., greater than 45° C., greater than 50° C., greater than 55° C., greater than 60° C., greater than 65° C., or greater than 70° C., but not greater than 80° C. The condition may be the presence of a salt. The salt may be a magnesium salt, a zinc salt, a potassium salt, a calcium salt or a sodium salt. The condition may be the concentration of one or more salts.

[0185] In some embodiments, the amino acid sequence of an engineered protein comprises at least one residue that is different from that of a naturally occurring protein. In some embodiments, the amino acid sequence of an engineered protein comprises at least 2, at least 3, at least 4, at least 5, at least 6, at least 7, at least 8, at least 9 or at least 10 residues that are different from that of a naturally occurring protein. The residues in the engineered protein that differ from those at corresponding positions of the naturally occurring protein (when the engineered and naturally occurring proteins are aligned for maximal identity) may be referred to as substituted residues or amino acid substitutions. In some embodiments, the substituted residues are non-conserved residues relative to the residues at corresponding positions of the naturally occurring protein. A non-conserved residue has a different physicochemical property from the amino acid for which it substitutes. Physicochemical properties include aliphatic, cyclic, aromatic, basic, acidic and hydroxyl-containing. Glycine, alanine, valine, leucine and isoleucine are aliphatic. Serine, Cysteine, threonine and methionine are hydroxyl-containing. Proline is cyclic. Phenylalanine, tyrosine, tryptophan are basic. Aspartate, Glutamate, Asparagine and glutamine are acidic.

[0186] In some embodiments, engineered proteins are designed to be catalytically inactive or to have reduced catalytic activity relative to a naturally occurring protein. A catalytically inactive effector protein may be generated by substituting an amino acid that confers a catalytic activity (also referred to as a “catalytic residue”) with a substituted residue that does not support the catalytic activity. In some embodiments, the substituted residue has an aliphatic side chain. In some embodiments, the substituted residue is glycine. In some embodiments, the substituted residue is valine. In some embodiments, the substituted residue is leucine. In some embodiments, the substituted residue is alanine. In some embodiments, the amino acid is aspartate and it is substituted with asparagine. In some embodiments, the amino acid is glutamate and it is substituted with glutamine. An amino acid that confers catalytic activity may be identified by performing sequence alignment of an unmodified effector protein with a similar enzyme having at least one identified catalytic residue; selecting at least one putative catalytic residue in the unmodified effector protein within the portion of the unmodified effector protein that aligns with a portion of the similar enzyme that comprises the identified catalytic residue; substituting the at least one putative catalytic residue of the unmodified effector protein with the different amino acid; and comparing the catalytic activity of the unmodified effector protein to the modified effector protein. A similar enzyme may be an enzyme that is at least 50%, at least 60%, at least 70%, at least 80%, or at least 90% identical to the unmodified effector protein. A similar enzyme may be an enzyme that is not greater than 99.9% identical to the unmodified effector protein. In some embodiments, the portion of the unmodified effector protein that aligns with a portion of the similar enzyme is at least 10 amino acids, at least 20 amino acids, at least 30 amino acids, at least 40 amino acids, at least 50 amino acids, at least 60 amino acids, at least 70 amino acids, at least 80 amino acids, at least 90 amino acids, or at least 100 amino acids in length. In some embodiments, the portion of the unmodified effector protein that aligns with a portion of the similar enzyme is not greater than 200 amino acids. In some embodiments, the portion of the unmodified effector protein that aligns with a portion of the similar enzyme comprises a functional domain (e.g., HEPN, HNH, RuvC, zinc finger binding). In some embodiments, comparing the catalytic activity comprises performing a cleavage assay. An example of generating a catalytically inactive effector protein is provided in Example 7.

[0187] In some embodiments, compositions, systems, and methods described herein comprise an effector protein, or a nucleic acid encoding the effector protein, wherein the effector protein comprises an amino acid sequence that is at least 65%, at least 70%, at least 75%, at least 80%, at least 85%, at least 90%, at least 95%, at least 97%, at least 98%, at least 99%, or 100% identical to any one of the sequences as set forth in TABLE 1. In some embodiments, an effector protein provided herein comprises an amino acid sequence that is at least 65% identical to any one of the sequences as set forth in TABLE 1. In some embodiments, an effector protein provided herein comprises an amino acid sequence that is at least 70% identical to any one of the sequences as set forth in TABLE 1. In some embodiments, an effector protein provided herein comprises an amino acid sequence that is at least 75% identical to any one of the sequences as set forth in TABLE 1. In some embodiments, an effector protein provided herein comprises an amino acid sequence that is at least 80% identical to any one of the sequences as set forth in TABLE 1. In some embodiments, an effector protein provided herein comprises an amino acid sequence that is at least 85% identical to any one of the sequences as set forth in TABLE 1. In some embodiments, an effector protein provided herein comprises an amino acid sequence that is at least 90% identical to any one of the sequences as set forth in TABLE 1. In some embodiments, an effector protein provided herein comprises an amino acid sequence that is at least 95% identical to any one of the sequences as set forth in TABLE 1. In some embodiments, an effector protein provided herein comprises an amino acid sequence that is at least 97% identical to any one of the sequences as set forth in TABLE 1. In some embodiments, an effector protein provided herein comprises an amino acid sequence that is at least 98% identical to any one of the sequences as set forth in TABLE 1. In some embodiments, an effector protein provided herein comprises an amino acid sequence that is at least 99% identical to any one of the sequences as set forth in TABLE 1. In some embodiments, an effector protein provided herein comprises an amino acid sequence that is identical to any one of the sequences as set forth in TABLE 1.

[0188] In some embodiments, compositions, systems, and methods described herein comprise an effector protein, or a nucleic acid encoding the effector protein, wherein the effector protein comprises one or more amino acid alterations relative to any one of the sequences recited in TABLE 1. In some embodiments, the effector protein comprising one or more amino acid alterations is a variant of an effector protein described herein. It is understood that any reference to an effector protein herein also refers to an effector protein variant as described herein. The term “variant” refers to a form or version of a protein that differs from the wild-type protein. A variant may have a different function or activity relative to the wild-type protein.

[0189] In some embodiments, the one or more amino acid alterations comprises conservative substitutions, non-conservative substitutions, conservative deletions, non-conservative deletions, or combinations thereof. In some embodiments, an effector protein or a nucleic acid encoding the effector protein comprises 1 amino acid alteration, 2 amino acid alterations, 3 amino acid alterations, 4 amino acid alterations, 5 amino acid alterations, 6 amino acid alterations, 7 amino acid alterations, 8 amino acid alterations, 9 amino acid alterations, 10 amino acid alterations or more relative to any one of the sequences recited in TABLE 1.

[0190] The term “conservative substitution” refers to the replacement of one amino acid for another such that the replacement takes place within a family of amino acids that are related in their side chains. Conversely, the term “non-conservative substitution” as used herein refers to the replacement of one amino acid residue for another that does not have a related side chain. Genetically encoded amino acids can be divided into four families having related side chains: (1) acidic (negatively charged): Asp (D), Glu (E); (2) basic (positively charged): Lys (K), Arg (R), His (H); (3) non-polar (hydrophobic): Cys (C), Ala (A), Val (V), Leu (L), Ile (I), Pro (P), Phe (F), Met (M), Trp (W), Gly (G), Tyr (Y), with non-polar also being subdivided into: (i) strongly hydrophobic: Ala (A), Val (V), Leu (L), Ile (I), Met (M), Phe (F); and (ii) moderately hydrophobic: Gly (G), Pro (P), Cys (C), Tyr (Y), Trp (W); and (4) uncharged polar: Asn (N), Gln (Q), Ser (S), Thr (T). Amino acids may be related by aliphatic side chains: Gly (G), Ala (A), Val (V), Leu (L), Ile (I), Ser (S), Thr (T), with Ser (S) and Thr (T) optionally being grouped separately as aliphatic-hydroxyl; Amino acids may be related by aromatic side chains: Phe (F), Tyr (Y), Trp (W). Amino acids may be related by amide side chains: Asn (N), Gln (Q). Amino acids may be related by sulfur-containing side chains: Cys (C) and Met (M).

[0191] In some embodiments, the one or more amino acid alterations may result in a change in activity of the effector protein relative to a naturally-occurring counterpart. For example, and as described in further detail below, the one or more amino acid alteration increases or decreases catalytic activity of the effector protein relative to a naturally-occurring counterpart. In some embodiments, the one or more amino acid alterations results in a catalytically inactive effector protein variant.

[0192] In some embodiments, effector proteins described herein are encoded by a codon optimized nucleic acid. In some embodiments, a nucleic acid sequence encoding an effector protein described herein, is codon optimized. In some embodiments, effector proteins described herein may be codon optimized for expression in a specific cell, for example, a bacterial cell, a plant cell, a eukaryotic cell, an animal cell, a mammalian cell, or a human cell. In some embodiments, the effector protein is codon optimized for a human cell.

[0193] In some embodiments, effector proteins may comprise one or more modifications that may provide altered activity as compared to a naturally-occurring counterpart (e.g., a naturally-occurring nuclease or nickase, etc. activity which may be a naturally-occurring effector protein). In some embodiments, activity (e.g., nickase, nuclease, binding, etc, activity) of effector proteins described herein can be measured relative to a naturally-occurring effector protein or compositions containing the same in a cleavage assay. For example, effector proteins may comprise one or more modifications that may provide increased activity as compared to a naturally-occurring counterpart. As another example, effector proteins may provide increased catalytic activity (e.g., nickase, nuclease, binding, etc. activity) as compared to a naturally-occurring counterpart. Effector proteins may provide enhanced nucleic acid binding activity (e.g., enhanced binding of a guide nucleic acid, and/or target nucleic acid) as compared to a naturally-occurring counterpart. An effector protein may have a 1%, 5%, 10%, 20%, 30%, 40%, 50%, 60%, 70%, 80%, 90%, 100%, 120%, 140%, 160%, 180%, 200%, or more, increase of the activity of a naturally-occurring counterpart.

[0194] Alternatively, effector proteins may comprise one or more modifications that reduce the activity of the effector proteins relative to a naturally occurring nuclease, or nickase etc. . . . An effector protein may have a 100%, 90%, 80%, 70%, 60%, 50%, 40%, 30%, 20%, 10%, 5%, 1%, or less, decrease of the activity of a naturally occurring counterpart. Decreased activity may be decreased catalytic activity (e.g., nickase, nuclease, binding, etc. activity) as compared to a naturally-occurring counterpart.

[0195] An effector protein that has decreased catalytic activity may be referred to as catalytically or enzymatically inactive, catalytically or enzymatically dead, as a dead protein or a dCas protein. In some embodiments, such a protein may comprise an enzymatically inactive domain (e.g. inactive nuclease domain). For example, a nuclease domain (e.g., RuvC domain) of an effector protein may be deleted or mutated relative to a wildtype counterpart so that it is no longer functional or comprises reduced nuclease activity. In some embodiments, a catalytically inactive effector protein may bind to a guide nucleic acid and/or a target nucleic acid but does not cleave the target nucleic acid. In some embodiments, a catalytically inactive effector protein may associate with a guide nucleic acid to activate or repress transcription of a target nucleic acid. In some embodiments, a catalytically inactive effector protein is fused to a fusion partner protein that confers an alternative activity to an effector protein activity. Such fusion proteins are described herein and throughout. The term, “fused,” as used herein, refers to at least two sequences that are connected together, such as by a linker, or by conjugation (e.g., chemical conjugation or enzymatic conjugation). The term “fused” includes a linker.

### Fusion Proteins

[0196] In some embodiments, compositions, systems, and methods comprise a fusion protein or uses thereof. A fusion protein generally comprises an effector protein and a fusion partner protein (also referred to as a “fusion partner”). In some embodiments, the fusion partner. In general, the effector protein and the fusion partner are heterologous proteins. In some embodiments, the fusion protein comprises a polypeptide or peptide that is fused or linked to the effector protein. In some embodiments, the fusion protein is a heterologous peptide or polypeptide as described herein. In some embodiments, the amino terminus of the fusion partner is linked/fused to the carboxy terminus of the effector protein. In some embodiments, the carboxy terminus of the fusion partner protein is linked/fused to the amino terminus of the effector protein by the linker. In some embodiments, the fusion partner is not an effector protein as described herein. In some embodiments, the fusion partner comprises a second effector protein or a multimeric form thereof. Accordingly, in some embodiments, the fusion protein comprises more than one effector protein. In such embodiments, the fusion protein can comprise at least two effector proteins that are same. In some embodiments, the fusion protein comprises at least two effector proteins that are different. In some embodiments, the multimeric form is a homomeric form. In some embodiments, the multimeric form is a heteromeric form. Unless otherwise indicated, reference to effector proteins throughout the present disclosure include fusion proteins comprising the effector protein described herein and a fusion partner.

[0197] In some embodiments, effector proteins described herein can be modified with the addition of one or more heterologous peptides or heterologous polypeptides (referred to collectively herein as a heterologous polypeptide). In some embodiments, an effector protein modified with the addition of one or more heterologous peptides or heterologous polypeptides may be referred to herein as a fusion protein. Such fusion proteins are described herein and throughout.

[0198] In some embodiments, a heterologous peptide or heterologous polypeptide comprises a subcellular localization signal. In some embodiments, a subcellular localization signal can be a nuclear localization signal (NLS). In some embodiments, the NLS facilitates localization of a nucleic acid, protein, or small molecule to the nucleus, when present in a cell that contains a nuclear compartment. In some embodiments, the subcellular localization signal is a nuclear export signal (NES), a sequence to keep an effector protein retained in the cytoplasm, a mitochondrial localization signal for targeting to the mitochondria, a chloroplast localization signal for targeting to a chloroplast, an ER retention signal, and the like. In some embodiments, an effector protein described herein is not modified with a subcellular localization signal so that the polypeptide is not targeted to the nucleus, which can be advantageous depending on the circumstance (e.g., when the target nucleic acid is an RNA that is present in the cytosol).

[0199] In some embodiments, a heterologous peptide or heterologous polypeptide comprises a chloroplast transit peptide (CTP), also referred to as a chloroplast localization signal or a plastid transit peptide, which targets the effector protein to a chloroplast. Chromosomal transgenes from bacterial sources may require a sequence encoding a CTP sequence fused to a sequence encoding an expressed protein (e.g., the effector protein) if the expressed protein is to be compartmentalized in the plant plastid (e.g., chloroplast). The CTP may be removed in a processing step during translocation into the plastid. Accordingly, localization of an effector protein to a chloroplast is often accomplished by means of operably linking a polynucleotide sequence encoding a CTP sequence to the 5′ region of a polynucleotide encoding the exogenous protein.

[0200] In some embodiments, the heterologous polypeptide is an endosomal escape peptide (EEP). An EEP is an agent that quickly disrupts the endosome in order to minimize the amount of time that a delivered molecule, such an effector protein, spends in the endosome-like environment, and to avoid getting trapped in the endosomal vesicles and degraded in the lysosomal compartment.

[0201] In some embodiments, the heterologous polypeptide is a cell penetrating peptide (CPP), also known as a Protein Transduction Domain (PTD). A CPP or PTD is a polypeptide, polynucleotide, carbohydrate, or organic or inorganic compound that facilitates traversing a lipid bilayer, micelle, cell membrane, organelle membrane, or vesicle membrane.

[0202] Further suitable heterologous polypeptides include, but are not limited to, proteins (or fragments/domains thereof) that are boundary elements (e.g., CTCF), proteins and fragments thereof that provide periphery recruitment (e.g., Lamin A, Lamin B, etc.), and protein docking elements (e.g., FKBP/FRB, Pil1/Aby1, etc.).

[0203] In some embodiments, a heterologous peptide or heterologous polypeptide comprises a protein tag. In some embodiments, the protein tag is referred to as purification tag or a fluorescent protein. The protein tag may be detectable for use in detection of the effector protein and/or purification of the effector protein. Accordingly, in some embodiments, compositions, systems and methods comprise a protein tag or use thereof. Any suitable protein tag may be used depending on the purpose of its use. Non-limiting examples of protein tags include a fluorescent protein, a histidine tag, e.g., a 6λHis tag; a hemagglutinin (HA) tag; a FLAG tag; a Myc tag; and maltose binding protein (MBP). In some embodiments, the protein tag is a portion of MBP that can be detected and/or purified. Non-limiting examples of fluorescent proteins include green fluorescent protein (GFP), yellow fluorescent protein (YFP), red fluorescent protein (RFP), cyan fluorescent protein (CFP), mCherry, and tdTomato.

[0204] A heterologous polypeptide may be located at or near the amino terminus (N-terminus) of the effector protein disclosed herein. A heterologous polypeptide may be located at or near the carboxy terminus (C-terminus) of the effector proteins disclosed herein. In some embodiments, a heterologous polypeptide is located internally in an effector protein described herein (i.e., is not at the N- or C-terminus of an effector protein described herein) at a suitable insertion site.

[0205] In some embodiments, an effector protein described herein comprises 1, 2, 3, 4, 5, 6, 7, 8, 9, 10, or more heterologous polypeptides at or near the N-terminus, 1, 2, 3, 4, 5, 6, 7, 8, 9, 10, or more heterologous polypeptides at or near the C-terminus, or a combination of these (e.g., one or more heterologous polypeptides at the amino-terminus and one or more heterologous polypeptides at the carboxy terminus). When more than one heterologous polypeptide is present, each may be selected independently of the others, such that a single heterologous polypeptide may be present in more than one copy and/or in combination with one or more other heterologous polypeptides present in one or more copies. In some embodiments, a heterologous polypeptide is considered near the N- or C-terminus when the nearest amino acid of the heterologous polypeptide is within about 1, 2, 3, 4, 5, 10, 15, 20, 25, 30, 40, 50, or more amino acids along the polypeptide chain from the N- or C-terminus.

[0206] In some embodiments, a fusion partner imparts some function or activity to a fusion protein that is not provided by an effector protein. Such activities may include but are not limited to nuclease activity, methyltransferase activity, demethylase activity, DNA repair activity, DNA damage activity, deamination activity, dismutase activity, alkylation activity, depurination activity, oxidation activity, dimer forming activity (e.g., pyrimidine dimer forming activity), integrase activity, transposase activity, recombinase activity, polymerase activity, ligase activity, helicase activity, photolyase activity, glycosylase activity, acetyltransferase activity, deacetylase activity, kinase activity, phosphatase activity, ubiquitin ligase activity, deubiquitinating activity, adenylation activity, deadenylation activity, SUMOylating activity, deSUMOylating activity, ribosylation activity, deribosylation activity, myristoylation activity or demyristoylation activity, modification of a polypeptide associated with target nucleic acid (e.g., a histone), and/or signaling activity.

[0207] In some embodiments, effector proteins are targeted by a guide nucleic acid (e.g., a guide RNA) to a specific location in the target nucleic acid where they exert locus-specific regulation. Non-limiting examples of locus-specific regulation include blocking RNA polymerase binding to a promoter (which selectively inhibits transcription activator function), and/or modifying local chromatin (e.g., when a fusion sequence is used that modifies the target nucleic acid or modifies a protein associated with the target nucleic acid). The guide RNA may bind to a target nucleic acid (e.g., a single strand of a target nucleic acid) or a portion thereof, an amplicon thereof, or a portion thereof. By way of non-limiting example, a guide nucleic acid may bind to a target nucleic acid, such as DNA or RNA, from a cancer gene or gene associated with a genetic disorder, or an amplicon thereof, as described herein.

[0208] In some embodiments, a fusion partner may provide signaling activity. In some embodiments, a fusion partner may inhibit or promote the formation of multimeric complex of an effector protein. In an additional example, the fusion partner may directly or indirectly edit a target nucleic acid. Edits can be of a nucleobase, nucleotide, or nucleotide sequence of a target nucleic acid. In some embodiments, the fusion partner may interact with additional proteins, or functional fragments thereof, to make modifications to a target nucleic acid. In other embodiments, the fusion partner may modify proteins associated with a target nucleic acid. In some embodiments, a fusion partner may modulate transcription (e.g., inhibits transcription, increases transcription) of a target nucleic acid. In yet another example, a fusion partner may directly or indirectly inhibit, reduce, activate or increase expression of a target nucleic acid.

[0209] In some cases, fusion effector proteins modify a target nucleic acid or the expression thereof. In some cases, the modifications are transient (e.g., transcription repression or activation). In some cases, the modifications are inheritable. For instance, epigenetic modifications made to a target nucleic acid, or to proteins associated with the target nucleic acid, e.g., nucleosomal histones, in a cell, are observed in cells produced by proliferation of the cell.

[0210] In some embodiments, fusion partners inhibit or reduce expression of a target nucleic acid. In some embodiments, fusion partners reduce expression of the target nucleic acid relative to its expression in the absence of the fusion effector protein. Relative expression, including transcription and RNA levels, may be assessed, quantified, and compared, e.g., by RT-qPCR. In some embodiments, fusion partners may comprise a transcriptional repressor. Transcriptional repressors may inhibit transcription via: recruitment of other transcription factor proteins; modification of target DNA such as methylation; recruitment of a DNA modifier; modulation of histones associated with target DNA; recruitment of a histone modifier such as those that modify acetylation and/or methylation of histones; or a combination thereof. Non-limiting examples of fusion partners that decrease or inhibit transcription include, but are not limited to: histone lysine methyltransferases; histone lysine demethylases; histone lysine deacetylases; and DNA methylases; and functional domains thereof.

[0211] In some embodiments, fusion partners activate or increase expression of a target nucleic acid. In some embodiments, fusion partners increase expression of the target nucleic acid relative to its expression in the absence of the fusion effector protein. Relative expression, including transcription and RNA levels, may be assessed, quantified, and compared, e.g., by RT-qPCR. In some embodiments, fusion partners comprise a transcriptional activator. Transcriptional activators may promote transcription via: recruitment of other transcription factor proteins; modification of target DNA such as demethylation; recruitment of a DNA modifier; modulation of histones associated with target DNA; recruitment of a histone modifier such as those that modify acetylation and/or methylation of histones; or a combination thereof. Non-limiting examples of fusion partners that activate or increase transcription include, but are not limited to: histone lysine methyltransferases; histone lysine demethylases; histone acetyltransferases; and DNA demethylases; and functional domains thereof.

[0212] In some embodiments, fusion partners comprise an RNA splicing factor. The RNA splicing factor may be used (in whole or as fragments thereof) for modular organization, with separate sequence-specific RNA binding modules and splicing effector domains. Non-limiting examples of RNA splicing factors include members of the Serine/Arginine-rich (SR) protein family contain N-terminal RNA recognition motifs (RRMs) that bind to exonic splicing enhancers (ESEs) in pre-mRNAs and C-terminal RS domains that promote exon inclusion. As another example, the hnRNP protein hnRNP A1 binds to exonic splicing silencers (ESSs) through its RRM domains and inhibits exon inclusion through a C-terminal Glycine-rich domain. Some splicing factors may regulate alternative use of splice site (ss) by binding to regulatory sequences between the two alternative sites. For example, ASF/SF2 may recognize ESEs and promote the use of intron proximal sites, whereas hnRNP A1 may bind to ESSs and shift splicing towards the use of intron distal sites. One application for such factors is to generate ESFs that modulate alternative splicing of endogenous genes, particularly disease associated genes. For example, Bcl-x pre-mRNA produces two splicing isoforms with two alternative 5′ splice sites to encode proteins of opposite functions. The long splicing isoform Bcl-xL is a potent apoptosis inhibitor expressed in long-lived postmitotic cells and is up-regulated in many cancer cells, protecting cells against apoptotic signals. The short isoform Bcl-xS is a pro-apoptotic isoform and expressed at high levels in cells with a high turnover rate (e.g., developing lymphocytes). The ratio of the two Bcl-x splicing isoforms is regulated by multiple c\acute{ω}-elements that are located in either the core exon region or the exon extension region (i.e., between the two alternative 5′ splice sites). For more examples, see WO2010075303, which is hereby incorporated by reference in its entirety.

[0213] In some cases, fusion effector proteins modify a target nucleic acid or the expression thereof, wherein the target nucleic acid comprises a deoxyribonucleoside, a ribonucleoside or a combination thereof. The target nucleic acid may comprise or consist of a single stranded RNA (ssRNA), a double-stranded RNA (dsRNA), a single-stranded DNA (ssDNA), or a double stranded DNA (dsDNA). Non-limiting examples of fusion partners for modifying ssRNA include, but are not limited to, splicing factors (e.g., RS domains); protein translation components (e.g., translation initiation, elongation, and/or release factors; e.g., eIF4G); RNA methylases; RNA editing enzymes (e.g., RNA deaminases, e.g., adenosine deaminase acting on RNA (ADAR), including A to I and/or C to U editing enzymes); helicases; and RNA-binding proteins.

### Multimeric Complex Formation Modification Activity

[0214] In some embodiments, a fusion partner may inhibit the formation of a multimeric complex of an effector protein. Alternatively, the fusion partner promotes the formation of a multimeric complex of the effector protein. By way of non-limiting example, the fusion protein may comprise an effector protein described herein and a fusion partner comprising a Calcineurin A tag, wherein the fusion protein dimerizes in the presence of Tacrolimus (FK506). Also, by way of non-limiting example, the fusion protein may comprise an effector protein described herein and a SpyTag configured to dimerize or associate with another effector protein in a multimeric complex. Multimeric complex formation is further described herein.

### Nucleic Acid Modification Activity

[0215] In some embodiments, fusion partners have enzymatic activity that modifies a nucleic acid, such as a target nucleic acid. In some embodiments, the target nucleic acid may comprise or consist of a ssRNA, dsRNA, ssDNA, or a dsDNA. Examples of enzymatic activity that modifies the target nucleic acid include, but are not limited to: nuclease activity, which comprises the enzymatic activity of an enzyme which allows the enzyme to cleave the phosphodiester bonds between the nucleotide subunits of nucleic acids, such as that provided by a restriction enzyme, or a nuclease (e.g., FokI nuclease); methyltransferase activity such as that provided by a methyltransferase (e.g., HhaI DNA m5c-methyltransferase (M.HhaI), DNA methyltransferase 1 (DNMT1), DNA methyltransferase 3a (DNMT3a), DNA methyltransferase 3b (DNMT3b), METI, DRM3 (plants), ZMET2, CMT1, CMT2 (plants)); demethylase activity such as that provided by a demethylase (e.g., Ten-Eleven Translocation (TET) dioxygenase 1 (TET1CD), TET1, DME, DML1, DML2, ROS1); DNA repair activity; DNA damage (e.g., oxygenation) activity; deamination activity such as that provided by a deaminase (e.g., a cytosine deaminase enzyme such as rat APOBEC1); dismutase activity; alkylation activity; depurination activity; oxidation activity; pyrimidine dimer forming activity; integrase activity such as that provided by an integrase and/or resolvase (e.g., Gin invertase such as the hyperactive mutant of the Gin invertase, GinH106Y, human immunodeficiency virus type 1 integrase (IN), Tn3 resolvase); transposase activity; recombinase activity such as that provided by a recombinase (e.g., catalytic domain of Gin recombinase); polymerase activity; ligase activity; helicase activity; photolyase activity; and glycosylase activity.

[0216] The term “transposase activity” refers to catalytic activity that results in the transposition of a first nucleic acid into a second nucleic acid.

[0217] In some embodiments, fusion partners target a ssRNA, dsRNA, ssDNA, or a dsDNA. In some embodiments, fusion partners target ssRNA. Non-limiting examples of fusion partners for targeting ssRNA include, but are not limited to, splicing factors (e.g., RS domains); protein translation components (e.g., translation initiation, elongation, and/or release factors; e.g., eIF4G); RNA methylases; RNA editing enzymes (e.g., RNA deaminases, e.g., adenosine deaminase acting on RNA (ADAR), including A to I and/or C to U editing enzymes); helicases; and RNA-binding proteins.

[0218] It is understood that a fusion partner may include an entire protein, or in some embodiments, may include a fragment of the protein (e.g., a functional domain). In some embodiments, the functional domain binds or interacts with a nucleic acid, such as ssRNA, including intramolecular and/or intermolecular secondary structures thereof (e.g., hairpins, stem-loops, etc.). The functional domain may interact transiently or irreversibly, directly, or indirectly. In some embodiments, a functional domain comprises a region of one or more amino acids in a protein that is required for an activity of the protein, or the full extent of that activity, as measured in an in vitro assay. Activities include but are not limited to nucleic acid binding, nucleic acid editing, nucleic acid mutating, nucleic acid modifying, nucleic acid cleaving, protein binding or combinations thereof. The absence of the functional domain, including mutations of the functional domain, would abolish or reduce activity.

[0219] Accordingly, fusion partners may comprise a protein or domain thereof selected from: endonucleases (e.g., RNase III, the CRR22 DYW domain, Dicer, and PIN (PilT N-terminus); SMG5 and SMG6; domains responsible for stimulating RNA cleavage (e.g., CPSF, CstF, CFIm and CFIIm); exonucleases such as XRN-1 or Exonuclease T; deadenylases such as HNT3; protein domains responsible for nonsense mediated RNA decay (e.g., UPF1, UPF2, UPF3, UPF3b, RNP S1, Y14, DEK, REF2, and SRm160); protein domains responsible for stabilizing RNA (e.g., PABP); proteins and protein domains responsible for polyadenylation of RNA (e.g., PAP1, GLD-2, and Star-PAP); proteins and protein domains responsible for polyuridinylation of RNA (e.g., CI D1 and terminal uridylate transferase); and other suitable domains that affect nucleic acid modifications.

[0220] In some embodiments, an effector protein is a fusion protein, wherein the effector protein is fused to a chromatin-modifying enzyme. In some embodiments, the fusion protein chemically modifies a target nucleic acid, for example by methylating, demethylating, or acetylating the target nucleic acid in a sequence specific or non-specific manner.

### Base Editors

[0221] In some embodiments, fusion partners edit a nucleobase of a target nucleic acid. Fusion proteins comprising such a fusion partner and an effector protein may be referred to as base editors. Such a fusion partner may be referred to as a base editing enzyme. In some embodiments, a base editor comprises a base editing enzyme variant that differs from a naturally occurring base editing enzyme, but it is understood that any reference to a base editing enzyme herein also refers to a base editing enzyme variant. In some embodiments, a base editor may be a fusion protein comprising a base editing enzyme fused or linked to an effector protein. In some embodiments, the amino terminus of the fusion partner protein is linked to the carboxy terminus of the effector protein by the linker. In some embodiments, the carboxy terminus of the fusion partner protein is linked to the amino terminus of the effector protein by the linker. The base editor may be functional when the effector protein is coupled to a guide nucleic acid. The base editor may be functional when the effector protein is coupled to a guide nucleic acid. The guide nucleic acid imparts sequence specific activity to the base editor. By way of non-limiting example, the effector protein may comprise a catalytically inactive effector protein (e.g., a catalytically inactive variant of an effector protein described herein). Also, by way of non-limiting example, the base editing enzyme may comprise deaminase activity. Additional base editors are described herein.

[0222] In some embodiments, base editors are capable of catalyzing editing (e.g., a chemical modification) of a nucleobase of a nucleic acid molecule, such as DNA or RNA (single stranded or double stranded). In some embodiments, a base editing enzyme, and therefore a base editor, is capable of converting an existing nucleobase to a different nucleobase, such as: an adenine (A) to guanine (G); cytosine (C) to thymine (T); cytosine (C) to guanine (G); uracil (U) to cytosine (C); guanine (G) to adenine (A); hydrolytic deamination of an adenine or adenosine, or methylation of cytosine (e.g., CpG, CpA, CpT or CpC). In some embodiments, base editors edit a nucleobase on a ssDNA. In some embodiments, base editors edit a nucleobase on both strands of dsDNA. In some embodiments, base editors edit a nucleobase of an RNA.

[0223] In some embodiments, a base editing enzyme itself may or may not bind to the nucleic acid molecule containing the nucleobase. In some embodiments, upon binding to its target locus in the target nucleic acid (e.g., a DNA molecule), base pairing between the guide nucleic acid and target strand leads to displacement of a small segment of ssDNA in an “R-loop”. In some embodiments, DNA bases within the R-loop are edited by the base editor having the deaminase enzyme activity. In some embodiments, base editors for improved efficiency in eukaryotic cells comprise a catalytically inactive effector protein that may generate a nick in the non-edited strand, inducing repair of the non-edited strand using the edited strand as a template.

[0224] In some embodiments, a base editing enzyme comprises a deaminase enzyme. Exemplary deaminases are described in US20210198330, WO2021041945, WO2021050571A1, and WO2020123887, all of which are incorporated herein by reference in their entirety. Exemplary deaminase domains are described WO 2018027078 and WO2017070632, and each are hereby incorporated in its entirety by reference. Also, additional exemplary deaminase domains are described in Komor et al., Nature, 533, 420-424 (2016); Gaudelli et al., Nature, 551, 464-471 (2017); Komor et al., Science Advances, 3:eaao4774 (2017), and Rees et al., Nat Rev Genet. 2018 December; 19(12):770-788. doi: 10.1038/s41576-018-0059-1, which are hereby incorporated by reference in their entirety. In some embodiments, the deaminase functions as a monomer. In some embodiments, the deaminase functions as heterodimer with an additional protein. In some embodiments, base editors comprise a DNA glycosylase inhibitor (e.g., an uracil glycosylase inhibitor (UGI) or uracil N-glycosylase (UNG)). In some embodiments, the fusion partner is a deaminase, e.g., ADAR1/2, ADAR-2, AID, or any function variant thereof.

[0225] In some embodiments, a base editor is a cytosine base editor (CBE). In some embodiments, the CBE may convert a cytosine to a thymine. In some embodiments, a cytosine base editing enzyme may accept ssDNA as a substrate but may not be capable of cleaving dsDNA, as fused to a catalytically inactive effector protein. In some embodiments, when bound to its cognate DNA, the catalytically inactive effector protein of the CBE may perform local denaturation of the DNA duplex to generate an R-loop in which the DNA strand not paired with a guide nucleic acid exists as a disordered single-stranded bubble. In some embodiments, the catalytically inactive effector protein generated ssDNA R-loop may enable the CBE to perform efficient and localized cytosine deamination in vitro. In some embodiments, deamination activity is exhibited in a window of about 4 to about 10 base pairs. In some embodiments, fusion to the catalytically inactive effector protein presents a target site to the cytosine base editing enzyme in high effective molarity, which may enable the CBE to deaminate cytosines located in a variety of different sequence motifs, with differing efficacies. In some embodiments, the CBE is capable of mediating RNA-programmed deamination of target cytosines in vitro or in vivo. In some embodiments, the cytosine base editing enzyme is a cytidine deaminase. In some embodiments, the cytosine base editing enzyme is a cytosine base editing enzyme described by Koblan et al. (2018) Nature Biotechnology 36:848-846; Komor et al. (2016) Nature 533:420-424; Koblan et al. (2021) “Efficient C·G-to-G·C base editors developed using CRISPRi screens, target-library analysis, and machine learning,” Nature Biotechnology; Kurt et al. (2021) Nature Biotechnology 39:41-46; Zhao et al. (2021) Nature Biotechnology 39:35-40; and Chen et al. (2021) Nature Communications 12:1384, all incorporated herein by reference.

[0226] In some embodiments, CBEs comprise a uracil glycosylase inhibitor (UGI) or uracil N-glycosylase (UNG). In some embodiments, base excision repair (BER) of U·G in DNA is initiated by a UNG, which recognizes a U·G mismatch and cleaves the glyosidic bond between a uracil and a deoxyribose backbone of DNA. In some embodiments, BER results in the reversion of the U⋅G intermediate created by the first CBE back to a C⋅G base pair. In some embodiments, the UNG may be inhibited by fusion of a UGI. In some embodiments, the CBE comprises a UGI. In some embodiments, a C-terminus of the CBE comprises the UGI. In some embodiments, the UGI is a small protein from bacteriophage PBS. In some embodiments, the UGI is a DNA mimic that potently inhibits both human and bacterial UNG. In some embodiments, the UGI inhibitor is any protein or polypeptide that inhibits UNG. In some embodiments, the CBE may mediate efficient base editing in bacterial cells and moderately efficient editing in mammalian cells, enabling conversion of a C⋅G base pair to a T⋅A base pair through a U⋅G intermediate. In some embodiments, the CBE is modified to increase base editing efficiency while editing more than one strand of DNA.

[0227] In some embodiments, a CBE nicks a non-edited DNA strand. In some embodiments, the non-edited DNA strand nicked by the CBE biases cellular repair of a U⋅G mismatch to favor a U⋅A outcome, elevating base editing efficiency. In some embodiments, a APOBEC1-nickase-UGI fusion efficiently edits in mammalian cells, while minimizing frequency of non-target indels. In some embodiments, base editors do not comprise a functional fragment of the base editing enzyme. In some embodiments, base editors do not comprise a function fragment of a UGI, where such a fragment may be capable of excising a uracil residue from DNA by cleaving an N-glycosidic bond.

[0228] In some embodiments, the fusion protein further comprises a non-protein uracil-DNA glycosylase inhibitor (npUGI). In some embodiments, the npUGI is selected from a group of small molecule inhibitors of uracil-DNA glycosylase (UDG), or a nucleic acid inhibitor of UDG. In some embodiments, the npUGI is a small molecule derived from uracil. Examples of small molecule non-protein uracil-DNA glycosylase inhibitors, fusion proteins, and Cas-CRISPR systems comprising base editing activity are described in WO2021087246, which is incorporated by reference in its entirety.

[0229] In some embodiments, a cytosine base editing enzyme, and therefore a cytosine base editor, is a cytidine deaminase. In some embodiments, the cytidine deaminase base editor is generated by ancestral sequence reconstruction as described in WO2019226953, which is hereby incorporated by reference in its entirety. Non-limiting exemplary cytidine deaminases suitable for use with effector proteins described herein include: APOBEC1, APOBEC2, APOBEC3C, APOBEC3D, APOBEC3F, APOBEC3G, APOBEC3H, APOBEC4, APOBEC3A, BE1 (APOBEC1-XTEN-dCas9), BE2 (APOBEC1-XTEN-dCas9-UGI), BE3 (APOBEC1-XTEN-dCas9(A840H)-UGI), BE3-Gam, saBE3, saBE4-Gam, BE4, BE4-Gam, saBE4, and saBE4-Gam as described in WO2021163587, WO2021087246, WO2021062227, and WO2020123887, which are incorporated herein by reference in their entirety.

[0230] In some embodiments, a base editor is a cytosine to guanine base editor (CGBE). A CGBE may convert a cytosine to a guanine.

[0231] In some embodiments, a base editor is an adenine base editor (ABE). An ABE may convert an adenine to a guanine. In some embodiments, an ABE converts an A⋅T base pair to a G⋅C base pair. In some embodiments, the ABE converts a target A⋅T base pair to G⋅C in vivo or in vitro. In some embodiments, ABEs provided herein reverse spontaneous cytosine deamination, which has been linked to pathogenic point mutations. In some embodiments, ABEs provided herein enable correction of pathogenic SNPs (˜47% of disease-associated point mutations). In some embodiments, the adenine comprises exocyclic amine that has been deaminated (e.g., resulting in altering its base pairing preferences). In some embodiments, deamination of adenosine yields inosine. In some embodiments, inosine exhibits the base-pairing preference of guanine in the context of a polymerase active site, although inosine in the third position of a tRNA anticodon is capable of pairing with A, U, or C in mRNA during translation. Non-limiting exemplary adenine base editing enzymes suitable for use with effector proteins described herein include: ABE8e, ABE8.20m, APOBEC3A, Anc APOBEC (a.k.a. AncBE4Max), and BtAPOBEC2. Non-limiting exemplary ABEs suitable for use herein include: ABE7, ABE8.1m, ABE8.2m, ABE8.3m, ABE8.4m, ABE8.5m, ABE8.6m, ABE8.7m, ABE8.8m, ABE8.9m, ABE8.10m, ABE8.11m, ABE8.12m, ABE8.13m, ABE8.14m, ABE8.15m, ABE8.16m, ABE8.17m, ABE8.18m, ABE8.19m, ABE8.20m, ABE8.21m, ABE8.22m, ABE8.23m, ABE8.24m, ABE8.1d, ABE8.2d, ABE8.3d, ABE8.4d, ABE8.5d, ABE8.6d, ABE8.7d, ABE8.8d, ABE8.9d, ABE8.10d, ABE8.11d, ABE8.12d, ABE8.13d, ABE8.14d, ABE8.15d, ABE8.16d, ABE8.17d, ABE8.18d, ABE8.19d, ABE8.20d, ABE8.21d, ABE8.22d, ABE8.23d, and ABE8.24d. In some embodiments, the adenine base editing enzyme is an adenine base editing enzyme described in Chu et al., (2021) The CRISPR Journal 4:2:169-177, incorporated herein by reference. In some embodiments, the adenine deaminase is an adenine deaminase described by Koblan et al. (2018) Nature Biotechnology 36:848-846, incorporated herein by reference. In some embodiments, the adenine base editing enzyme is an adenine base editing enzyme described by Tran et al. (2020) Nature Communications 11:4871.

[0232] In some embodiments, an adenine base editing enzyme of an ABE is an adenosine deaminase. Non-limiting exemplary adenosine base editors suitable for use herein include ABE9. In some embodiments, the ABE comprises an engineered adenosine deaminase enzyme capable of acting on ssDNA. The engineered adenosine deaminase enzyme may be an adenosine deaminase variant that differs from a naturally occurring deaminase. Relative to the naturally occurring deaminase, the adenosine deaminase variant may comprise one or more amino acid alteration, including a V82S alteration, a T166R alteration, a Y147T alteration, a Y147R alteration, a Q154S alteration, a Y123H alteration, a Q154R alteration, or a combination thereof.

[0233] In some embodiments, a base editor comprises a deaminase dimer. In some embodiments, the base editor further comprising a base editing enzyme and an adenine deaminase (e.g., TadA). In some embodiments, the adenosine deaminase is a TadA monomer (e.g., Tad*7.10, TadA*8 or TadA*9). In some embodiments, the adenosine deaminase is a TadA*8 variant (e.g., any one of TadA*8.1, TadA*8.2, TadA*8.3, TadA*8.4, TadA*8.5, TadA*8.6, TadA*8.7, TadA*8.8, TadA*8.9, TadA*8.10, TadA*8.11, TadA*8.12, TadA*8.13, TadA*8.14, TadA*8.15, TadA*8.16, TadA*8.17, TadA*8.18, TadA*8.19, TadA*8.20, TadA*8.21, TadA*8.22, TadA*8.23, or TadA*8.24 as described in WO2021163587 and WO2021050571, which are each hereby incorporated by reference in its entirety).

[0234] In some embodiments, the base editor comprises a base editing enzyme fused to TadA by a linker (e.g., wherein the base editing enzyme is fused to TadA at N-terminus or C-terminus by a linker).

[0235] In some embodiments, a base editing enzyme is a deaminase dimer comprising an ABE. In some embodiments, the deaminase dimer comprises an adenosine deaminase. In some embodiments, the deaminase dimer comprises TadA fused to a suitable adenine base editing enzyme including an: ABE8e, ABE8.20m, APOBEC3A, Anc APOBEC (a.k.a. AncBE4Max), BtAPOBEC2, and variants thereof. In some embodiments, the adenine base editing enzyme is fused to amino-terminus or the carboxy-terminus of TadA.

[0236] In some embodiments, RNA base editors comprise an adenosine deaminase. In some embodiments, ADAR proteins bind to RNAs and alter their sequence by changing an adenosine into an inosine. In some embodiments, RNA base editors comprise an effector protein that is activated by or binds RNA.

[0237] In some embodiments, base editors are used to treat a subject having or a subject suspected of having a disease related to a gene of interest. In some embodiments, base editors are useful for treating a disease or a disorder caused by a point mutation in a gene of interest. In some embodiments, compositions, systems, and methods described herein comprise a base editor and a guide nucleic acid, wherein the guide nucleic acid directs the base editor to a sequence in a target gene. The target gene may be associated with a disease. In some embodiments, the guide nucleic acid directs that base editor to or near a mutation in the sequence of a target gene. The mutation may be the deletion of one more nucleotides. The mutation may be the addition of one or more nucleotides. The mutation may be the substitution of one or more nucleotides. The mutation may be the insertion, deletion or substitution of a single nucleotide, also referred to as a point mutation. The point mutation may be a SNP. The mutation may be associated with a disease. In some embodiments, the guide nucleic acid directs the the base editor to bind a target sequence within the target nucleic acid that is within 0, 1, 2, 3, 4, 5, 6, 7, 8, 9, 10, 11, 12, 13, 14, 15, 16, 17, 18, 19, or 20 nucleotides of the mutation. In some embodiments, the guide nucleic acid comprises a sequence that is identical, complementary or reverse complementary to a target sequence of a target nucleic acid that comprises the mutation. In some embodiments, the guide nucleic acid comprises a sequence that is identical, complementary or reverse complementary to a target sequence of a target nucleic acid that is within 1, 2, 3, 4, 5, 6, 7, 8, 9, 10, 11, 12, 13, 14, 15, 16, 17, 18, 19, or 20 nucleotides of the mutation.

### Prime Editing

[0238] In some embodiments, a fusion protein and/or a fusion partner can comprise a prime editing enzyme. In some embodiments, a prime editing enzyme comprises a reverse transcriptase. A non-limiting example of a reverse transcriptase is an M-MLV RT enzyme and variants thereof having polymerase activity. In some embodiments, the M-MLV RT enzyme comprises at least one mutation selected from D200N, L603W, T330P, T306K, and W313F relative to wildtype M-MLV RT enzyme.

[0239] In some embodiments, a prime editing enzyme may require a prime editing guide RNA (pegRNA) to catalyze an editing. Such a pegRNA may be capable of identifying a target nucleotide or target sequence in a target nucleic acid to be edited and encoding a new genetic information that replaces the target nucleotide or target sequence in the target nucleic acid. A prime editing enzyme may require a pegRNA and a single guide RNA to catalyze the editing. In some embodiments, the target nucleic acid is a dsDNA molecule. In some embodiments, the pegRNA comprises a guide RNA comprising a first region that is bound by the effector protein, and a second region comprising a spacer sequence that is complementary to a target sequence of the dsDNA molecule; a template RNA comprising a primer binding sequence that hybridizes to a primer sequence of the dsDNA molecule that is formed when target nucleic acid is cleaved, and a template sequence that is complementary to at least a portion of the target sequence of the dsDNA molecule with the exception of at least one nucleotide. In some embodiments, the spacer sequence is complementary to the target sequence on a target strand of the dsDNA molecule. In some embodiments, the spacer sequence is complementary to the target sequence on a non-target strand of the dsDNA molecule. In some embodiments, the primer binding sequence hybridizes to a primer sequence on the non-target strand of the dsDNA molecule. In some embodiments, the primer binding sequence hybridizes to a primer sequence on the target strand of the dsDNA molecule. In some embodiments, the target strand is cleaved. In some embodiments, the non-target strand is cleaved.

### Protein Modification Activity

[0240] In some embodiments, a fusion partner provides enzymatic activity that modifies a protein associated with a target nucleic acid. The protein may be a histone, an RNA binding protein, or a DNA binding protein. Examples of such protein modification activities include: methyltransferase activity, such as that provided by a histone methyltransferase (HMT) (e.g., suppressor of variegation 3-9 homolog 1 (SUV39H1, also known as KMT1A), euchromatic histone lysine methyltransferase 2 (G9A, also known as KMT1C and EHMT2), SUV39H2, ESET/SETDB1, SET1A, SET1B, MLL1 to 5, ASH1, SYMD2, NSD1, DOT1L, Pr-SET7/8, SUV4-20H1, EZH2, RIZ1); demethylase activity such as that provided by a histone demethylase (e.g., Lysine Demethylase 1A (KDM1A also known as LSD1), JHDM2a/b, JMJD2A/JHDM3A, JMJD2B, JMJD2C/GASC1, JMJD2D, JARID1A/RBP2, JARID1B/PLU-1, JARID1C/SMCX, JARID1D/SMCY, UTX, JMJD3); acetyltransferase activity such as that provided by a histone acetylase transferase (e.g., catalytic core/fragment of the human acetyltransferase p300, GCN5, PCAF, CBP, TAF1, TIP60/PLIP, MOZ/MYST3, MORF/MYST4, HBO1/MYST2, HMOF/MYST1, SRC1, ACTR, P160, CLOCK); deacetylase activity such as that provided by a histone deacetylase (e.g., HDAC1, HDAC2, HDAC3, HDAC8, HDAC4, HDAC5, HDAC7, HDAC9, SIRT1, SIRT2, HDAC11); kinase activity; phosphatase activity; ubiquitin ligase activity; deubiquitinating activity; adenylation activity; deadenylation activity; SUMOylating activity; deSUMOylating activity; ribosylation activity; deribosylation activity; myristoylation activity; and demyristoylation activity.

### CRISPRa Fusions and CRISPRi Fusions

[0241] In some embodiments, fusion partners include, but are not limited to, a protein that directly and/or indirectly provides for increased or decreased transcription and/or translation of a target nucleic acid (e.g., a transcription activator or a fragment thereof, a protein or fragment thereof that recruits a transcription activator, a small molecule/drug-responsive transcription and/or translation regulator, a translation-regulating protein, etc.). In some embodiments, fusion partners that increase or decrease transcription include a transcription activator domain or a transcription repressor domain, respectively.

[0242] In some embodiments, fusion partners activate or increase expression of a target nucleic acid. Such fusion proteins comprising the described fusion partners and an effector protein may be referred to as CRISPRa fusions. In some embodiments, fusion partners increase expression of the target nucleic acid relative to its expression in the absence of the fusion effector protein. Relative expression, including transcription and RNA levels, may be assessed, quantified, and compared, e.g., by RT-qPCR. In some embodiments, fusion partners comprise a transcriptional activator. In some embodiments, the transcriptional activators may promote transcription by: recruitment of other transcription factor proteins; modification of target DNA such as demethylation; recruitment of a DNA modifier; modulation of histones associated with target DNA; recruitment of a histone modifier such as those that modify acetylation and/or methylation of histones; or a combination thereof. In some embodiments, the fusion partner is a reverse transcriptase.

[0243] Non-limiting examples of fusion partners that promote or increase transcription include: transcriptional activators such as VP16, VP64, VP48, VP160, p65 subdomain (e.g., from NFkB), and activation domain of EDLL and/or TAL activation domain (e.g., for activity in plants); histone lysine methyltransferases such as SET1A, SET1B, MLL1 to 5, ASH1, SYMD2, NSD1; histone lysine demethylases such as JHDM2a/b, UTX, JMJD3; histone acetyltransferases such as GCN5, PCAF, CBP, p300, TAF1, TIP60/PLIP, MOZ/MYST3, MORF/MYST4, SRC1, ACTR, P160, CLOCK; and DNA demethylases such as Ten-Eleven Translocation (TET) dioxygenase 1 (TET1CD), TET1, DME, DML1, DML2, and ROS1; and functional domains thereof. Other non-limiting examples of suitable fusion partners include: proteins and protein domains responsible for stimulating translation (e.g., Staufen); proteins and protein domains responsible for (e.g., capable of) modulating translation (e.g., translation factors such as initiation factors, elongation factors, release factors, etc., e.g., eIF4G); proteins and protein domains responsible for stimulation of RNA splicing (e.g., Serine/Arginine-rich (SR) domains); and proteins and protein domains responsible for stimulating transcription (e.g., CDK7 and HIV Tat).

[0244] In some embodiments, fusions partners inhibit or reduce expression of a target nucleic acid. Such fusion proteins comprising described fusion partners and an effector protein may be referred to as CRISPRi fusions. In some embodiments, fusion partners reduce expression of the target nucleic acid relative to its expression in the absence of the fusion effector protein. Relative expression, including transcription and RNA levels, may be assessed, quantified, and compared, e.g., by RT-qPCR. In some embodiments, fusion partners may comprise a transcriptional repressor. In some embodiments, the transcriptional repressors may inhibit transcription by: recruitment of other transcription factor proteins; modification of target DNA such as methylation; recruitment of a DNA modifier; modulation of histones associated with target DNA; recruitment of a histone modifier such as those that modify acetylation and/or methylation of histones; or a combination thereof.

[0245] Non-limiting examples of fusion partners that decrease or inhibit transcription include: transcriptional repressors such as the Krüppel associated box (KRAB or SKD); KOX1 repression domain; the Mad mSIN3 interaction domain (SID); the ERF repressor domain (ERD), the SRDX repression domain (e.g., for repression in plants); histone lysine methyltransferases such as Pr-SET7/8, SUV4-20H1, RIZ1, and the like; histone lysine demethylases such as JMJD2A/JHDM3A, JMJD2B, JMJD2C/GASC1, JMJD2D, JARID1A/RBP2, JARID1B/PLU-1, JARID1C/SMCX, JARID1D/SMCY; histone lysine deacetylases such as HDAC1, HDAC2, HDAC3, HDAC8, HDAC4, HDAC5, HDAC7, HDAC9, SIRT1, SIRT2, HDAC11; DNA methylases such as HhaI DNA m5c-methyltransferase (M.HhaI), DNA methyltransferase 1 (DNMT1), DNA methyltransferase 3a (DNMT3a), DNA methyltransferase 3b (DNMT3b), METI, DRM3 (plants), ZMET2, CMT1, CMT2 (plants); and periphery recruitment elements such as Lamin A, and Lamin B; and functional domains thereof. Other non-limiting examples of suitable fusion partners include: proteins and protein domains responsible for repressing translation (e.g., Ago2 and Ago4); proteins and protein domains responsible for repression of RNA splicing (e.g., PTB, Sam68, and hnRNP A1); proteins and protein domains responsible for reducing the efficiency of transcription (e.g., FUS (TLS)).

[0246] In some embodiments, fusion proteins are targeted by a guide nucleic acid (e.g., guide RNA) to a specific location in a target nucleic acid and exert locus-specific regulation such as blocking RNA polymerase binding to a promoter (which selectively inhibits transcription activator function), and/or changes a local chromatin status (e.g., when a fusion sequence is used that edits the target nucleic acid or modifies a protein associated with the target nucleic acid). In some embodiments, the modifications are transient (e.g., transcription repression or activation). In some embodiments, the modifications are inheritable. For example, epigenetic modifications made to a target nucleic acid, or to proteins associated with the target nucleic acid, e.g., nucleosomal histones, in a cell, can be observed in a successive generation.

[0247] In some embodiments, fusion partner comprises an RNA splicing factor. The RNA splicing factor may be used (in whole or as fragments thereof) for modular organization, with separate sequence-specific RNA binding modules and splicing effector domains. In some embodiments, the RNA splicing factors comprise members of the Serine/Arginine-rich (SR) protein family containing N-terminal RNA recognition motifs (RRMs) that bind to exonic splicing enhancers (ESEs) in pre-mRNAs and C-terminal RS domains that promote exon inclusion. In some embodiments, a hnRNP protein hnRNP A1 binds to exonic splicing silencers (ESSs) through its RRM domains and inhibits exon inclusion through a C-terminal Glycine-rich domain. In some embodiments, the RNA splicing factors may regulate alternative use of splice site (ss) by binding to regulatory sequences between two alternative sites. For example, in some embodiments, ASF/SF2 may recognize ESEs and promote the use of intron proximal sites, whereas hnRNP A1 may bind to ESSs and shift splicing towards the use of intron distal sites. One application for such factors is to generate ESFs that modulate alternative splicing of endogenous genes, particularly disease associated genes. For example, Bcl-x pre-mRNA produces two splicing isoforms with two alternative 5′ splice sites to encode proteins of opposite functions. Long splicing isoform Bcl-xL is a potent apoptosis inhibitor expressed in long-lived postmitotic cells and is up-regulated in many cancer cells, protecting cells against apoptotic signals. Short isoform Bcl-xS is a pro-apoptotic isoform and expressed at high levels in cells with a high turnover rate (e.g., developing lymphocytes). A ratio of the two Bcl-x splicing isoforms is regulated by multiple c\acute{ω}-elements that are located in either core exon region or exon extension region (i.e., between the two alternative 5′ splice sites). For more examples, see WO2010075303, which is hereby incorporated by reference in its entirety.

### Recombinases

[0248] In some embodiments, fusion partners comprise a recombinase. In some embodiments, effector proteins described herein are fused with the recombinase. In some embodiments, the effector proteins have reduced nuclease activity or no nuclease activity. In some embodiments, the recombinase is a site-specific recombinase.

[0249] In some embodiments, a catalytically inactive effector protein is fused with a recombinase, wherein the recombinase can be a site-specific recombinase. Such polypeptides can be used for site-directed transgene insertion. The term “transgene” refers to a nucleotide sequence that is inserted into a cell for expression of said nucleotide sequence in the cell. A transgene is meant to include (1) a nucleotide sequence that is not naturally found in the cell (e.g., a heterologous nucleotide sequence); (2) a nucleotide sequence that is a mutant form of a nucleotide sequence naturally found in the cell into which it has been introduced; (3) a nucleotide sequence that serves to add additional copies of the same (e.g., exogenous or homologous) or a similar nucleotide sequence naturally occurring in the cell into which it has been introduced; or (4) a silent naturally occurring or homologous nucleotide sequence whose expression is induced in the cell into which it has been introduced. A donor nucleic acid can comprise a transgene. The cell in which transgene expression occurs can be a target cell, such as a host cell. Non-limiting examples of site-specific recombinases include a tyrosine recombinase (e.g., Cre, Flp or lambda integrase), a serine recombinase (e.g., gamma-delta resolvase, Tn3 resolvase, Sin resolvase, Gin invertase, Hin invertase, Tn5044 resolvase, IS607 transposase and integrase), or mutants or variants thereof. In some embodiments, the recombinase is a serine recombinase. Non-limiting examples of serine recombinases include gamma-delta resolvase, Tn3 resolvase, Sin resolvase, Gin invertase, Hin invertase, Tn5044 resolvase, IS607 transposase, and IS607 integrase. In some embodiments, the site-specific recombinase is an integrase. Non-limiting examples of integrases include: Bxb1, wBeta, BL3, phiR4, A118, TG1, MR11, phi370, SPBc, TP901-1, phiRV, FC1, K38, phiBT1, and phiC31. Further discussion and examples of suitable recombinase fusion partners are described in U.S. Pat. No. 10,975,392, which is incorporated herein by reference in its entirety. In some embodiments, the fusion protein comprises a linker that links the recombinase to the Cas-CRISPR domain of the effector protein. In some embodiments, the linker is The-Ser.

[0250] In some embodiments, the fusion partner protein is fused to the 3′ end of the effector protein. In some embodiments, the effector protein is located at an internal location of the fusion partner protein. In some embodiments, the fusion partner protein is located at an internal location of the Cas effector protein. For example, a base editing enzyme (e.g., a deaminase enzyme) is inserted at an internal location of a Cas effector protein. The effector protein may be fused directly or indirectly (e.g., via a linker) to the fusion partner protein. Exemplary linkers are described herein.

[0251] In some embodiments, the fusion effector protein or the guide nucleic acid comprises a chemical modification that allows for direct crosslinking between the guide nucleic acid or the effector protein and the fusion partner. By way of non-limiting example, the chemical modification may comprise any one of a SNAP-tag, CLIP-tag, ACP-tag, Halo-tag, and an MCP-tag. In some embodiments, modifications are introduced with a Click Reaction, also known as Click Chemistry. The Click reaction may be copper dependent or copper independent.

[0252] In some embodiments, guide nucleic acids comprise an aptamer. The aptamer may serve as a linker between the effector protein and the fusion partner by interacting non-covalently with both. In some embodiments, the aptamer binds a fusion partner, wherein the fusion partner is a transcriptional activator. In some embodiments, the aptamer binds a fusion partner, wherein the fusion partner is a transcriptional inhibitor. In some embodiments, the aptamer binds a fusion partner, wherein the fusion partner comprises a base editor. In some embodiments, the aptamer binds the fusion partner directly. In some embodiments, the aptamer binds the fusion partner indirectly. Aptamers may bind the fusion partner indirectly through an aptamer binding protein. By way of non-limiting example, the aptamer binding protein may be MS2 and the aptamer sequence may be ACATGAGGATCACCCATGT (SEQ ID NO: 15,016); the aptamer binding protein may be PP7 and the aptamer sequence may be GGAGCAGACGATATGGCGTCGCTCC (SEQ ID NO: 15,017); or the aptamer binding protein may be BoxB and the aptamer sequence may be GCCCTGAAGAAGGGC (SEQ ID NO: 15,018).

[0253] In some embodiments, the fusion partner is located within effector protein. For example, the fusion partner may be a domain of a fusion partner protein that is internally integrated into the effector protein. In other words, the fusion partner may be located between the 5′ and 3′ ends of the effector protein without disrupting the ability of the fusion effector protein to recognize/bind a target nucleic acid. In some embodiments, the fusion partner replaces a portion of the effector protein. In some embodiments, the fusion partner replaces a domain of the effector protein. In some embodiments, the fusion partner does not replace a portion of the effector protein.

[0254] An effector protein disclosed herein or fusion effector protein may comprise a nuclear localization signal (NLS). In some cases, the NLS may comprise a sequence of KRPAATKKAGQAKKKK (SEQ ID NO: 15,019). In some cases, the NLS comprises or consists of a sequence of PKKKRKV (SEQ ID NO: 15,020). In some cases, the NLS comprises or consists of a sequence of LPPLERLTL (SEQ ID NO: 15,021). An effector protein may be codon optimized for expression in a specific cell, for example, a bacterial cell, a plant cell, a eukaryotic cell, an animal cell, a mammalian cell, or a human cell. In some embodiments, the effector protein is codon optimized for a human cell. The NLS may be located at a variety of locations, including, but not limited to 5′ of the effector protein, 5′ of the fusion partner, 3′ of the effector protein, 3′ of the fusion partner, between the effector protein and the fusion partner, within the fusion partner, within the effector protein.

### Linkers for Peptides

[0255] In general, effector proteins and fusion partners of a fusion effector protein are connected by a linker. In some embodiments, a linker comprises a bond or molecule that links a first polypeptide to a second polypeptide. The linker may comprise or consist of a covalent bond. The linker may comprise or consist of a chemical group. In some embodiments, the linker comprises an amino acid. In some embodiments, a peptide linker comprises at least two amino acids linked by an amide bond. In general, the linker connects a terminus of the effector protein to a terminus of the fusion partner. In some embodiments, carboxy terminus of the effector protein is linked to the amino terminus of the fusion partner. In some embodiments, carboxy terminus of the fusion partner is linked to the amino terminus of the effector protein. In some embodiments, the effector protein and the fusion partner are directly linked by a covalent bond.

[0256] In some embodiments, linkers comprise one or more amino acids. In some embodiments, linker is a protein. In some embodiments, a terminus of the effector protein is linked to a terminus of the fusion partner through an amide bond. In some embodiments, a terminus of the effector protein is linked to a terminus of the fusion partner through a peptide bond. In some embodiments, linkers comprise an amino acid. In some embodiments, linkers comprise a peptide. In some embodiments, an effector protein is coupled to a fusion partner by a linker protein. In some embodiments, the linker may have any of a variety of amino acid sequences. In some embodiments, the linker may comprise a region of rigidity (e.g., beta sheet, alpha helix), a region of flexibility, or any combination thereof. In some embodiments, the linker comprises small amino acids, such as glycine and alanine, that impart high degrees of flexibility. The ordinarily skilled artisan will recognize that design of a peptide conjugated to any desired element may include linkers that are all or partially flexible, such that the linker may include a flexible linker as well as one or more portions that confer less flexible structure. Suitable linkers include proteins of 4 linked amino acids to 40 linked amino acids in length, or between 4 linked amino acids and 25 linked amino acids in length. In some embodiments, linked amino acids described herein comprise at least two amino acids linked by an amide bond.

[0257] Linkers may be produced by using synthetic, linker-encoding oligonucleotides to couple proteins, or may be encoded by a nucleic acid sequence encoding a fusion protein (e.g., an effector protein coupled to a fusion partner). In some embodiments, the linker is from 1 to 100 amino acids in length. In some embodiments, the linker is more 100 amino acids in length. In some embodiments, the linker is from 10 to 27 amino acids in length. In some embodiments, linker proteins include glycine polymers (G)n, glycine-serine polymers (including, for example, (GS)n, GSGGSn, GGSGGSn, and GGGSn, where n is an integer of at least one), glycine-alanine polymers, and alanine-serine polymers. In some embodiments, linkers may comprise amino acid sequences including, but not limited to, GGSG, GGSGG, GSGSG, GSGGG, GGGSG, and GSSSG. In some embodiments, the linker comprises one or more repeats a tri-peptide GGS. In some embodiments, the linker is an XTEN linker.

[0258] In some embodiments, linkers do not comprise an amino acid. In some embodiments, linkers do not comprise a peptide. In some embodiments, linkers comprise a nucleotide, a polynucleotide, a polymer, or a lipid. In some embodiments, linker may be a polyethylene glycol (PEG), polypropylene glycol (PPG), co-poly(ethylene/propylene) glycol, polyoxyethylene (POE), polyurethane, polyphosphazene, polysaccharides, dextran, polyvinyl alcohol, polyvinylpyrrolidones, polyvinyl ethyl ether, polyacrylamide, polyacrylate, polycyanoacrylates, lipid polymers, chitins, hyaluronic acid, heparin, an alkyl linker, or a combination thereof. In some embodiments, linkers comprise or consist of a nucleic acid. In some embodiments, the nucleic acid comprises DNA. In some embodiments, the nucleic acid comprises RNA. In some embodiments, the effector protein and the fusion partner each interact with the nucleic acid, the nucleic acid thereby linking the effector protein and the fusion partner. In some embodiments, the nucleic acid serves as a scaffold for both the effector protein and the fusion partner to interact with, thereby linking the effector protein and the fusion partner. Such nucleic acids include those described by Tadakuma et al., (2016), Progress in Molecular Biology and Translational Science, Volume 139, pp. 121-163, incorporated herein by reference.

### Multimeric Complexes

[0259] Compositions, systems, and methods of the present disclosure may comprise a multimeric complex or uses thereof, wherein the multimeric complex comprises one or more effector proteins that non-covalently interact with one another. A multimeric complex may comprise enhanced activity relative to the activity of any one of its effector proteins alone. For example, a multimeric complex comprising two effector proteins (e.g., in dimeric form) may comprise greater nucleic acid binding affinity and/or nuclease activity than that of either of the effector proteins provided in monomeric form. In another example, a multimeric complex comprising an effector protein and an effector partner may comprise greater nucleic acid binding affinity and/or nuclease activity than that of either of the effector protein or effector partner provided in monomeric form.

[0260] The terms “effector partner” and “partner polypeptide” refer to a polypeptide that does not have 100% sequence identity with an effector protein described herein. In some instances, an effector partner described herein may be found in a homologous genome as an effector protein described herein.

[0261] A multimeric complex may have an affinity for a target sequence of a target nucleic acid and is capable of catalytic activity (e.g., cleaving, nicking, inserting or otherwise editing the nucleic acid) at or near the target sequence. A multimeric complex may have an affinity for a donor nucleic acid and is capable of catalytic activity (e.g., cleaving, nicking, editing or otherwise modifying the nucleic acid by creating cuts) at or near one or more ends of the donor nucleic acid. Multimeric complexes may be activated when complexed with a guide nucleic acid. Multimeric complexes may be activated when complexed with a target nucleic acid. Multimeric complexes may be activated when complexed with a guide nucleic acid, a target nucleic acid, and/or a donor nucleic acid. In some embodiments, the multimeric complex cleaves the target nucleic acid. In some embodiments, the multimeric complex nicks the target nucleic acid.

[0262] Various aspects of the present disclosure include compositions and methods comprising multiple effector proteins, and uses thereof, respectively. An effector protein comprising at least 65%, at least 70%, at least 75%, at least 80%, at least 85%, at least 90%, at least 95% or 100% sequence identity to any one of the sequences of TABLE 1 may be provided with a second effector protein. Two effector proteins may target different nucleic acid sequences. Two effector proteins may target different types of nucleic acids (e.g., a first effector protein may target double- and single-stranded nucleic acids, and a second effector protein may only target single-stranded nucleic acids). It is understood that when discussing the use of more than one effector protein in compositions, systems, and methods provided herein, the multimeric complex form is also described.

[0263] In some embodiments, multimeric complexes comprise at least one effector protein comprising an amino acid sequence with at least 65%, at least 70%, at least 75%, at least 80%, at least 85%, at least 90%, at least 95% or 100% identity to any one of the sequences of TABLE 1. In some embodiments, the multimeric complex is a dimer comprising two effector proteins of identical amino acid sequences. In some embodiments, the multimeric complex comprises a first effector protein and a second effector protein, wherein the amino acid sequence of the first effector protein is at least 90%, at least 92%, at least 94%, at least 96%, at least 98% identical, or at least 99% identical to the amino acid sequence of the second effector protein.

[0264] In some embodiments, the multimeric complex is a heterodimeric complex comprising at least two effector proteins of different amino acid sequences. In some embodiments, the multimeric complex is a heterodimeric complex comprising a first effector protein and a second effector protein, wherein the amino acid sequence of the first effector protein is less than 90%, less than 85%, less than 80%, less than 75%, less than 70%, less than 65%, less than 60%, less than 55%, less than 50%, less than 45%, less than 40%, less than 35%, less than 30%, less than 25%, less than 20%, less than 15%, or less than 10% identical to the amino acid sequence of the second effector protein.

[0265] In some embodiments, a multimeric complex comprises at least two effector proteins. In some embodiments, a multimeric complex comprises more than two effector proteins. In some embodiments, a multimeric complex comprises two, three or four effector proteins. In some embodiments, at least one effector protein of the multimeric complex comprises an amino acid sequence with at least 65%, at least 70%, at least 75%, at least 80%, at least 85%, at least 90%, at least 95% or 100% identity to any one of the sequences of TABLE 1. In some embodiments, each effector protein of the multimeric complex independently comprises an amino acid sequence with at least 65%, at least 70%, at least 75%, at least 80%, at least 85%, at least 90%, at least 95% or 100% identity to any one of the sequences of TABLE 1.

### Synthesis, Isolation and Assaying

[0266] Effector proteins of the present disclosure may be synthesized, using any suitable method. In some embodiments, the effector proteins may be produced in vitro or by eukaryotic cells or by prokaryotic cells. In some embodiments, the effector proteins may be further processed by unfolding (e.g. heat denaturation, dithiothreitol reduction, etc.) and may be further refolded, using any suitable method.

[0267] Any suitable method of generating and assaying the effector proteins described herein may be used. Such methods include, but are not limited to, site-directed mutagenesis, random mutagenesis, combinatorial libraries, and other mutagenesis methods described herein (see, e.g., Sambrook et al., Molecular Cloning: A Laboratory Manual, Third Ed., Cold Spring Harbor Laboratory, New York (2001); Ausubel et al., Current Protocols in Molecular Biology, John Wiley and Sons, Baltimore, M D (1999); Gillman et al., Directed Evolution Library Creation: Methods and Protocols (Methods in Molecular Biology) Springer, 2nd ed (2014)). One non-limiting example of a method for preparing an effector protein is to express recombinant nucleic acids encoding the effector protein in a suitable microbial organism, such as a bacterial cell, a yeast cell, or other suitable cell, using methods well known in the art. Exemplary methods are also described in the Examples provided herein.

[0268] In some embodiments, an effector protein provided herein is an isolated effector protein. In some embodiments, the effector proteins may be isolated and purified for use in compositions, systems, and/or methods described herein. In some embodiments, methods described here may include the step of isolating effector proteins described herein. Any suitable method to provide isolated effector proteins described herein may be used in the present disclosure, for example, recombinant expression systems, precipitation, gel filtration, ion-exchange, reverse-phase and affinity chromatography, and the like. Other well-known methods are described in Deutscher et al., Guide to Protein Purification: Methods in Enzymology, Vol. 182, (Academic Press, (1990)). Alternatively, the isolated polypeptides of the present disclosure can be obtained using well-known recombinant methods (see, e.g., Sambrook et al., Molecular Cloning: A Laboratory Manual, Third Ed., Cold Spring Harbor Laboratory, New York (2001); and Ausubel et al., Current Protocols in Molecular Biology, John Wiley and Sons, Baltimore, MD (1999)). The methods and conditions for biochemical purification of a polypeptide described herein can be chosen by those skilled in the art, and purification monitored, for example, by a functional assay.

[0269] In some embodiments, compositions, systems, and methods described herein may further comprise a purification tag that can be attached to an effector protein, or a nucleic acid encoding the purification tag that can be attached to a nucleic acid encoding the effector protein as described herein. In some embodiments, the purification tag may be an amino acid sequence which can attach or bind with high affinity to a separation substrate and assist in isolating the protein of interest from its environment, which may be its biological source, such as a cell lysate. Attachment of the purification tag may be at the N or C terminus of the effector protein. Furthermore, an amino acid sequence recognized by a protease or a nucleic acid encoding for an amino acid sequence recognized by a protease, such as TEV protease or the HRV3C protease may be inserted between the purification tag and the effector protein, such that biochemical cleavage of the sequence with the protease after initial purification liberates the purification tag. Purification and/or isolation may be performed through high performance liquid chromatography (HPLC), exclusion chromatography, gel electrophoresis, affinity chromatography, or other purification technique. Non-limiting examples of purification tags are as described herein.

[0270] In some embodiments, effector proteins described herein are isolated from cell lysate. In some embodiments, the compositions described herein may comprise 20% or more by weight, 75% or more by weight, 95% or more by weight, or 99.5% or more by weight of an effector protein, related to the method of preparation of compositions described herein and its purification thereof, wherein percentages may be upon total protein content in relation to contaminants. Thus, in some embodiments, the effector protein is at least 80% pure, at least 85% pure, at least 90% pure, at least 95% pure, at least 98% pure, or at least 99% pure (e.g., free of contaminants, non-engineered proteins or other macromolecules, etc.).

### Protospacer Adjacent Motif (PAM) Sequences

[0271] Effector proteins of the present disclosure may cleave or nick a target nucleic acid within or near a protospacer adjacent motif (PAM) sequence of the target nucleic acid. In some embodiments, the target nucleic acid is a double stranded nucleic acid comprising a target strand and a non-target strand.

[0272] In some embodiments, cleavage occurs within 1, 2, 3, 4, 5, 6, 7, 8, 9, 10, 15, 20, 25, 30, 35, 40, 45, or 50 nucleotides of a 5′ or 3′ terminus of a PAM sequence. In some embodiments, effector proteins described herein recognize a PAM sequence. In some embodiments, recognizing a PAM sequence comprises interacting with a sequence adjacent to the PAM. In some embodiments, a target nucleic acid comprises a target sequence that is adjacent to a PAM sequence. In some embodiments, the effector protein does not require a PAM to bind and/or cleave a target nucleic acid.

[0273] In some embodiments, a target nucleic acid is a single stranded target nucleic acid comprising a target sequence. Accordingly, in some embodiments, the single stranded target nucleic acid comprises a PAM sequence described herein that is adjacent (e.g., within 1, 2, 3, 4, 5, 6, 7, 8, 9, 10, 15, 20, 25, 30, 35, 40, 45, or 50 nucleotides) or directly adjacent to the target sequence. In some embodiments, an RNP cleaves the single stranded target nucleic acid.

[0274] In some embodiments, a target nucleic acid is a double stranded nucleic acid comprising a target strand and a non-target strand, wherein the target strand comprises a target sequence. In some embodiments, the PAM sequence is located on the target strand. In some embodiments, the PAM sequence is located on the non-target strand. In some embodiments, the PAM sequence described herein is adjacent (e.g., within 1, 2, 3, 4, 5, 6, 7, 8, 9, 10, 15, 20, 25, 30, 35, 40, 45, or 50 nucleotides) to the target sequence on the target strand or the non-target strand. In some embodiments, such a PAM described herein is directly adjacent to the target sequence on the target strand or the non-target strand. In some embodiments, an RNP cleaves the target strand or the non-target strand. In some embodiments, the RNP cleaves both, the target strand and the non-target strand. In some embodiments, an RNP recognizes the PAM sequence, and hybridizes to a target sequence of the target nucleic acid. In some embodiments, the RNP cleaves the target nucleic acid, wherein the RNP has recognized the PAM sequence and is hybridized to the target sequence.

[0275] In some embodiments, an effector protein described herein, or a multimeric complex thereof, recognizes a PAM on a target nucleic acid. In some embodiments, multiple effector proteins of the multimeric complex recognize a PAM on a target nucleic acid. In some embodiments, at least two of the multiple effector proteins recognize the same PAM sequence. In some embodiments, at least two of the multiple effector proteins recognize different PAM sequences. In some embodiments, only one effector protein of the multimeric complex recognizes a PAM on a target nucleic acid.

[0276] An effector protein of the present disclosure, or a multimeric complex thereof, may cleave or nick a target nucleic acid within or near a protospacer adjacent motif (PAM) sequence of the target nucleic acid. In some embodiments, cleavage occurs within 1, 2, 3, 4, 5, 6, 7, 8, 9 or 10 nucleotides of a 5′ or 3′ terminus of a PAM sequence.

[0277] In some embodiments, compositions, methods and systems described herein do not comprise a PAM sequence. In some embodiments, effector proteins do not recognize a PAM sequence. In some embodiments, compositions, methods and systems described herein comprise a protospacer-flanking site (PFS) sequence. A PFS sequence may be useful for the detection and/or modification of RNA.

### V. Nucleic Acid Systems

### Guide Nucleic Acids

[0278] The compositions, systems, and methods of the present disclosure may comprise a guide nucleic acid or a use thereof. Unless otherwise indicated, compositions, systems and methods comprising guide nucleic acids or uses thereof, as described herein and throughout, include DNA molecules, such as expression vectors, that encode a guide nucleic acid. Accordingly, compositions, systems, and methods of the present disclosure comprise a guide nucleic acid or a nucleotide sequence encoding the guide nucleic acid.

[0279] In some embodiments, the guide nucleic acid comprises a nucleotide sequence. Such nucleotide sequence may be described as a nucleotide sequence of either DNA or RNA, however, no matter the form the sequence is described, it is readily understood that such nucleotide sequences can be revised to be RNA or DNA, as needed, for describing a sequence within a guide nucleic acid itself or the sequence that encodes a guide nucleic acid. Similarly, disclosure of the nucleotide sequences described herein also discloses a complementary nucleotide sequence, a reverse nucleotide sequence, and the reverse complement nucleotide sequence, any one of which can be a nucleotide sequence for use in a guide nucleic acid. In some embodiments, a guide nucleic acid sequence(s) comprises one or more nucleotide alterations at one or more positions in any one of the sequences described herein. Alternative nucleotides can be any one or more of A, C, G, T or U, or a deletion, or an insertion.

[0280] A guide nucleic acid may comprise a sequence that is bound by an effector protein. In general, the guide nucleic acid comprises a CRISPR RNA (crRNA), at least a portion of which is complementary to a target sequence of a target nucleic acid. In some embodiments, the guide nucleic acid comprises a trans-activating CRISPR RNA (tracrRNA) that interacts with the effector protein. In some embodiments, the crRNA and the tracrRNA are covalently linked, also referred to herein as a single guide RNA (sgRNA). In some embodiments, the crRNA and tracrRNA are linked by a phosphodiester bond. In some embodiments, the crRNA and tracrRNA are linked by one or more linked nucleotides. In some embodiments, a crRNA and tracrRNA function as two separate, unlinked molecules. In some embodiments, the composition does not comprise a tracrRNA. In some embodiments, the crRNA comprises a sequence that is bound by an effector protein.

[0281] The terms, “length” and “linked nucleosides,” as used herein, refer to a nucleic acid (polynucleotide) or polypeptide, may be expressed as “kilobases” (kb) or “base pairs (bp),”. Thus, a length of 1 kb refers to a length of 1000 linked nucleosides, and a length of 500 bp refers to a length of 500 linked nucleosides. Similarly, a protein having a length of 500 linked amino acids may also be simply described as having a length of 500 amino acids.

[0282] Guide nucleic acids may comprise DNA, RNA, or a combination thereof (e.g., RNA with a thymine base). Guide nucleic acids may include a chemically modified nucleobase or phosphate backbone. Guide nucleic acids may be referred to herein as a guide RNA (gRNA). However, a guide RNA is not limited to ribonucleotides, but may comprise deoxyribonucleotides and other chemically modified nucleotides. A guide nucleic acid may comprise a naturally occurring guide nucleic acid. A guide nucleic acid may comprise a non-naturally occurring guide nucleic acid, including a guide nucleic acid that is designed to contain a chemical or biochemical modification. The sequence of a guide nucleic acid may comprise two or more heterologous sequences. Guide RNAs may be chemically synthesized or recombinantly produced.

[0283] Guide nucleic acids, when complexed with an effector protein, may bring the effector protein into proximity of a target nucleic acid. Sufficient conditions for hybridization of a guide nucleic acid to a target nucleic acid and/or for binding of a guide nucleic acid to an effector protein include in vivo physiological conditions of a desired cell type or in vitro conditions sufficient for assaying catalytic activity of a protein, polypeptide or peptide described herein, such as the nuclease activity of an effector protein.

[0284] The compositions, systems, and methods of the present disclosure may comprise a guide nucleic acid, a nucleic acid encoding the guide nucleic acid, or a use thereof. Unless otherwise indicated, compositions, systems and methods comprising guide nucleic acids or uses thereof, as described herein and throughout, include DNA molecules, such as expression vectors, that encode a guide nucleic acid. Guide nucleic acids are also referred to herein as “guide RNA.” A guide nucleic acid, as well as any components thereof (e.g., spacer sequence, repeat sequence, linker nucleotide sequence, etc.) may comprise one or more deoxyribonucleotides, ribonucleotides, biochemically or chemically modified nucleotides (e.g., one or more engineered modifications as described herein), or any combinations thereof. Such nucleotide sequences described herein may be described as a nucleotide sequence of either DNA or RNA, however, no matter the form the sequence is described, it is readily understood that such nucleotide sequences can be revised to be RNA or DNA, as needed, for describing a sequence within a guide nucleic acid itself or the sequence that encodes a guide nucleic acid, such as a nucleotide sequence described herein for a vector. Similarly, disclosure of the nucleotide sequences described herein also discloses the complementary nucleotide sequence, the reverse nucleotide sequence, and the reverse complement nucleotide sequence, any one of which can be a nucleotide sequence for use in a guide nucleic acid as described herein.

[0285] A guide nucleic acid may comprise a naturally occurring sequence. A guide nucleic acid may comprise a non-naturally occurring sequence, wherein the sequence of the guide nucleic acid, or any portion thereof, may be different from the sequence of a naturally occurring guide nucleic acid. A guide nucleic acid of the present disclosure comprises one or more of the following: a) a single nucleic acid molecule; b) a DNA base; c) an RNA base; d) a modified base; e) a modified sugar; f) a modified backbone; and the like. Modifications are described herein and throughout the present disclosure (e.g., in the section entitled “Engineered Modifications”). A guide nucleic acid may be chemically synthesized or recombinantly produced by any suitable methods. Guide nucleic acids and portions thereof may be found in or identified from a CRISPR array present in the genome of a host organism or cell.

[0286] In general, a guide nucleic acid comprises a first region that is not complementary to a target nucleic acid (FR) and a second region is complementary to the target nucleic acid (SR). In some embodiments, FR is located 5′ to SR (FR-SR). In some embodiments, SR is located 5′ to FR (SR-FR).

[0287] In some embodiments, the FR comprises one or more repeat sequences. In some embodiments, an effector protein binds to at least a portion of the FR. In some embodiments, the SR comprises a spacer sequence, wherein the spacer sequence can interact in a sequence-specific manner with (e.g., has complementarity with, or can hybridize to a target sequence in) a target nucleic acid.

[0288] The guide nucleic acid may also form complexes as described through herein. For example, a guide nucleic acid may hybridize to another nucleic acid, such as target nucleic acid, or a portion thereof. In another example, a guide nucleic acid may complex with an effector protein. In such embodiments, a guide nucleic acid-effector protein complex may be described herein as an RNP. In some embodiments, when in a complex, at least a portion of the complex may bind, recognize, and/or hybridize to a target nucleic acid. For example, when a guide nucleic acid and an effector protein are complexed to form an RNP, at least a portion of the guide nucleic acid hybridizes to a target sequence in a target nucleic acid. Those skilled in the art in reading the below specific examples of guide nucleic acids as used in RNPs described herein, will understand that in some embodiments, a RNP may hybridize to one or more target sequences in a target nucleic acid, thereby allowing the RNP to modify and/or recognize a target nucleic acid or sequence contained therein (e.g., PAM) or to modify and/or recognize non-target sequences depending on the guide nucleic acid, and in some embodiments, the effector protein, used.

[0289] In some embodiments, a guide nucleic acid may comprise or form intramolecular secondary structure (e.g., hairpins, stem-loops, etc.). In some embodiments, a guide nucleic acid comprises a stem-loop structure comprising a stem region and a loop region. In some embodiments, the stem region is 4 to 8 linked nucleotides in length. In some embodiments, the stem region is 5 to 6 linked nucleotides in length. In some embodiments, the stem region is 4 to 5 linked nucleotides in length. In some embodiments, the guide nucleic acid comprises a pseudoknot (e.g., a secondary structure comprising a stem, at least partially, hybridized to a second stem or half-stem secondary structure). An effector protein may recognize a guide nucleic acid comprising multiple stem regions. In some embodiments, the nucleotide sequences of the multiple stem regions are identical to one another. In some embodiments, the nucleotide sequences of at least one of the multiple stem regions is not identical to those of the others. In some embodiments, the guide nucleic acid comprises at least 2, at least 3, at least 4, or at least 5 stem regions.

[0290] In some embodiments, the compositions, systems, and methods of the present disclosure comprise two or more guide nucleic acids (e.g., 2, 3, 4, 5, 6, 7, 9, 10 or more guide nucleic acids), and/or uses thereof. Multiple guide nucleic acids may target an effector protein to different locations in the target nucleic acid by hybridizing to different target sequences. In some embodiments, a first guide nucleic acid may hybridize within a location of the target nucleic acid that is different from where a second guide nucleic acid may hybridize the target nucleic acid. In some embodiments, the first loci and the second loci of the target nucleic acid may be located at least 1, at least 10, at least 20, at least 30, at least 40, at least 50, at least 60, at least 70, at least 80, at least 90 or at least 100 nucleotides apart. In some embodiments, the first loci and the second loci of the target nucleic acid may be located between 100 and 200, 200 and 300, 300 and 400, 400 and 500, 500 and 600, 600 and 700, 700 and 800, 800 and 900 or 900 and 1000 nucleotides apart.

[0291] In some embodiments, the first loci and/or the second loci of the target nucleic acid are located in an intron of a gene. In some embodiments, the first loci and/or the second loci of the target nucleic acid are located in an exon of a gene. In some embodiments, the first loci and/or the second loci of the target nucleic acid span an exon-intron junction of a gene. In some embodiments, the first portion and/or the second portion of the target nucleic acid are located on either side of an exon and cutting at both sites results in deletion of the exon. In some embodiments, composition, systems, and methods comprise a donor nucleic acid that may be inserted in replacement of a deleted or cleaved sequence of the target nucleic acid. In some embodiments, compositions, systems, and methods comprising multiple guide nucleic acids or uses thereof comprise multiple effector proteins, wherein the effector proteins may be identical, non-identical, or combinations thereof.

[0292] In some embodiments, a guide nucleic acid comprises about: 10, 11, 12, 13, 14, 15, 16, 17, 18, 19, 20, 21, 22, 23, 24, 25, 26, 27, 28, 29, 30, 31, 32, 33, 34, 35, 36, 37, 38, 39, 40, 41, 42, 43, 44, 45, 46, 47, 48, 49, 50, 51, 52, 53, 54, 55, 56, 57, 58, 59, or 60 linked nucleotides. In general, a guide nucleic acid comprises at least: 10, 15, 20, 25, 30, 35, 40, 45, 50, 55, 60 linked nucleotides. In some embodiments, the guide nucleic acid has about 10 to about 60, about 20 to about 50, or about 30 to about 40 linked nucleotides.

[0293] In some embodiments, a guide nucleic acid comprises at least 10, 11, 12, 13, 14, 15, 16, 17, 18, 19, 20, 21, 22, 23, 24, 25, 26, 27, 28, 29, or 30 contiguous nucleotides that are complementary to a eukaryotic sequence. Such a eukaryotic sequence is a nucleotide sequence that is present in a host eukaryotic cell. Such a nucleotide sequence is distinguished from nucleotide sequences present in other host cells, such as prokaryotic cells, or viruses. Said sequences present in a eukaryotic cell can be located in a gene, an exon, an intron, a non-coding (e.g., promoter or enhancer) region, a selectable marker, tag, signal, and the like. In some embodiments, a target sequence is a eukaryotic sequence.

[0294] In some embodiments, a length of a guide nucleic acid is about 30 to about 120 linked nucleotides. In some embodiments, the length of a guide nucleic acid is about 40 to about 100, about 40 to about 90, about 40 to about 80, about 40 to about 70, about 40 to about 60, about 40 to about 50, about 50 to about 90, about 50 to about 80, about 50 to about 70, or about 50 to about 60 linked nucleotides. In some embodiments, the length of a guide nucleic acid is about 40, about 45, about 50, about 55, about 60, about 65, about 70 or about 75 linked nucleotides. In some embodiments, the length of a guide nucleic acid is greater than about 15, about 20, about 25, about 30, about 35, about 40, about 45, about 50, about 55, about 60, about 65, about 70 or about 75 linked nucleotides. In some embodiments, the length of a guide nucleic acid is not greater than about 40, about 45, about 50, about 55, about 60, about 65, about 70, about 75, about 80, about 85, about 90, about 95, about 100, about 105, about 110, about 115, about 120, or about 125 linked nucleotides. In some embodiments, a guide nucleic acid comprises at least 25 linked nucleosides. A guide nucleic acid may comprise 10 to 50 linked nucleosides. In some cases, the guide nucleic acid comprises or consists essentially of about 12 to about 80 linked nucleosides, about 12 to about 50, about 12 to about 45, about 12 to about 40, about 12 to about 35, about 12 to about 30, about 12 to about 25, from about 12 to about 20, about 12 to about 19, about 19 to about 20, about 19 to about 25, about 19 to about 30, about 19 to about 35, about 19 to about 40, about 19 to about 45, about 19 to about 50, about 19 to about 60, about 20 to about 25, about 20 to about 30, about 20 to about 35, about 20 to about 40, about 20 to about 45, about 20 to about 50, or about 20 to about 60 linked nucleosides. In some cases, the guide nucleic acid has about 10 to about 60, about 20 to about 50, or about 30 to about 40 linked nucleosides.

[0295] In some embodiments, guide nucleic acids comprise additional elements that contribute additional functionality (e.g., stability, heat resistance, etc.) to the guide nucleic acid. Such elements may be one or more nucleotide alterations, nucleotide sequences, intermolecular secondary structures, or intramolecular secondary structures (e.g., one or more hair pin regions, one or more bulges, etc.).

[0296] In some embodiments, guide nucleic acids comprise one or more linkers connecting different nucleotide sequences as described herein. A linker may comprise 1, 2, 3, 4, 5, 6, 7, 8, 9, 10, or more nucleotides. A linker may be any suitable linker, examples of which are described herein.

[0297] In some embodiments, guide nucleic acids comprise one or more nucleotide sequences as described herein. Such nucleotide sequences described herein may be described as a nucleotide sequence of either DNA or RNA, however, no matter the form the sequence is described, it is readily understood that such nucleotide sequences may be revised to be RNA or DNA, as needed, for describing a sequence within a guide nucleic acid itself or the sequence that encodes a guide nucleic acid, such as a nucleotide sequence described herein for a vector. Similarly, disclosure of the nucleotide sequences described herein also discloses the complementary nucleotide sequence, the reverse nucleotide sequence, and the reverse complement nucleotide sequence, any one of which may be a nucleotide sequence for use in a guide nucleic acid as described herein. In some embodiments, guide nucleic acid sequence(s) comprises one or more nucleotide alterations at one or more positions in any one of the sequences described herein. Alternative nucleotides may be any one or more of A, C, G, T or U, or a deletion, or an insertion.

### Repeat Sequence

[0298] Guide nucleic acids described herein may comprise one or more repeat sequences. In some embodiments, a repeat sequence comprises a nucleotide sequence that is not complementary to a target sequence of a target nucleic acid. In some embodiments, a repeat sequence comprises a nucleotide sequence that may interact with an effector protein. In some embodiments, a repeat sequence is connected to another sequence of a guide nucleic acid that is capable of non-covalently interacting with an effector protein. In some embodiments, a repeat sequence includes a nucleotide sequence that is capable of forming a guide nucleic acid-effector protein complex (e.g., a RNP complex).

[0299] In some embodiments, the repeat sequence is between 10 and 50, 12 and 48, 14 and 46, 16 and 44, and 18 and 42 nucleotides in length.

[0300] In some embodiments, a repeat sequence is adjacent to a spacer sequence. In some embodiments, a repeat sequence is followed by a spacer sequence in the 5′ to 3′ direction. In some embodiments, a repeat sequence is preceded by a spacer sequence in the 5′ to 3′ direction. In some embodiments, a repeat sequence is linked to a spacer sequence. In some embodiments, a guide nucleic acid comprises a repeat sequence linked to a spacer sequence, which may be a direct link or by any suitable linker, examples of which are described herein.

[0301] In some embodiments, guide nucleic acids comprise more than one repeat sequence (e.g., two or more, three or more, or four or more repeat sequences). In some embodiments, a guide nucleic acid comprises more than one repeat sequence separated by another sequence of the guide nucleic acid. For example, in some embodiments, a guide nucleic acid comprises two repeat sequences, wherein the first repeat sequence is followed by a spacer sequence, and the spacer sequence is followed by a second repeat sequence in the 5′ to 3′ direction. In some embodiments, the more than one repeat sequences are identical. In some embodiments, the more than one repeat sequences are not identical.

[0302] In some embodiments, the repeat sequence comprises two sequences that are complementary to each other and hybridize to form a double stranded RNA duplex (dsRNA duplex). In some embodiments, the two sequences are not directly linked and hybridize to form a stem loop structure. In some embodiments, the dsRNA duplex comprises 5, 10, 15, 20 or 25 base pairs (bp). In some embodiments, not all nucleotides of the dsRNA duplex are paired, and therefore the duplex forming sequence may include a bulge. In some embodiments, the repeat sequence comprises a hairpin or stem-loop structure, optionally at the 5′ portion of the repeat sequence. In some embodiments, a strand of the stem portion comprises a sequence and the other strand of the stem portion comprises a sequence that is, at least partially, complementary. In some embodiments, such sequences may have 65% to 100% complementarity (e.g., 65%, 70%, 75%, 80%, 85%, 90%, 95%, or 100% complementarity). In some embodiments, a guide nucleic acid comprises nucleotide sequence that when involved in hybridization events may hybridize over one or more segments such that intervening or adjacent segments are not involved in the hybridization event (e.g., a bulge, a loop structure or hairpin structure, etc.).

### Spacer Sequence

[0303] Guide nucleic acids described herein may comprise one or more spacer sequences. In some embodiments, a spacer sequence is capable of hybridizing to a target sequence of a target nucleic acid. In some embodiments, a spacer sequence comprises a nucleotide sequence that is, at least partially, hybridizable to an equal length of a sequence (e.g., a target sequence) of a target nucleic acid. Exemplary hybridization conditions are described herein. In some embodiments, the spacer sequence may function to direct an RNP complex comprising the guide nucleic acid to the target nucleic acid for detection and/or modification. The spacer sequence may function to direct a RNP to the target nucleic acid for detection and/or modification. A spacer sequence may be complementary to a target sequence that is adjacent to a PAM that is recognizable by an effector protein described herein.

[0304] In some embodiments, a spacer sequence comprises at least 5 to about 50 contiguous nucleotides that are complementary to a target sequence in a target nucleic acid. In some embodiments, a spacer sequence comprises at least 5 to about 50 linked nucleotides. In some embodiments, a spacer sequence comprises at least 5 to about 50, at least 5 to about 25, at least about 10 to at least about 25, or at least about 15 to about 25 linked nucleotides. In some embodiments, the spacer sequence comprises 15-28 linked nucleotides. In some embodiments, a spacer sequence comprises 15-26, 15-24, 15-22, 15-20, 15-18, 16-28, 16-26, 16-24, 16-22, 16-20, 16-18, 17-26, 17-24, 17-22, 17-20, 17-18, 18-26, 18-24, or 18-22 linked nucleotides. In some embodiments, the spacer sequence comprises 10, 11, 12, 13, 14, 15, 16, 17, 18, 19, 20, 21, 22, 23, 24, 25, 26, 27, 28, 29, 30, or more nucleotides. In some cases, the spacer sequence is 18-24 linked nucleosides in length. In some cases, the spacer sequence is at least 15 linked nucleosides in length. In some cases, the spacer sequence is at least 16, 18, 20, or 22 linked nucleosides in length. In some cases, the spacer sequence is at least 17 linked nucleosides in length. In some cases, the spacer sequence is at least 18 linked nucleosides in length. In some cases, the spacer sequence is at least 20 linked nucleosides in length. In some cases, the spacer sequence is at least 80%, at least 85%, at least 90%, at least 95% or 100% complementary to a target sequence of the target nucleic acid. In some cases, the spacer sequence is 100% complementary to the target sequence of the target nucleic acid. In some cases, the spacer sequence comprises at least 15 contiguous nucleobases that are complementary to the target nucleic acid.

[0305] In some embodiments, a spacer sequence is adjacent to a repeat sequence. In some embodiments, a spacer sequence follows a repeat sequence in a 5′ to 3′ direction. In some embodiments, a spacer sequence precedes a repeat sequence in a 5′ to 3′ direction. In some embodiments, the spacer sequence(s) and the repeat sequence(s) of the guide nucleic acid are present within the same molecule. In some embodiments, the spacer(s) and repeat sequence(s) are linked directly to one another. In some embodiments, a linker is present between the spacer(s) and repeat sequences. Linkers may be any suitable linker. In some embodiments, the spacer sequence(s) and the repeat sequence(s) of the guide nucleic acid are present in separate molecules, which are joined to one another by base pairing interactions.

[0306] It is understood that the sequence of a spacer sequence need not be 100% complementary to that of a target sequence of a target nucleic acid to hybridize or hybridize specifically to the target sequence. The guide nucleic acid may comprise at least one uracil between nucleic acid residues 5 to 20 of the spacer sequence that is not complementary to the corresponding nucleoside of the target sequence. The guide nucleic acid may comprise at least one uracil between nucleic acid residues 5 to 9, 10 to 14, or 15 to 20 of the spacer sequence that is not complementary to the corresponding nucleoside of the target sequence. In some cases, the region of the target nucleic acid that is complementary to the spacer sequence comprises an epigenetic modification or a post-transcriptional modification. In some cases, the epigenetic modification comprises acetylation, methylation, or thiol modification.

[0307] In some embodiments, a spacer sequence comprises a nucleotide sequence that is at least 65%, at least 70%, at least 75%, at least 80%, at least 85%, at least 90%, at least 95% or 100% complementary to a target sequence of a target nucleic acid. A spacer sequence is capable of hybridizing to an equal length portion of a target nucleic acid (e.g., a target sequence). In some embodiments, a target nucleic acid, such as DNA or RNA, may be a cancer gene or gene associated with a genetic disorder, or an amplicon thereof, as described herein. In some embodiments, a target nucleic acid is a gene selected from TABLE 3. In some embodiments, a spacer sequence comprises a sequence that is at least 65%, at least 70%, at least 75%, at least 80%, at least 85%, at least 90%, at least 95% or 100% complementary to a target sequence of a gene selected from TABLE 3. In some embodiments, a target nucleic acid is a nucleic acid associated with a disease or syndrome set forth in TABLE 4. In some embodiments, a spacer sequence comprises a sequence that is at least 65%, at least 70%, at least 75%, at least 80%, at least 85%, at least 90%, at least 95% or 100% complementary to a target sequence of a target nucleic acid associated with a disease or syndrome set forth in TABLE 4. In some embodiments, the spacer sequence comprises at least 10, 11, 12, 13, 14, 15, 16, 17, 18, 19, 20, 21, 22, 23, 24, 25, 26, 27, 28, 29, or 30 contiguous nucleotides that are capable of hybridizing to the target sequence. In some embodiments, the spacer sequence comprises at least 10, 11, 12, 13, 14, 15, 16, 17, 18, 19, 20, 21, 22, 23, 24, 25, 26, 27, 28, 29, or 30 contiguous nucleotides that are complementary to the target sequence.

[0308] It is understood that the spacer sequence of a spacer sequence need not be 100% complementary to that of a target sequence of a target nucleic acid to hybridize or hybridize specifically to the target sequence. For example, the spacer sequence may comprise at least one alteration, such as a substituted or modified nucleotide, that is not complementary to the corresponding nucleotide of the target sequence.

### Linker for Nucleic Acids

[0309] In some embodiments, a guide nucleic acid for use with compositions, systems, and methods described herein comprises one or more linkers, or a nucleic acid encoding one or more linkers. In some embodiments, the guide nucleic acid comprises at least one, at least two, at least three, at least four, at least five, at least six, at least seven, at least eight, at least nine, or at least ten linkers. In some embodiments, the guide nucleic acid comprises one, two, three, four, five, six, seven, eight, nine, or ten linkers. In some embodiments, the guide nucleic acid comprises more than one linker. In some embodiments, at least two of the more than one linker are the same. In some embodiments, at least two of the more than one linker are not same.

[0310] In some embodiments, a linker comprises one to ten, one to seven, one to five, one to three, two to ten, two to eight, two to six, two to four, three to ten, three to seven, three to five, four to ten, four to eight, four to six, five to ten, five to seven, six to ten, six to eight, seven to ten, or eight to ten linked nucleotides. In some embodiments, the linker comprises one, two, three, four, five, six, seven, eight, nine, or ten linked nucleotides. In some embodiments, a linker comprises a nucleotide sequence of 5′-GAAA-3′.

[0311] In some embodiments, a guide nucleic acid comprises one or more linkers connecting one or more repeat sequences. In some embodiments, the guide nucleic acid comprises one or more linkers connecting one or more repeat sequences and one or more spacer sequences. In some embodiments, the guide nucleic acid comprises at least two repeat sequences connected by a linker.

tracrRNA

[0312] In some embodiments, the guide RNA comprises a tracrRNA. The tracrRNA may be linked to a crRNA to form a composite gRNA. In some cases, the crRNA and the tracrRNA are provided as a single nucleic acid (e.g., covalently linked). In some embodiments, compositions comprise a tracrRNA that is separate from, but forms a complex with a crRNA to form a gRNA system. In some embodiments, the crRNA and the tracrRNA are separate polynucleotides.

[0313] In general, a tracrRNA comprises a nucleotide sequence that is bound by an effector protein. A tracrRNA may comprise at least one secondary structure (e.g., hairpin loop) that facilitates the binding of an effector protein. A tracrRNA may include a repeat hybridization sequence and a hairpin region. The term “repeat hybridization sequence” refers to a sequence of nucleotides of a tracrRNA that is capable of hybridizing to a repeat sequence of a guide nucleic acid. The repeat hybridization sequence may hybridize to all or part of the repeat sequence of a crRNA. The repeat hybridization sequence may be positioned 3′ of the hairpin region. The repeat hybridization sequence may be positioned 5′ of the hairpin region. The hairpin region may include a first sequence, a second sequence that is reverse complementary to the first sequence, and a stem-loop linking the first sequence and the second sequence.

[0314] In some embodiments, tracrRNAs comprise a stem-loop structure comprising a stem region and a loop region. In some cases, the stem region is 4 to 8 linked nucleosides in length. In some cases, the stem region is 5 to 6 linked nucleosides in length. In some cases, the stem region is 4 to 5 linked nucleosides in length. In some cases, the tracrRNA comprises a pseudoknot (e.g., a secondary structure comprising a stem at least partially hybridized to a second stem or half-stem secondary structure). An effector protein may recognize a tracrRNA comprising multiple stem regions. In some embodiments, the amino acid sequences of the multiple stem regions are identical to one another. In some embodiments, the amino acid sequences of at least one of the multiple stem regions is not identical to those of the others. In some cases, the tracrRNA comprises at least 2, at least 3, at least 4, or at least 5 stem regions. In some embodiments, the length of a tracrRNA is about 50 to about 105, about 50 to about 95, about 50 to about 73, about 50 to about 71, about 50 to about 68, or about 50 to about 56 linked nucleosides. In some embodiments, the length of a tracrRNA is 56 to 105 linked nucleosides, from 56 to 105 linked nucleosides, 68 to 105 linked nucleosides, 71 to 105 linked nucleosides, 73 to 105 linked nucleosides, or 95 to 105 linked nucleosides. In some embodiments, the length of a tracrRNA is 40 to 60 nucleotides. In some embodiments, the length of a tracrRNA is 50, 56, 68, 71, 73, 95, or 105 linked nucleosides. In some embodiments, the length of a tracrRNA is 50 nucleotides.

[0315] An exemplary tracrRNA may comprise, from 5′ to 3′, a 5′ region, a hairpin region, a repeat hybridization sequence, and a 3′ region. In some cases, the 5′ region may hybridize to the 3′ region. In some embodiments, the 5′ region does not hybridize to the 3′ region. In some cases, the 3′ region is covalently linked to the crRNA (e.g., through a phosphodiester bond). In some embodiments, a tracrRNA may comprise an unhybridized region at the 3′ end of the tracrRNA. The unhybridized region may have a length of about 1, about 2, about 3, about 4, about 5, about 6, about 7, about 8, about 9, about 10, about 12, about 14, about 16, about 18, or about 20 linked nucleosides. In some embodiments, the length of the un-hybridized region is 0 to 20 linked nucleosides.

### A Single Nucleic Acid System

[0316] In some embodiments, compositions, systems and methods described herein comprise a single nucleic acid system comprising a guide nucleic acid or a nucleotide sequence encoding the guide nucleic acid, and one or more effector proteins or a nucleotide sequence encoding the one or more effector proteins. The term, “single nucleic acid system,” as used herein, refers to a system that uses a guide nucleic acid complexed with one or more polypeptides described herein, wherein the complex is capable of interacting with a target nucleic acid in a sequence specific manner, and wherein the guide nucleic acid is capable of non-covalently interacting with the one or more polypeptides described herein, and wherein the guide nucleic acid is capable of hybridizing with a target sequence of the target nucleic acid. A single nucleic acid system lacks a duplex of a guide nucleic acid as hybridized to a second nucleic acid, wherein in such a duplex the second nucleic acid, and not the guide nucleic acid, is capable of interacting with the effector protein. In some embodiments, a first region (FR) of the guide nucleic acid non-covalently interacts with the one or more polypeptides described herein. In some embodiments, a second region (SR) of the guide nucleic acid hybridizes with a target sequence of the target nucleic acid. In the single nucleic acid system having a complex of the guide nucleic acid and the effector protein, the effector protein is not transactivated by the guide nucleic acid. In other words, activity of effector protein does not require binding to a second non-target nucleic acid molecule. An exemplary guide nucleic acid for a single nucleic acid system is a crRNA or a sgRNA.

crRNA

[0317] Guide nucleic acids and portions thereof may be found in or identified from a CRISPR array present in the genome of a host organism. A crRNA may be the product of processing of a longer precursor CRISPR RNA (pre-crRNA) transcribed from the CRISPR array by cleavage of the pre-crRNA within each direct repeat sequence to afford shorter, mature crRNAs. A crRNA may be generated by a variety of mechanisms, including the use of dedicated endonucleases (e.g., Cas6 or Cas5d in Type I and III systems), coupling of a host endonuclease (e.g., RNase III) with tracrRNA (Type II systems), or a ribonuclease activity endogenous to the effector protein itself (e.g., Cpf1 from Type V systems). A crRNA may also be specifically generated outside of processing of a pre-crRNA and individually contacted to an effector protein in vivo or in vitro.

[0318] In general, a crRNA comprises a spacer sequence that hybridizes to a target sequence of a target nucleic acid, and a repeat sequence that interacts with a tracrRNA or an effector protein. Typically, the repeat sequence is adjacent to the spacer sequence. For example, a guide RNA that interacts with an effector protein comprises a repeat sequence that is 5′ of the spacer sequence.

[0319] In some embodiments, a guide nucleic acid comprises a crRNA. In some embodiments, the guide nucleic acid is the crRNA. In general, a crRNA comprises a first region (FR) and a second region (SR), wherein the FR of the crRNA comprises a repeat sequence, and the SR of the crRNA comprises a spacer sequence. In some embodiments, the repeat sequence and the spacer sequences are directly connected to each other (e.g., covalent bond (phosphodiester bond)). In some embodiments, the repeat sequence and the spacer sequence are connected by a linker.

[0320] In some embodiments, a crRNA is useful as a single nucleic acid system for compositions, methods, and systems described herein or as part of a single nucleic acid system for compositions, methods, and systems described herein. In some embodiments, a crRNA is useful as part of a single nucleic acid system for compositions, methods, and systems described herein. In such embodiments, a single nucleic acid system comprises a guide nucleic acid comprising a crRNA wherein, a repeat sequence of a crRNA is capable of connecting a crRNA to an effector protein. In some embodiments, a single nucleic acid system comprises a guide nucleic acid comprising a crRNA linked to another nucleotide sequence that is capable of being non-covalently bond by an effector protein.

[0321] A crRNA may include deoxyribonucleosides, ribonucleosides, chemically modified nucleosides, or any combination thereof. In some embodiments, a crRNA comprises about: 10, 11, 12, 13, 14, 15, 16, 17, 18, 19, 20, 21, 22, 23, 24, 25, 26, 27, 28, 29, 30, 31, 32, 33, 34, 35, 36, 37, 38, 39, 40, 41, 42, 43, 44, 45, 46, 47, 48, 49, 50, 51, 52, 53, 54, 55, 56, 57, 58, 59, or 60 linked nucleotides. In some embodiments, a crRNA comprises at least: 10, 15, 20, 25, 30, 35, 40, 45, 50, 55, 60 linked nucleotides. In some embodiments, the length of the crRNA is about 20 to about 120 linked nucleotides. In some embodiments, the length of a crRNA is about 20 to about 100, about 30 to about 100, about 40 to about 100, about 40 to about 90, about 40 to about 80, about 40 to about 70, about 40 to about 60, about 40 to about 50, about 50 to about 90, about 50 to about 80, about 50 to about 70, or about 50 to about 60 linked nucleotides. In some embodiments, the length of a crRNA is about 20, about 25, about 30, about 35, about 40, about 45, about 50, about 55, about 60, about 65, about 70 or about 75 linked nucleotides.

[0322] In some cases, an effector protein cleaves a precursor RNA (“pre-crRNA”) to produce a guide RNA, also referred to as a “mature guide RNA.” An effector protein that cleaves pre-crRNA to produce a mature guide RNA is said to have pre-crRNA processing activity. In some cases, a repeat sequence of a guide RNA comprises mutations or truncations relative to respective regions in a corresponding pre-crRNA.

sgRNA

[0323] In some embodiments, a guide nucleic acid comprises a sgRNA. The terms “single guide nucleic acid”, “single guide RNA” and “sgRNA,” as used herein, in the context of a single nucleic acid system, refers to a guide nucleic acid, wherein the guide nucleic acid is a single polynucleotide chain having all the required sequence for a functional complex with an effector protein (e.g., being bound by an effector protein, including in some instances activating the effector protein, and hybridizing to a target nucleic acid, without the need for a second nucleic acid molecule). For example, an sgRNA can have two or more linked guide nucleic acid components

[0324] In some embodiments, a sgRNA comprises one or more of one or more of a crRNA, a repeat sequence, a spacer sequence, a linker, or combinations thereof. In some embodiments, a repeat sequence is 5′ to a spacer sequence in an sgRNA. In some embodiments, a sgRNA comprises a linked repeat sequence and spacer sequence. In some embodiments, a repeat sequence and a spacer sequence are linked in an sgRNA directly (e.g., covalently linked, such as through a phosphodiester bond) In some embodiments, a repeat sequence and a spacer sequence are linked in an sgRNA by any suitable linker, examples of which are provided herein.

### A Dual Nucleic Acid System

[0325] In some embodiments, compositions, systems and methods described herein comprise a dual nucleic acid system comprising a crRNA or a nucleotide sequence encoding the crRNA, a tracrRNA or a nucleotide sequence encoding the tracrRNA, and one or more effector protein or a nucleotide sequence encoding the one or more effector protein, wherein the crRNA and the tracrRNA are separate, unlinked molecules, wherein a repeat hybridization region of the tracrRNA is capable of hybridizing with an equal length portion of the crRNA to form a tracrRNA-crRNA duplex, wherein the equal length portion of the crRNA does not include a spacer sequence of the crRNA, and wherein the spacer sequence is capable of hybridizing to a target sequence of the target nucleic acid. In the dual nucleic acid system having a complex of the guide nucleic acid, tracrRNA, and the effector protein, the effector protein is transactivated by the tracrRNA. In other words, activity of effector protein requires binding to a tracrRNA molecule.

[0326] The terms, “transactivating”, “trans-activating”, “trans-activated”, “transactivated” and grammatical equivalents thereof, as used herein, in the context of a dual nucleic acid system refers to an outcome of the system, wherein a polypeptide is enabled to have a binding and/or nuclease activity on a target nucleic acid, by a tracrRNA or a tracrRNA-crRNA duplex.

[0327] In some embodiments, a repeat hybridization sequence is at the 3′ end of a tracrRNA. In some embodiments, a repeat hybridization sequence may have a length of about 1, about 2, about 3, about 4, about 5, about 6, about 7, about 8, about 9, about 10, about 12, about 14, about 16, about 18, or about 20 linked nucleotides. In some embodiments, the length of the repeat hybridization sequence is 1 to 20 linked nucleotides.

[0328] A tracrRNA and/or tracrRNA-crRNA duplex may form a secondary structure that facilitates the binding of an effector protein to a tracrRNA or a tracrRNA-crRNA. In some embodiments, the secondary structure modifies activity of the effector protein on a target nucleic acid. In some embodiments, the secondary structure comprises a stem-loop structure comprising a stem region and a loop region. In some embodiments, the stem region is 4 to 8 linked nucleotides in length. In some embodiments, the stem region is 5 to 6 linked nucleotides in length. In some embodiments, the stem region is 4 to 5 linked nucleotides in length. In some embodiments, the secondary structure comprises a pseudoknot (e.g., a secondary structure comprising a stem at least partially hybridized to a second stem or half-stem secondary structure). An effector protein may recognize a secondary structure comprising multiple stem regions. In some embodiments, nucleotide sequences of the multiple stem regions are identical to one another. In some embodiments, the nucleotide sequences of at least one of the multiple stem regions is not identical to those of the others. In some embodiments, the secondary structure comprises at least two, at least three, at least four, or at least five stem regions. In some embodiments, the secondary structure comprises one or more loops. In some embodiments, the secondary structure comprises at least one, at least two, at least three, at least four, or at least five loops.

### VI. Engineered Modifications

[0329] Polypeptides (e.g., effector proteins) and nucleic acids (e.g., engineered guide nucleic acids) can be further modified as described herein. Examples are modifications that do not alter the primary sequence of the polypeptides or nucleic acids, such as chemical derivatization of polypeptides (e.g., acylation, acetylation, carboxylation, amidation, etc.), or modifications that do alter the primary sequence of the polypeptide or nucleic acid. Also included are polypeptides that have a modified glycosylation pattern (e.g., those made by: modifying the glycosylation patterns of a polypeptide during its synthesis and processing or in further processing steps; by exposing the polypeptide to enzymes which affect glycosylation, such as mammalian glycosylating or deglycosylating enzymes). Also embraced are polypeptides that have phosphorylated amino acid residues (e.g., phosphotyrosine, phosphoserine, or phosphothreonine).

[0330] The term “engineered modification” as used herein, refers to a structural change of one or more nucleic acid residues of a nucleotide sequence or one or more amino acid residue of an amino acid sequence, such as chemical modification of one or more nucleobases; or a chemical change to the phosphate backbone, a nucleotide, a nucleobase, or a nucleoside. Such modifications can be made to an effector protein amino acid sequence or guide nucleic acid nucleotide sequence, or any sequence disclosed herein (e.g., a nucleic acid encoding an effector protein or a nucleic acid that encodes a guide nucleic acid). Methods of modifying a nucleic acid or amino acid sequence are known. One of ordinary skill in the art will appreciate that the engineered modification(s) may be located at any position(s) of a nucleic acid such that the function of the nucleic acid, protein, composition or system is not substantially decreased. Nucleic acids provided herein can be prepared according to any available technique including, but not limited to chemical synthesis, enzymatic synthesis, which is generally termed in vitro-transcription, cloning, enzymatic, or chemical cleavage, etc. In some instances, the nucleic acids provided herein are not uniformly modified along the entire length of the molecule. Different nucleotide modifications and/or backbone structures can exist at various positions within the nucleic acid.

[0331] Modifications disclosed herein can also include modification of described polypeptides and/or guide nucleic acids through any suitable method, such as molecular biological techniques and/or synthetic chemistry, to improve their resistance to proteolytic degradation, to change the target sequence specificity, to optimize solubility properties, to alter protein activity (e.g., transcription modulatory activity, enzymatic activity, etc.) or to render them more suitable for their intended purpose (e.g., in vivo administration, in vitro methods, or ex vivo applications). Analogs of such polypeptides include those containing residues other than naturally occurring L-amino acids, e.g. D-amino acids or non-naturally occurring synthetic amino acids. D-amino acids may be substituted for some or all of the amino acid residues. Modifications can also include modifications with non-naturally occurring unnatural amino acids. The particular sequence and the manner of preparation will be determined by convenience, economics, purity required, and the like.

[0332] Modifications can further include the introduction of various groups to polypeptides and/or guide nucleic acids described herein. For example, groups can be introduced during synthesis or during expression of a polypeptide (e.g., an effector protein), which allow for linking to other molecules or to a surface. Thus, e.g., cysteines may be used to make thioethers, histidines for linking to a metal ion complex, carboxyl groups for forming amides or esters, amino groups for forming amides, and the like.

[0333] Modifications can further include changing of nucleic acids described herein (e.g., engineered guide nucleic acids) to provide the nucleic acid with a new or enhanced feature, such as improved stability. Such modifications of a nucleic acid include a base editing, a base modification, a backbone modification, a sugar modification, or combinations thereof. In some embodiments, the modifications can be of one or more nucleotides, nucleosides, or nucleobases in a nucleic acid.

[0334] In some embodiments, nucleic acids (e.g., nucleic acids encoding effector proteins, engineered guide nucleic acids, or nucleic acids encoding engineered guide nucleic acids) described herein comprise one or more modifications comprising: 2′O-methyl modified nucleotides, 2′ fluoro modified nucleotides; locked nucleic acid (LNA) modified nucleotides; peptide nucleic acid (PNA) modified nucleotides; nucleotides with phosphorothioate linkages; a 5′ cap (e.g., a 7-methylguanylate cap (m7G)), phosphorothioates, chiral phosphorothioates, phosphorodithioates, phosphotriesters, aminoalkylphosphotriesters, methyl and other alkyl phosphonates including 3′-alkylene phosphonates, 5′-alkylene phosphonates and chiral phosphonates, phosphinates, phosphoramidates including 3′-amino phosphoramidate and aminoalkyl phosphoramidates, phosphorodiamidates, thionophosphor amidates, thionoalkylphosphonates, thionoalkylphosphotriesters, selenophosphates and boranophosphates having normal 3′-5′ linkages, 2′-5′ linked analogs of these, and those having inverted polarity wherein one or more internucleotide linkages is a 3′ to 3′, 5′ to 5′ or 2′ to 2′ linkage; phosphorothioate and/or heteroatom internucleoside linkages, such as —CH₂—NH—O—CH₂—, —CH₂—N(CH₃)—O—CH₂— (known as a methylene (methylimino) or MMI backbone), —CH₂—O—N(CH₃)—CH₂—, —CH₂—N(CH₃)—N(CH₃)—CH₂— and —O—N(CH₃)—CH₂—CH₂— (wherein the native phosphodiester internucleotide linkage is represented as —O—P(═O)(OH)—O—CH₂—); morpholino linkages (formed in part from the sugar portion of a nucleoside); morpholino backbones; phosphorodiamidate or other non-phosphodiester internucleoside linkages; siloxane backbones; sulfide, sulfoxide and sulfone backbones; formacetyl and thioformacetyl backbones; methylene formacetyl and thioformacetyl backbones; riboacetyl backbones; alkene containing backbones; sulfamate backbones; methyleneimino and methylenehydrazino backbones; sulfonate and sulfonamide backbones; amide backbones; other backbone modifications having mixed N, O, S and CH₂ component parts; and combinations thereof.

### VII. Vectors and Multiplexed Expression Vectors

[0335] Compositions, systems, and methods described herein comprise a vector or a use thereof. A vector can comprise a nucleic acid of interest. In some embodiments, the nucleic acid of interest comprises one or more components of a composition or system described herein. In some embodiments, the nucleic acid of interest comprises a nucleotide sequence that encodes one or more components of the composition or system described herein. In some embodiments, one or more components comprises a polypeptide(s), guide nucleic acid(s), target nucleic acid(s), and donor nucleic acid(s). In some embodiments, the component comprises a nucleic acid encoding an effector protein, a donor nucleic acid, and a guide nucleic acid or a nucleic acid encoding the guide nucleic acid. The vector may be part of a vector system, wherein a vector system comprises a library of vectors each encoding one or more component of a composition or system described herein. In some embodiments, components described herein (e.g., an effector protein, a guide nucleic acid, and/or a target nucleic acid) are encoded by the same vector. In some embodiments, components described herein (e.g., an effector protein, a guide nucleic acid, and/or a target nucleic acid) are each encoded by different vectors of the system.

[0336] In some embodiments, a vector comprises a nucleotide sequence encoding one or more effector proteins as described herein. In some embodiments, the one or more effector proteins comprise at least two effector proteins. In some embodiments, the at least two effector protein are the same. In some embodiments, the at least two effector proteins are different from each other. In some embodiments, the nucleotide sequence is operably linked to a promoter that is operable in a target cell, such as a eukaryotic cell. In some embodiments, the vector comprises the nucleotide sequence encoding 1, 2, 3, 4, 5, 6, 7, 8, 9, 10, 11, 12, 13, 14, 15, 16, 17, 18, 19, 20, 21, 22, 23, 24, 25, 26, 27, 28, 29, 30, 31, 32, 33, 34, 35, 36, 37, 38, 39, 40, 41, 42, 43, 44, 45, 46, 47, 48, 49, 50 or more effector proteins.

[0337] The terms “promoter” and “promoter sequence” refer to a DNA regulatory region capable of binding RNA polymerase and initiating transcription of a downstream (3′ direction) coding or non-coding sequence. A transcription initiation site, as well as protein binding domains responsible for the binding of RNA polymerase, can also be found in a promoter region. Eukaryotic promoters will often, but not always, contain “TATA” boxes and “CAT” boxes. Various promoters, including inducible promoters, may be used to drive expression by the various vectors of the present disclosure.

[0338] In some examples, the delivery vector may be a eukaryotic vector, a prokaryotic vector (e.g., a bacterial vector) a viral vector, or any combination thereof. In some embodiments, the delivery vehicle may be a non-viral vector. In some embodiments, the delivery vehicle may be a plasmid. In some embodiments, the plasmid comprises DNA. In some embodiments, the plasmid comprises RNA. In some examples, the plasmid comprises circular double-stranded DNA. In some examples, the plasmid may be linear. In some examples, the plasmid comprises one or more genes of interest and one or more regulatory elements. The term “regulatory element” refers to transcriptional and translational control sequences, such as promoters, enhancers, polyadenylation signals, terminators, protein degradation signals, and the like, that provide for and/or regulate transcription of a non-coding sequence (e.g., a guide nucleic acid) or a coding sequence (e.g., effector proteins, fusion proteins, and the like) and/or regulate translation of an encoded polypeptide.

[0339] In some examples, the plasmid comprises a bacterial backbone containing an origin of replication and an antibiotic resistance gene or other selectable marker for plasmid amplification in bacteria. In some examples, the plasmid may be a minicircle plasmid. In some examples, the plasmid contains one or more genes that provide a selective marker to induce a target cell to retain the plasmid. In some examples, the plasmid may be formulated for delivery through injection by a needle carrying syringe. In some examples, the plasmid may be formulated for delivery via electroporation. In some examples, the plasmids may be engineered through synthetic or other suitable means known in the art. For example, in some cases, the genetic elements may be assembled by restriction digest of the desired genetic sequence from a donor plasmid or organism to produce ends of the DNA which may then be readily ligated to another genetic sequence. In some embodiments, the vector is a non-viral vector, and a physical method or a chemical method is employed for delivery into the somatic cell.

[0340] In some embodiments, a vector may encode one or more of any system components, including but not limited to effector proteins, guide nucleic acids, donor nucleic acids, and target nucleic acids as described herein. In some embodiments, a system component encoding sequence is operably linked to a promoter that is operable in a target cell, such as a eukaryotic cell. In some embodiments, a vector may encode 1, 2, 3, 4 or more of any system components. For example, a vector may encode two or more guide nucleic acids, wherein each guide nucleic acid comprises a different sequence. A vector may encode an effector protein and a guide nucleic acid. A vector may encode an effector protein, a guide nucleic acid, and a donor nucleic acid.

[0341] In some embodiments, a vector comprises one or more guide nucleic acids, or a nucleotide sequence encoding the one or more guide nucleic acids as described herein. In some embodiments, the one or more guide nucleic acids comprise at least two guide nucleic acids. In some embodiments, the at least two guide nucleic acids are the same. In some embodiments, the at least two guide nucleic acids are different from each other. In some embodiments, the guide nucleic acid or the nucleotide sequence encoding the guide nucleic acid is operably linked to a promoter that is operable in a target cell, such as a eukaryotic cell. In some embodiments, the vector comprises 1, 2, 3, 4, 5, 6, 7, 8, 9, 10, 11, 12, 13, 14, 15, 16, 17, 18, 19, 20, 21, 22, 23, 24, 25, 26, 27, 28, 29, 30, 31, 32, 33, 34, 35, 36, 37, 38, 39, 40, 41, 42, 43, 44, 45, 46, 47, 48, 49, 50 or more guide nucleic acids. In some embodiments, the vector comprises a nucleotide sequence encoding 1, 2, 3, 4, 5, 6, 7, 8, 9, 10, 11, 12, 13, 14, 15, 16, 17, 18, 19, 20, 21, 22, 23, 24, 25, 26, 27, 28, 29, 30, 31, 32, 33, 34, 35, 36, 37, 38, 39, 40, 41, 42, 43, 44, 45, 46, 47, 48, 49, 50 or more guide nucleic acids.

[0342] In some embodiments, a vector comprises one or more donor nucleic acids as described herein. In some embodiments, the one or more donor nucleic acids comprise at least two donor nucleic acids. In some embodiments, the at least two donor nucleic acids are the same. In some embodiments, the at least two donor nucleic acids are different from each other. In some embodiments, the vector comprises 1, 2, 3, 4, 5, 6, 7, 8, 9, 10, 11, 12, 13, 14, 15, 16, 17, 18, 19, 20, 21, 22, 23, 24, 25, 26, 27, 28, 29, 30, 31, 32, 33, 34, 35, 36, 37, 38, 39, 40, 41, 42, 43, 44, 45, 46, 47, 48, 49, 50 or more donor nucleic acids.

[0343] In some embodiments, a vector may comprise or encode one or more regulatory elements. Regulatory elements may refer to transcriptional and translational control sequences, such as promoters, enhancers, polyadenylation signals, terminators, protein degradation signals, and the like, that provide for and/or regulate transcription of a non-coding sequence or a coding sequence and/or regulate translation of an encoded polypeptide. In some embodiments, a vector may comprise or encode for one or more additional elements, such as, for example, replication origins, antibiotic resistance (or a nucleic acid encoding the same), a tag (or a nucleic acid encoding the same), selectable markers, and the like. In some embodiments, a vector comprises or encodes for one or more elements, such as, for example, ribosome binding sites, and RNA splice sites.

[0344] Vectors described herein can encode a promoter—a regulatory region on a nucleic acid, such as a DNA sequence, capable of initiating transcription of a downstream (3′ direction) coding or non-coding sequence. A promoter can be linked at its 3′ terminus to a nucleic acid, the expression or transcription of which is desired, and extends upstream (5′ direction) to include bases or elements necessary to initiate transcription or induce expression, which could be measured at a detectable level. A promoter can comprise a nucleotide sequence, referred to herein as a “promoter sequence”. The promoter sequence can include a transcription initiation site, and one or more protein binding domains responsible for the binding of transcription machinery, such as RNA polymerase. When eukaryotic promoters are used, such promoters can contain “TATA” boxes and “CAT” boxes. Various promoters, including inducible promoters, may be used to drive expression, i.e., transcriptional activation, of the nucleic acid of interest. Accordingly, in some embodiments, the nucleic acid of interest can be operably linked to a promoter.

[0345] Promotors may be any suitable type of promoter envisioned for the compositions, systems, and methods described herein. Examples include constitutively active promoters (e.g., CMV promoter), inducible promoters (e.g., heat shock promoter, tetracycline-regulated promoter, steroid-regulated promoter, metal-regulated promoter, estrogen receptor-regulated promoter, etc.), spatially restricted and/or temporally restricted promoters (e.g., a tissue specific promoter, a cell type specific promoter, etc.), etc. Suitable promoters include, but are not limited to: SV40 early promoter, mouse mammary tumor virus long terminal repeat (LTR) promoter; adenovirus major late promoter (Ad MLP); a herpes simplex virus (HSV) promoter, a cytomegalovirus (CMV) promoter such as the CMV immediate early promoter region (CMVIE), a rous sarcoma virus (RSV) promoter, a human U6 small nuclear promoter (U6), an enhanced U6 promoter, and a human H1 promoter (H1). By transcriptional activation, it is intended that transcription will be increased above basal levels in the target cell by 2 fold, 5 fold, 10 fold, 50 fold, by 100 fold, 500 fold, or by 1000 fold, or more. In addition, vectors used for providing a nucleic acid that, when transcribed, produces a guide nucleic acid and/or a nucleic acid that encodes an effector protein to a cell may include nucleic acid sequences that encode for selectable markers in the target cells, so as to identify cells that have taken up the guide nucleic acid and/or the effector protein.

[0346] In general, vectors provided herein comprise at least one promotor or a combination of promoters driving expression or transcription of one or more genome editing tools described herein. In some embodiments, the vector comprises a nucleotide sequence of a promoter. In some embodiments, the vector comprises two promoters. In some embodiments, the vector comprises three promoters. In some embodiments, a length of the promoter is less than about 500, less than about 400, less than about 300, or less than about 200 linked nucleotides. In some embodiments, a length of the promoter is at least 100, at least 200, at least 300, at least 400, or at least 500 linked nucleotides. Non-limiting examples of promoters include CMV, 7SK, EF1a, RPBSA, hPGK, EFS, SV40, PGK1, Ubc, human beta actin, CAG, TRE, UAS, Ac5, Polyhedrin, CaMKIIa, GAL1-10, H1, TEF1, GDS, ADH1, CaMV35S, HSV TK, Ubi, U6, MNDU3, MSCV, MND, and CAG.

[0347] In some embodiments, the promoter is a constitutive promoter. In some embodiments, the promoter is an inducible promoter. In some embodiments, the inducible promoter only drives expression of its corresponding coding sequence (e.g., polypeptide or guide nucleic acid) when a signal is present, e.g., a hormone, a small molecule, a peptide. Non-limiting examples of inducible promoters are the T7 RNA polymerase promoter, the T3 RNA polymerase promoter, the Isopropyl-beta-D-thiogalactopyranoside (IPTG)-regulated promoter, a lactose induced promoter, a heat shock promoter, a tetracycline-regulated promoter (tetracycline-inducible or tetracycline-repressible), a steroid regulated promoter, a metal-regulated promoter, and an estrogen receptor-regulated promoter. In some embodiments, the promoter is an activation-inducible promoter, such as a CD69 promoter. In some embodiments, the promoter for expressing effector protein is a ubiquitous promoter. In some embodiments, the ubiquitous promoter comprises MND or CAG promoter sequence.

[0348] In some embodiments, the promoters are prokaryotic promoters (e.g., drive expression of a gene in a prokaryotic cell). In some embodiments, the promoters are eukaryotic promoters, (e.g., drive expression of a gene in a eukaryotic cell). In some embodiments, the promoter is EF1a. In some embodiments, the promoter is ubiquitin. In some embodiments, vectors are bicistronic or polycistronic vector (e.g., having or involving two or more loci responsible for generating a protein) having an internal ribosome entry site (IRES) is for translation initiation in a cap-independent manner.

[0349] In some embodiments, a vector described herein is a nucleic acid expression vector. In some embodiments, a vector described herein is a recombinant expression vector. In some embodiments, a vector described herein is a messenger RNA.

[0350] In some embodiments, a vector described herein is a delivery vector. In some embodiments, the delivery vector is a eukaryotic vector, a prokaryotic vector (e.g., a bacterial vector) a viral vector, or any combination thereof. In some embodiments, the delivery vehicle is a non-viral vector. In some embodiments, the delivery vector is a plasmid. In some embodiments, the plasmid comprises DNA. In some embodiments, the plasmid comprises RNA. In some embodiments, the plasmid comprises circular double-stranded DNA. In some embodiments, the plasmid is linear. In some embodiments, the plasmid comprises one or more coding sequences of interest and one or more regulatory elements. In some embodiments, the plasmid comprises a bacterial backbone containing an origin of replication and an antibiotic resistance gene or other selectable marker for plasmid amplification in bacteria. In some embodiments, the plasmid is a minicircle plasmid. In some embodiments, the plasmid contains one or more genes that provide a selective marker to induce a target cell to retain the plasmid. In some examples, the plasmids are engineered through synthetic or other suitable means known in the art. For example, in some embodiments, the genetic elements are assembled by restriction digest of the desired genetic sequence from a donor plasmid or organism to produce ends of the DNA which is then be readily ligated to another genetic sequence.

[0351] In some embodiments, vectors comprise an enhancer. Enhancers are nucleotide sequences that have the effect of enhancing promoter activity. In some embodiments, enhancers augment transcription regardless of the orientation of their sequence. In some embodiments, enhancers activate transcription from a distance of several kilo basepairs. Furthermore, enhancers are located optionally upstream or downstream of a gene region to be transcribed, and/or located within the gene, to activate the transcription. Exemplary enhancers include, but are not limited to, WPRE; CMV enhancers; the R-U5′ segment in LTR of HTLV-I.

[0352] In some embodiments, a vector is administered as part of a method of nucleic acid detection, editing, and/or treatment as described herein. In some embodiments, a vector is administered in a single vehicle, such as a single expression vector. In some embodiments, at least two of the three components, a nucleic acid encoding one or more effector proteins, one or more donor nucleic acids, and one or more guide nucleic acids or a nucleic acid encoding the one or more guide nucleic acid, are provided in the single expression vector. In some embodiments, components, such as a guide nucleic acid and an effector protein, are encoded by the same vector. In some embodiments, an effector protein (or a nucleic acid encoding same) and/or an engineered guide nucleic acid (or a nucleic acid that, when transcribed, produces same) are not co-administered with donor nucleic acid in a single vehicle. In some embodiments, an effector protein (or a nucleic acid encoding same), an engineered guide nucleic acid (or a nucleic acid that, when transcribed, produces same), and/or donor nucleic acid are administered in one or more or two or more vehicles, such as one or more, or two or more expression vectors.

[0353] In some embodiments, a vector may be part of a vector system. In some embodiments, the vector system comprises a library of vectors each encoding one or more components of a composition or system described herein. In some embodiments, a vector system is administered as part of a method of nucleic acid detection, editing, and/or treatment as described herein, wherein at least two vectors are co-administered. In some embodiments, the at least two vectors comprise different components. In some embodiments, the at least two vectors comprise the same component having different sequences. In some embodiments, at least one of the three components, a nucleic acid encoding one or more effector proteins, one or more donor nucleic acids, and one or more guide nucleic acids or a nucleic acid encoding the one or more guide nucleic acids, or a variant thereof is provided in a different vector. In some embodiments, the nucleic acid encoding the effector protein, and a guide nucleic acid or a nucleic acid encoding the guide nucleic acid are provided in different vectors. In some embodiments, the donor nucleic acid is encoded by a different vector than the vector encoding the effector protein and the guide nucleic acid.

### Lipid Particles and Non-viral Vectors

[0354] In some embodiments, compositions and systems provided herein comprise a lipid particle. In some embodiments, a lipid particle is a lipid nanoparticle (LNP). In some embodiments, a lipid or a lipid nanoparticle can encapsulate an expression vector as described herein. LNPs are a non-viral delivery system for delivery of the composition and/or system components described herein. LNPs are particularly effective for delivery of nucleic acids. Beneficial properties of LNP include ease of manufacture, low cytotoxicity and immunogenicity, high efficiency of nucleic acid encapsulation and cell transfection, multi-dosing capabilities and flexibility of design (Kulkarni et al., (2018) Nucleic Acid Therapeutics, 28(3): 146-157). In some embodiments, compositions and methods comprise a lipid, polymer, nanoparticle, or a combination thereof, or use thereof, to introduce one or more effector proteins, one or more guide nucleic acids, one or more donor nucleic acids, or any combinations thereof to a cell. Non-limiting examples of lipids and polymers are cationic polymers, cationic lipids, ionizable lipids, or bio-responsive polymers. In some embodiments, the ionizable lipids exploits chemical-physical properties of the endosomal environment (e.g., pH) offering improved delivery of nucleic acids. In some embodiments, the ionizable lipids are neutral at physiological pH. In some embodiments, the ionizable lipids are protonated under acidic pH. In some embodiments, the bio-responsive polymer exploits chemical-physical properties of the endosomal environment (e.g., pH) to preferentially release the genetic material in the intracellular space.

[0355] In some embodiments, a LNP comprises an outer shell and an inner core. In some embodiments, the outer shell comprises lipids. In some embodiments, the lipids comprise modified lipids. In some embodiments, the modified lipids comprise pegylated lipids. In some embodiments, the lipids comprise one or more of cationic lipids, anionic lipids, ionizable lipids, and non-ionic lipids. In some embodiments, the LNP comprises one or more of N1,N3,N5-tris(3-(didodecylamino)propyl)benzene-1,3,5-tricarboxamide (TT3), 2-dioleoyl-sn-glycero-3-phosphoethanolamine (DOPE), 1-palmitoyl-2-oleoylsn-glycero-3-phosphoethanolamine (POPE), 1,2-distearoyl-sn-glycero-3-phosphocholine (DSPC), cholesterol (Chol), 1,2-dimyristoyl-sn-glycerol, and methoxypolyethylene glycol (DMG-PEChooo), derivatives, analogs, or variants thereof. In some embodiments, the LNP has a negative net overall charge prior to complexation with one or more of a guide nucleic acid, a nucleic acid encoding the one or more guide nucleic acid, a nucleic acid encoding the effector protein, and/or a donor nucleic acid. In some embodiments, the inner core is a hydrophobic core. In some embodiments, the one or more of a guide nucleic acid, the nucleic acid encoding the one or more guide nucleic acid, the nucleic acid encoding the effector protein, and/or the donor nucleic acid forms a complex with one or more of the cationic lipids and the ionizable lipids. In some embodiments, the nucleic acid encoding the effector protein or the nucleic acid encoding the guide nucleic acid is self-replicating.

[0356] In some embodiments, a LNP comprises one or more of cationic lipids, ionizable lipids, and modified versions thereof. In some embodiments, the ionizable lipid comprises TT3 or a derivative thereof. Accordingly, in some embodiments, the LNP comprises one or more of TT3 and pegylated TT3. The publication WO2016187531 is hereby incorporated by reference in its entirety, which describes representative LNP formulations in Table 2 and Table 3, and representative methods of delivering LNP formulations in Example 7.

[0357] In some embodiments, a LNP comprises a lipid composition targeting to a specific organ. In some embodiments, the lipid composition comprises lipids having a specific alkyl chain length that controls accumulation of the LNP in the specific organ (e.g., liver or spleen). In some embodiments, the lipid composition comprises a biomimetic lipid that controls accumulation of the LNP in the specific organ (e.g., brain). In some embodiments, the lipid composition comprises lipid derivatives (e.g., cholesterol derivatives) that controls accumulation of the LNP in a specific cell (e.g., liver endothelial cells, Kupffer cells, hepatocytes).

### Delivery of Viral Vectors

[0358] In some embodiments, a vector described herein comprises a viral vector. In some embodiments, the viral vector comprises a nucleic acid to be delivered into a host cell by a recombinantly produced virus or viral particle. In some embodiments, the vector is an adeno-associated viral vector. There are a variety of viral vectors that are associated with various types of viruses, including but not limited to retroviruses (e.g., lentiviruses and γ-retroviruses), adenoviruses, arenaviruses, alphaviruses, adeno-associated viruses (AAVs), baculoviruses, vaccinia viruses, herpes simplex viruses and poxviruses. In some embodiments, the vector is an adeno-associated viral (AAV) vector. In some embodiments, the viral vector is a recombinant viral vector. In some embodiments, the vector is a retroviral vector. In some embodiments, the retroviral vector is a lentiviral vector. In some embodiments, the retroviral vector comprises gamma-retroviral vector. A viral vector provided herein may be derived from or based on any such virus. For example, in some embodiments, the gamma-retroviral vector is derived from a Moloney Murine Leukemia Virus (MoMLV, MMLV, MuLV, or MLV) or a Murine Stem cell Virus (MSCV) genome. In some embodiments, the lentiviral vector is derived from the human immunodeficiency virus (HIV) genome. In some embodiments, the viral vector is a chimeric viral vector. In some embodiments, the chimeric viral vector comprises viral portions from two or more viruses. In some embodiments, the viral vector corresponds to a virus of a specific serotype.

[0359] In some embodiments, a viral vector is an adeno-associated viral vector (AAV vector). In some embodiments, a viral particle that delivers a viral vector described herein is an AAV. In some embodiments, the AAV comprises any AAV known in the art. In some embodiments, the viral vector corresponds to a virus of a specific AAV serotype. In some embodiments, the AAV serotype is selected from an AAV1 serotype, an AAV2 serotype, AAV3 serotype, an AAV4 serotype, AAV5 serotype, an AAV6 serotype, AAV7 serotype, an AAV8 serotype, an AAV9 serotype, an AAV10 serotype, an AAV11 serotype, an AAV12 serotype, an AAV-rh10 serotype, and any combination, derivative, or variant thereof. In some embodiments, the AAV vector is a recombinant vector, a hybrid AAV vector, a chimeric AAV vector, a self-complementary AAV (scAAV) vector, a single-stranded AAV, or any combination thereof. scAAV genomes are generally known in the art and contain both DNA strands which can anneal together to form double-stranded DNA.

[0360] In some embodiments, an AAV vector described herein is a chimeric AAV vector. In some embodiments, the chimeric AAV vector comprises an exogenous amino acid or an amino acid substitution, or capsid proteins from two or more serotypes. In some examples, a chimeric AAV vector may be genetically engineered to increase transduction efficiency, selectivity, or a combination thereof.

[0361] In some embodiments, AAV vector described herein comprises two inverted terminal repeats (ITRs). According, in some embodiments, the viral vector provided herein comprises two inverted terminal repeats of AAV. A nucleotide sequence between the ITRs of an AAV vector provided herein comprises a sequence encoding genome editing tools. In some embodiments, the genome editing tools comprise a nucleic acid encoding one or more effector proteins, a nucleic acid encoding one or more fusion proteins (e.g., a nuclear localization signal (NLS), polyA tail), one or more guide nucleic acids, a nucleic acid encoding the one or more guide nucleic acids, respective promoter(s), one or more donor nucleic acid, or any combinations thereof. In some embodiments, viral vectors provided herein comprise at least one promotor or a combination of promoters driving expression or transcription of one or more genome editing tools described herein. In some embodiments, a coding region of the AAV vector forms an intramolecular double-stranded DNA template thereby generating the AAV vector that is a self-complementary AAV (scAAV) vector. In some embodiments, the scAAV vector comprises the sequence encoding genome editing tools that has a length of about 2 kb to about 3 kb. In some embodiments, the AAV vector provided herein is a self-inactivating AAV vector. In some embodiments, the AAV vector provided herein comprises a modification, such as an insertion, deletion, chemical alteration, or synthetic modification, relative to a wild-type AAV vector.

### Producing AAV Delivery Vectors

[0362] In some embodiments, methods of producing AAV delivery vectors herein comprise packaging a nucleic acid encoding an effector protein and a guide nucleic acid, or a combination thereof, into an AAV vector. In some embodiments, methods of producing the delivery vector comprises, (a) contacting a cell with at least one nucleic acid encoding: (i) a guide nucleic acid; (ii) a Replication (Rep) gene; and (iii) a Capsid (Cap) gene that encodes an AAV capsid protein; (b) expressing the AAV capsid protein in the cell; (c) assembling an AAV particle; and (d) packaging an effector encoding nucleic acid into the AAV particle, thereby generating an AAV delivery vector. In some embodiments, promoters, stuffer sequences, and any combination thereof may be packaged in the AAV vector. In some examples, the AAV vector may package 1, 2, 3, 4, or 5 guide nucleic acids or copies thereof. In some embodiments, the AAV vector comprises inverted terminal repeats, e.g., a 5′ inverted terminal repeat and a 3′ inverted terminal repeat. In some embodiments, the AAV vector comprises a mutated inverted terminal repeat that lacks a terminal resolution site.

[0363] In some embodiments, a hybrid AAV vector is produced by transcapsidation, e.g., packaging an inverted terminal repeat (ITR) from a first serotype into a capsid of a second serotype, wherein the first and second serotypes may be not the same. In some examples, the Rep gene and ITR from a first AAV serotype (e.g., AAV2) may be used in a capsid from a second AAV serotype (e.g., AAV9), wherein the first and second AAV serotypes may be not the same. As a non-limiting example, a hybrid AAV serotype comprising the AAV2 ITRs and AAV9 capsid protein may be indicated AAV2/9. In some examples, the hybrid AAV delivery vector comprises an AAV2/1, AAV2/2, AAV 2/4, AAV2/5, AAV2/8, or AAV2/9 vector.

### Producing AAV Particles

[0364] In some embodiments, AAV particles described herein are recombinant AAV (rAAV). In some embodiments, rAAV particles are generated by transfecting AAV producing cells with an AAV-containing plasmid carrying the sequence encoding the genome editing tools, a plasmid that carries viral encoding regions, i.e., Rep and Cap gene regions; and a plasmid that provides the helper genes such as E1A, E1B, E2A, E4ORF6 and VA. In some embodiments, the AAV producing cells are mammalian cells. In some embodiments, host cells for rAAV viral particle production are mammalian cells. In some embodiments, a mammalian cell for rAAV viral particle production is a COS cell, a HEK293T cell, a HeLa cell, a KB cell, a variant thereof, or a combination thereof. In some embodiments, rAAV virus particles can be produced in the mammalian cell culture system by providing the rAAV plasmid to the mammalian cell. In some embodiments, producing rAAV virus particles in a mammalian cell comprises transfecting vectors that express the rep protein, the capsid protein, and the gene-of-interest expression construct flanked by the ITR sequence on the 5′ and 3′ ends. Methods of such processes are provided in, for example, Naso et al., BioDrugs, 2017 August; 31(4):317-334 and Benskey et al., (2019), Methods Mol Biol., 1937:3-26, each of which is incorporated by reference in their entireties.

[0365] In some embodiments, rAAV is produced in a non-mammalian cell. In some embodiments, rAAV is produced in an insect cell. In some embodiments, the insect cell for producing rAAV viral particles comprises a Sf9 cell. In some embodiments, production of rAAV virus particles in insect cells may comprise baculovirus. In some embodiments, production of rAAV virus particles in insect cells may comprise infecting the insect cells with three recombinant baculoviruses, one carrying the cap gene, one carrying the rep gene, and one carrying the gene-of-interest expression construct enclosed by an ITR on both the 5′ and 3′ end. In some embodiments, rAAV virus particles are produced by the One Bac system. In some embodiments, rAAV virus particles can be produced by the Two Bac system. In some embodiments, in the Two Bac system, the rep gene and the cap gene of the AAV is integrated into one baculovirus virus genome, and the ITR sequence and the gene-of-interest expression construct is integrated into another baculovirus virus genome. In some embodiments, in the One Bac system, an insect cell line that expresses both the rep protein and the capsid protein is established and infected with a baculovirus virus integrated with the ITR sequence and the gene-of-interest expression construct. Details of such processes are provided in, for example, Smith et. al., (1983), Mol. Cell. Biol., 3(12):2156-65; Urabe et al., (2002), Hum. Gene. Ther., 1; 13(16):1935-43; and Benskey et al., (2019), Methods Mol Biol., 1937:3-26, each of which is incorporated by reference in its entirety.

### VIII. Target Nucleic Acids

[0366] Disclosed herein are compositions, systems and methods for detecting and/or editing a target nucleic acid. In some embodiments, the target nucleic acid is a double stranded nucleic acid. In some embodiments, the target nucleic acid is a single stranded nucleic acid. Alternatively, or in combination, the target nucleic acid is a double stranded nucleic acid and is prepared into single stranded nucleic acids before or upon contacting an RNP. In some embodiments, the single stranded nucleic acid comprises a RNA, wherein the RNA comprises a mRNA, arRNA, a tRNA, a non-coding RNA, a long non-coding RNA, a microRNA (miRNA), and a single-stranded RNA (ssRNA). In some embodiments, the target nucleic acid is complementary DNA (cDNA) synthesized from a single-stranded RNA template in a reaction catalyzed by a reverse transcriptase. Exemplary chemical methods include delivery of the recombinant polynucleotide via liposomes such as, cationic lipids or neutral lipids; dendrimers; nanoparticles; or cell-penetrating peptides.

[0367] In some embodiments, the target nucleic acid is an mRNA. In some embodiments, the target nucleic acid is from a virus, a parasite, or a bacterium described herein.

[0368] In some embodiments, a target nucleic acid comprising a target sequence comprises a PAM sequence. In some embodiments, the PAM sequence is 3′ to the target sequence. In some embodiments, the PAM sequence is directly 3′ to the target sequence. In some embodiments, the PAM sequence 5′ to the target sequence. In some embodiments, the PAM sequence is directly 5′ to the target sequence. In some embodiments, the target nucleic acid as described in the methods herein does not initially comprise a PAM sequence. However, any target nucleic acid of interest may be generated using the methods described herein to comprise a PAM sequence, and thus be a PAM target nucleic acid. A PAM target nucleic acid, as used herein, refers to a target nucleic acid that has been amplified to insert a PAM sequence that is recognized by an effector protein system.

[0369] In some embodiments, a target nucleic acid comprises 5 to 100, 5 to 90, 5 to 80, 5 to 70, 5 to 60, 5 to 50, 5 to 40, 5 to 30, 5 to 25, 5 to 20, 5 to 15, or 5 to 10 linked nucleotides. In some embodiments, the target nucleic acid comprises 10 to 90, 20 to 80, 30 to 70, or 40 to 60 linked nucleotides. In some embodiments, the target nucleic acid comprises 5, 6, 7, 8, 9, 10, 11, 12, 13, 14, 15, 16, 17, 18, 19, 20, 21, 22, 23, 24, 25, 26, 27, 28, 29, 30, 31, 32, 33, 34, 35, 36, 37, 38, 39, 40, 45, 50, 60, 70, 80, 90, or 100 linked nucleotides. In some embodiments, the target nucleic acid comprises at least 10, at least 20, at least 30, at least 40, at least 50, at least 60, at least 70, at least 80, at least 90, or at least 100 linked nucleotides.

[0370] In some embodiments, compositions, systems, and methods described herein comprise a target nucleic acid may be responsible for a disease, contain a mutation (e.g., single strand polymorphism, point mutation, insertion, or deletion), be contained in an amplicon, or be uniquely identifiable from the surrounding nucleic acids (e.g., contain a unique sequence of nucleotides). In some embodiments, the target nucleic acid has undergone a modification (e.g., an editing) after contacting with an RNP. In some embodiments, the editing is a change in the sequence of the target nucleic acid. In some embodiments, the change comprises an insertion, deletion, or substitution of one or more nucleotides compared to the target nucleic acid that has not undergone any modification.

[0371] Nucleic acids, such as DNA and pre-mRNA, described herein can contain at least one intron and at least one exon, wherein as read in the 5′ to the 3′ direction of a nucleic acid strand, the 3′ end of an intron can be adjacent to the 5′ end of an exon, and wherein said intron and exon correspond for transcription purposes. If a nucleic acid strand contains more than one intron and exon, the 5′ end of the second intron is adjacent to the 3′ end of the first exon, and 5′ end of the second exon is adjacent to the 3′ end of the second intron. The junction between an intron and an exon can be referred to herein as a splice junction, wherein a 5′ splice site (SS) can refer to the +1/+2 position at the 5′ end of intron and a 3′SS can refer to the last two positions at the 3′ end of an intron. Alternatively, a 5′ SS can refer to the 5′ end of an exon and a 3′SS can refer to the 3′ end of an exon. In some embodiments, nucleic acids can contain one or more elements that act as a signal during transcription, splicing, and/or translation. In some embodiments, signaling elements include a 5′SS, a 3′SS, a premature stop codon, U1 and/or U2 binding sequences, and cis acting elements such as branch site (BS), polypyridine tract (PYT), exonic and intronic splicing enhancers (ESEs and ISEs) or silencers (ESSs and ISSs). In some embodiments, nucleic acids may also comprise a untranslated region (UTR), such as a 5′ UTR or a 3′ UTR. In some embodiments, the start of an exon or intron is referred to interchangeably herein as the 5′ end of an exon or intron, respectively. Likewise, in some embodiments, the end of an exon or intron is referred to interchangeably herein as the 3′ end of an exon or intron, respectively.

[0372] In some embodiments, at least a portion of at least one target sequence is within about 1, about 5 or more, about 10 or more, about 15 or more, about 20 or more, about 25 or more, about 30 or more, about 35 or more, about 40 or more, about 45 or more, about 50 or more, about 55 or more, about 60 or more, about 65 or more, about 70 or more, about 75 or more, about 80 or more, about 85 or more, about 90 or more, about 95 or more, about 100 or more, about 105 or more, about 110 or more, about 115 or more, about 120 or more, about 125 or more, about 130 or more, about 135 or more, about 140 or more, about 145 or more, or about 150 to about 300 nucleotides adjacent to: the 5′ end of an exon; the 3′ end of an exon; the 5′ end of an intron; the 3′ end of an intron; one or more signaling element comprising a 5′SS, a 3′SS, a premature stop codon, U1 binding sequence, U2 binding sequence, a BS, a PYT, ESE, an ISE, an ESS, an ISS; a 5′ UTR; a 3′ UTR; more than one of the foregoing, or any combination thereof. In some embodiments, the target nucleic acid comprises a target locus. In some embodiments, the target nucleic acid comprises more than one target loci. In some embodiments, the target nucleic acid comprises two target loci. Accordingly, in some embodiments, the target nucleic acid can comprise one or more target sequences.

[0373] In some embodiments, compositions, systems, and methods described herein comprise an edited target nucleic acid which can describe a target nucleic acid wherein the target nucleic acid has undergone a change, for example, after contact with an effector protein. In some embodiments, the editing is an alteration in the sequence of the target nucleic acid. In some embodiments, the edited target nucleic acid comprises an insertion, deletion, or replacement of one or more nucleotides compared to the unedited target nucleic acid. In some embodiments, the editing is a mutation.

### Mutations

[0374] In some embodiments, target nucleic acids described herein comprise a mutation. In some embodiments, a composition, system or method described herein can be used to edit a target nucleic acid comprising a mutation such that the mutation is edited to be the wild-type nucleotide or nucleotide sequence. In some embodiments, a composition, system or method described herein can be used to detect a target nucleic acid comprising a mutation. A mutation may result in the insertion of at least one amino acid in a protein encoded by the target nucleic acid. A mutation may result in the deletion of at least one amino acid in a protein encoded by the target nucleic acid. A mutation may result in the substitution of at least one amino acid in a protein encoded by the target nucleic acid. A mutation that results in the deletion, insertion, or substitution of one or more amino acids of a protein encoded by the target nucleic acid may result in misfolding of a protein encoded by the target nucleic acid. A mutation may result in a premature stop codon, thereby resulting in a truncation of the encoded protein.

[0375] Non-limiting examples of mutations are insertion-deletion (indel), a point mutation, single nucleotide polymorphism (SNP), a chromosomal mutation, a copy number mutation or variation, and frameshift mutations. In some embodiments, an indel mutation is an insertion or deletion of one or more nucleotides. The term, “indel” refers to an insertion-deletion or indel mutation, which is a type of genetic mutation that results from the insertion and/or deletion of one or more nucleotide in a target nucleic acid. An indel can vary in length (e.g., 1 to 1,000 nucleotides in length) and be detected by any suitable method, including sequencing. In some embodiments, a point mutation comprises a substitution, insertion, or deletion. In some embodiments, a frameshift mutation occurs when the number of nucleotides in the insertion/deletion is not divisible by three, and it occurs in a protein coding region. In some embodiments, a chromosomal mutation can comprise an inversion, a deletion, a duplication, or a translocation of one or more nucleotides. In some embodiments, a copy number variation can comprise a gene amplification or an expanding trinucleotide repeat. In some embodiments, an SNP is associated with a phenotype of the sample or a phenotype of the organism from which the sample was taken. In some embodiments, an SNP is associated with altered phenotype from wild type phenotype. In some embodiments, the SNP is a synonymous substitution or a nonsynonymous substitution. In some embodiments, the nonsynonymous substitution is a missense substitution or a nonsense point mutation. In some embodiments, the synonymous substitution is a silent substitution.

[0376] In some embodiments, a target nucleic acid described herein comprises a mutation of one or more nucleotides. In some embodiments, the one or more nucleotides comprises 1, 2, 3, 4, 5, 6, 7, 8, 9, 10, 11, 12, 13, 14, 15, 16, 17, 18, 19, 20 or more nucleotides. In some embodiments, the mutation comprises a deletion, insertion, and/or substitution of about 5, about 10, about 15, about 20, about 25, about 30, about 35, about 40, about 45, about 50, about 55, about 60, about 65, about 70, about 75, about 80, about 85, about 90, about 95, about 100, about 200, about 300, about 400, about 500, about 600, about 700, about 800, about 900, or about 1000 nucleotides. In some embodiments, the mutation comprises a deletion, insertion, and/or substitution of 1 to 5, 5 to 10, 10 to 15, 15 to 20, 20 to 25, 25 to 30, 30 to 35, 35 to 40, 40 to 45, 45 to 50, 50 to 55, 55 to 60, 60 to 65, 65 to 70, 70 to 75, 75 to 80, 80 to 85, 85 to 90, 90 to 95, 95 to 100, 100 to 200, 200 to 300, 300 to 400, 400 to 500, 500 to 600, 600 to 700, 700 to 800, 800 to 900, 900 to 1000, 1 to 50, 1 to 100, 25 to 50, 25 to 100, 50 to 100, 100 to 500, 100 to 1000, or 500 to 1000 nucleotides. The mutation may be located in a non-coding region or a coding region of a gene, wherein the gene is a target nucleic acid. A mutation may be in an open reading frame of a target nucleic acid. In some embodiments, guide nucleic acids described herein hybridize to a portion of the target nucleic acid comprising or adjacent to the mutation.

[0377] In some embodiments, target nucleic acids comprise a mutation, wherein the mutation is a SNP. In some embodiments, the single nucleotide mutation or SNP is associated with a phenotype of the sample or a phenotype of the organism from which the sample was taken. In some embodiments, the SNP is associated with altered phenotype from wild type phenotype. In some embodiments, a single nucleotide mutation, SNP, or deletion described herein is associated with a disease, such as a genetic disease. In some embodiments, the SNP is a synonymous substitution or a nonsynonymous substitution. In some embodiments, the nonsynonymous substitution is a missense substitution or a nonsense point mutation. In some embodiments, the synonymous substitution is a silent substitution. In some embodiments, the mutation is a deletion of one or more nucleotides. In some embodiments, the single nucleotide mutation, SNP, or deletion is associated with a disease such as a genetic disorder. In some embodiments, the mutation, such as a single nucleotide mutation, a SNP, or a deletion, may be encoded in the sequence of a target nucleic acid from the germline of an organism or may be encoded in a target nucleic acid from a diseased cell.

[0378] In some embodiments, the mutation is associated with a disease, such as a genetic disorder. In some embodiments, the mutation may be encoded in the sequence of a target nucleic acid from the germline of an organism or may be encoded in a target nucleic acid from a diseased cell. In some embodiments, a target nucleic acid described herein comprises a mutation associated with a disease. In some examples, a mutation associated with a disease refers to a mutation whose presence in a subject indicates that the subject is susceptible to or suffers from, a disease, disorder, condition, or syndrome. In some examples, a mutation associated with a disease refers to a mutation which causes, contributes to the development of, or indicates the existence of the disease, disorder, condition, or syndrome. A mutation associated with a disease may also refer to any mutation which generates transcription or translation products at an abnormal level, or in an abnormal form, in cells affected by a disease relative to a control without the disease. In some examples, a mutation associated with a disease refers to a mutation whose presence in a subject indicates that the subject is susceptible to, or suffers from, a disease, disorder, or pathological state. In some embodiments, a mutation associated with a disease, comprises the co-occurrence of a mutation and the phenotype of a disease. The mutation may occur in a gene, wherein transcription or translation products from the gene occur at a significantly abnormal level or in an abnormal form in a cell or subject harboring the mutation as compared to a non-disease control subject not having the mutation. In some embodiments, a target nucleic acid described herein comprises a mutation associated with a disease, wherein the target nucleic acid is any one of the target nucleic acids set forth in TABLE 3. In some embodiments, a target nucleic acid described herein comprises a mutation associated with a disease, wherein the disease is any one of the diseases set forth in TABLE 4.

### Detection and Identification of Target Nucleic Acid

[0379] In some embodiments, a target nucleic acid is in a cell. In some embodiments, the cell is a single-cell eukaryotic organism; a plant cell an algal cell; a fungal cell; an animal cell; a cell of an invertebrate animal; a cell of a vertebrate animal such as fish, amphibian, reptile, bird, and mammal; or a cell of a mammal such as a human, a non-human primate, an ungulate, a feline, a bovine, an ovine, and a caprine. In some embodiments, the cell is a eukaryotic cell. In some embodiments, the cell is a mammalian cell, a human cell, or a plant cell. In some embodiments, the cell is a human cell. In some embodiments, the human cell is a: muscle cell, liver cell, lung cell, cardiac cell, visceral cell, cardiac muscle cell, smooth muscle cell, cardiomyocyte, nodal cardiac muscle cell, smooth muscle cell, visceral muscle cell, skeletal muscle cell, myocyte, red (or slow) skeletal muscle cell, white (fast) skeletal muscle cell, intermediate skeletal muscle, muscle satellite cell, muscle stem cell, myoblast, muscle progenitor cell, induced pluripotent stem cell (iPS), or a cell derived from an iPS cell, modified to have its gene edited and differentiated into myoblasts, muscle progenitor cells, muscle satellite cells, muscle stem cells, skeletal muscle cells, cardiac muscle cells or smooth muscle cells.

[0380] In some embodiments, an effector protein-guide nucleic acid complex may comprise high selectivity for a target sequence. In some embodiments, an RNP comprise a selectivity of at least 200:1, 100:1, 50:1, 20:1, 10:1, or 5:1 for a target nucleic acid over a single nucleotide variant of the target nucleic acid. In some embodiments, an RNP may comprise a selectivity of at least 5:1 for a target nucleic acid over a single nucleotide variant of the target nucleic acid.

[0381] By leveraging such effector protein selectivity, some methods described herein may detect a target nucleic acid present in the sample in various concentrations or amounts as a target nucleic acid population. In some embodiments, the method detects at least 2 target nucleic acid populations. In some embodiments, the method detects at least 3, 4, 5, 6, 7, 8, 9, 10, 20, 30, 40, or 50 target nucleic acid populations. In some embodiments, the method detects 3 to 50, 5 to 40, or 10 to 25 target nucleic acid populations. In some embodiments, the method detects at least 2 individual target nucleic acids. In some embodiments, the method detects at least 3, 5, 10, 20, 30, 40, 50, 100, 200, 300, 400, 500, 600, 700, 800, 900, 1000, 2000, 3000, 4000, 5000, 6000, 7000, 8000, 9000, or 10000 individual target nucleic acids. In some embodiments, the method detects 1 to 10,000, 100 to 8000, 400 to 6000, 500 to 5000, 1000 to 4000, or 2000 to 3000 individual target nucleic acids. In some embodiments, the method detects target nucleic acid present at least at one copy per 10 non-target nucleic acids, 10² non-target nucleic acids, 10³ non-target nucleic acids, 10⁴ non-target nucleic acids, 105 non-target nucleic acids, 10⁶ non-target nucleic acids, 10⁷ non-target nucleic acids, 10⁸ non-target nucleic acids, 10⁹ non-target nucleic acids, or 10¹⁰ non-target nucleic acids.

[0382] In some embodiments, compositions described herein exhibit indiscriminate trans-cleavage of ssRNA, enabling their use for detection of RNA in samples. In some embodiments, target ssRNA are generated from many nucleic acid templates (RNA) in order to achieve cleavage of the FQ reporter in the DETECTR platform. Certain effector proteins may be activated by ssRNA, upon which they may exhibit trans-cleavage of ssRNA and may, thereby, be used to cleave ssRNA FQ reporter molecules in the DETECTR system. These effector proteins may target ssRNA present in the sample or ssRNA generated and/or amplified from any number of nucleic acid templates (RNA). Described herein are reagents comprising a single stranded reporter nucleic acid comprising a detection moiety, wherein the reporter nucleic acid (e.g., the ssDNA-FQ reporter described above) is capable of being cleaved by the Effector protein, upon generation and amplification of ssRNA from a nucleic acid template using the methods disclosed herein, thereby generating a first detectable signal.

[0383] In some embodiments, a target nucleic acid is an amplified nucleic acid of interest. In some embodiments, the nucleic acid of interest is any nucleic acid disclosed herein or from any sample as disclosed herein. In some embodiments, the nucleic acid of interest is an RNA that is reverse transcribed before amplification. In some embodiments, the nucleic acid of interest is amplified then the amplicons is transcribed into RNA.

[0384] In some embodiments, target nucleic acids may activate an effector protein to initiate sequence-independent cleavage of a nucleic acid-based reporter (e.g., a reporter comprising an RNA sequence, or a reporter comprising DNA and RNA). For example, an effector protein of the present disclosure is activated by a target nucleic acid to cleave reporters having an RNA (also referred to herein as an “RNA reporter”). Alternatively, an effector protein of the present disclosure is activated by a target nucleic acid to cleave reporters having an RNA. Alternatively, an effector protein of the present disclosure is activated by a target RNA to cleave reporters having an RNA (also referred to herein as a “RNA reporter”). The RNA reporter may comprise a single-stranded RNA labelled with a detection moiety or may be any RNA reporter as disclosed herein.

[0385] Further description of editing or detecting a target nucleic acid in a gene of interest can be found in more detail in Kim et al., “Enhancement of target specificity of CRISPR-Cas 12a by using a chimeric DNA-RNA guide”, Nucleic Acids Res. 2020 Sep. 4; 48(15):8601-8616; Wang et al., “Specificity profiling of CRISPR system reveals greatly enhanced off-target gene editing”, Scientific Reports volume 10, Article number: 2269 (2020); Tuladhar et al., “CRISPR-Cas9-based mutagenesis frequently provokes on-target mRNA misregulation”, Nature Communications volume 10, Article number: 4056 (2019); Dong et al., “Genome-Wide Off-Target Analysis in CRISPR-Cas9 Modified Mice and Their Offspring”, G3, Volume 9, Issue 11, 1 Nov. 2019, Pages 3645-3651; Winter et al., “Genome-wide CRISPR screen reveals novel host factors required for Staphylococcus aureus α-hemolysin-mediated toxicity”, Scientific Reports volume 6, Article number: 24242 (2016); and Ma et al., “A CRISPR-Based Screen Identifies Genes Essential for West-Nile-Virus-Induced Cell Death”, Cell Rep. 2015 Jul. 28; 12(4):673-83, which are hereby incorporated by reference in their entirety.

### Certain Samples

[0386] Various sample types comprising a target nucleic acid of interest are consistent with the present disclosure. These samples may comprise a target nucleic acid for detection. In some embodiments, the detection of the target nucleic indicates an ailment, such as a disease, cancer, or genetic disorder, or genetic information, such as for phenotyping, genotyping, or determining ancestry and are compatible with the reagents and support mediums as described herein. Generally, a sample from an individual or an animal or an environmental sample may be obtained to test for presence of a disease, cancer, genetic disorder, or any mutation of interest.

[0387] In some embodiments, a sample comprises a target nucleic acid from 0.05% to 20% of total nucleic acids in the sample. In some embodiments, the target nucleic acid is 0.1% to 10% of the total nucleic acids in the sample. In some embodiments, the target nucleic acid is 0.1% to 5% of the total nucleic acids in the sample. In some embodiments, the target nucleic acid is 0.1% to 1% of the total nucleic acids in the sample. In some embodiments, the target nucleic acid is in any amount less than 100% of the total nucleic acids in the sample. In some embodiments, the target nucleic acid is 100% of the total nucleic acids in the sample. In some embodiments, the sample comprises a portion of the target nucleic acid and at least one nucleic acid comprising less than 100% sequence identity to the portion of the target nucleic acid but no less than 50% sequence identity to the portion of the target nucleic acid. For example, the portion of the target nucleic acid comprises a mutation as compared to at least one nucleic acid comprising less than 100% sequence identity to the portion of the target nucleic acid but no less than 50% sequence identity to the portion of the target nucleic acid. In some embodiments, the portion of the target nucleic acid comprises a single nucleotide mutation as compared to at least one nucleic acid comprising less than 100% sequence identity to the portion of the target nucleic acid but no less than 50% sequence identity to the portion of the target nucleic acid.

[0388] In some embodiments, a sample comprises target nucleic acid populations at different concentrations or amounts. In some embodiments, the sample has at least 2 target nucleic acid populations. In some embodiments, the sample has at least 3, 4, 5, 6, 7, 8, 9, 10, 20, 30, 40, or 50 target nucleic acid populations. In some embodiments, the sample has 3 to 50, 5 to 40, or 10 to 25 target nucleic acid populations.

[0389] In some embodiments, a sample has at least 2 individual target nucleic acids. In some embodiments, the sample has at least 3, 5, 10, 20, 30, 40, 50, 100, 200, 300, 400, 500, 600, 700, 800, 900, 1000, 2000, 3000, 4000, 5000, 6000, 7000, 8000, 9000, or 10000 individual target nucleic acids.

[0390] In some embodiments, the sample comprises 1 to 10,000, 100 to 8000, 400 to 6000, 500 to 5000, 1000 to 4000, or 2000 to 3000 individual target nucleic acids.

[0391] In some embodiments, a sample comprises one copy of target nucleic acid per 10 non-target nucleic acids, 10² non-target nucleic acids, 10³ non-target nucleic acids, 10⁴ non-target nucleic acids, 10⁵ non-target nucleic acids, 10⁶ non-target nucleic acids, 10⁷ non-target nucleic acids, 10⁸ non-target nucleic acids, 10⁹ non-target nucleic acids, or 10¹⁰ non-target nucleic acids.

[0392] In some embodiments, samples comprise a target nucleic acid at a concentration of less than 1 nM, less than 2 nM, less than 3 nM, less than 4 nM, less than 5 nM, less than 6 nM, less than 7 nM, less than 8 nM, less than 9 nM, less than 10 nM, less than 20 nM, less than 30 nM, less than 40 nM, less than 50 nM, less than 60 nM, less than 70 nM, less than 80 nM, less than 90 nM, less than 100 nM, less than 200 nM, less than 300 nM, less than 400 nM, less than 500 nM, less than 600 nM, less than 700 nM, less than 800 nM, less than 900 nM, less than 1 μM, less than 2 μM, less than 3 μM, less than 4 μM, less than 5 μM, less than 6 μM, less than 7 μM, less than 8 μM, less than 9 μM, less than 10 μM, less than 100 μM, or less than 1 mM. In some embodiments, the sample comprises a target nucleic acid at a concentration of 1 nM to 2 nM, 2 nM to 3 nM, 3 nM to 4 nM, 4 nM to 5 nM, 5 nM to 6 nM, 6 nM to 7 nM, 7 nM to 8 nM, 8 nM to 9 nM, 9 nM to 10 nM, 10 nM to 20 nM, 20 nM to 30 nM, 30 nM to 40 nM, 40 nM to 50 nM, 50 nM to 60 nM, 60 nM to 70 nM, 70 nM to 80 nM, 80 nM to 90 nM, 90 nM to 100 nM, 100 nM to 200 nM, 200 nM to 300 nM, 300 nM to 400 nM, 400 nM to 500 nM, 500 nM to 600 nM, 600 nM to 700 nM, 700 nM to 800 nM, 800 nM to 900 nM, 900 nM to 1 μM, 1 μM to 2 μM, 2 μM to 3 μM, 3 μM to 4 μM, 4 μM to 5 μM, 5 μM to 6 μM, 6 μM to 7 μM, 7 μM to 8 μM, 8 μM to 9 μM, 9 μM to 10 μM, 10 UM to 100 μM, 100 μM to 1 mM, 1 nM to 10 nM, 1 nM to 100 nM, 1 nM to 1 μM, 1 nM to 10 μM, 1 nM to 10 μM, 1 nM to 1 mM, 10 nM to 100 nM, 10 nM to 1 μM, 10 nM to 10 μM, 10 nM to 100 μM, 10 nM to 1 mM, 100 nM to 1 μM, 100 nM to 10 UM, 100 nM to 100 μM, 100 nM to 1 mM, 1 μM to 10 μM, 1 μM to 100 μM, 1 μM to 1 mM, 1 μM to 100 μM, 10 μM to 1 mM, or 100 μM to 1 mM. In some embodiments, the sample comprises a target nucleic acid at a concentration of 20 nM to 200 μM, 50 nM to 100 μM, 200 nM to 50 μM, 500 nM to 20 μM, or 2 μM to 10 μM. In some embodiments, the target nucleic acid is not present in the sample.

[0393] In some embodiments, samples comprise fewer than 10 copies, fewer than 100 copies, fewer than 1000 copies, fewer than 10,000 copies, fewer than 100,000 copies, or fewer than 1,000,000 copies of a target nucleic acid. In some embodiments, the sample comprises 10 copies to 100 copies, 100 copies to 1000 copies, 1000 copies to 10,000 copies, 10,000 copies to 100,000 copies, 100,000 copies to 1,000,000 copies, 10 copies to 1000 copies, 10 copies to 10,000 copies, 10 copies to 100,000 copies, 10 copies to 1,000,000 copies, 100 copies to 10,000 copies, 100 copies to 100,000 copies, 100 copies to 1,000,000 copies, 1,000 copies to 100,000 copies, or 1,000 copies to 1,000,000 copies of a target nucleic acid. In some embodiments, the sample comprises 10 copies to 500,000 copies, 200 copies to 200,000 copies, 500 copies to 100,000 copies, 1000 copies to 50,000 copies, 2000 copies to 20,000 copies, 3000 copies to 10,000 copies, or 4000 copies to 8000 copies. In some embodiments, the target nucleic acid is not present in the sample.

[0394] In some embodiments, the sample is a biological sample, an environmental sample, or a combination thereof. Non-limiting examples of biological samples are blood, serum, plasma, saliva, urine, mucosal sample, peritoneal sample, cerebrospinal fluid, gastric secretions, nasal secretions, sputum, pharyngeal exudates, urethral or vaginal secretions, an exudate, an effusion, and a tissue sample (e.g., a biopsy sample). A tissue sample from a subject may be dissociated or liquified prior to application to detection system of the present disclosure. Non-limiting examples of environmental samples are soil, air, or water. In some embodiments, an environmental sample is taken as a swab from a surface of interest or taken directly from the surface of interest.

[0395] In some embodiments, the sample is a raw (unprocessed, unedited, unmodified) sample. Raw samples may be applied to a system for detecting or editing a target nucleic acid, such as those described herein. In some embodiments, the sample is diluted with a buffer or a fluid or concentrated prior to its application to the system or be applied neat to the detection system. Sometimes, the sample contains no more 20 μl of buffer or fluid. The sample, in some embodiments, is contained in no more than 1, 5, 10, 15, 20, 25, 30, 35 40, 45, 50, 55, 60, 65, 70, 75, 80, 90, 100, 200, 300, 400, 500 μl, or any of value 1 μl to 500 μl, preferably 10 μL to 200 μL, or more preferably 50 μL to 100 μL of buffer or fluid. Sometimes, the sample is contained in more than 500 μl.

[0396] In some embodiments, the sample is taken from a single-cell eukaryotic organism; a plant or a plant cell; an algal cell; a fungal cell; an animal cell, tissue, or organ; a cell, tissue, or organ from an invertebrate animal; a cell, tissue, fluid, or organ from a vertebrate animal such as fish, amphibian, reptile, bird, and mammal; a cell, tissue, fluid, or organ from a mammal such as a human, a non-human primate, an ungulate, a feline, a bovine, an ovine, and a caprine. In some embodiments, the sample is taken from nematodes, protozoans, helminths, or malarial parasites. In some embodiments, the sample comprises nucleic acids from a cell lysate from a eukaryotic cell, a mammalian cell, a human cell, a prokaryotic cell, or a plant cell. In some embodiments, the sample comprises nucleic acids expressed from a cell.

[0397] In some embodiments, samples are used for diagnosing a disease. In some embodiments the disease is cancer. The sample used for cancer testing may comprise at least one target nucleic acid that may hybridize to a guide nucleic acid of the reagents described herein. The target nucleic acid, in some embodiments, comprises a portion of a gene comprising a mutation associated with a disease, such as cancer, a gene whose overexpression is associated with cancer, a tumor suppressor gene, an oncogene, a checkpoint inhibitor gene, a gene associated with cellular growth, a gene associated with cellular metabolism, or a gene associated with cell cycle. Sometimes, the target nucleic acid encodes a cancer biomarker. In some embodiments, the assay may be used to detect “hotspots” in target nucleic acids that may be predictive of a cancer. In some embodiments, the target nucleic acid comprises a portion of a nucleic acid that is associated with a cancer. In some embodiments, the target nucleic acid is a portion of a nucleic acid from a genomic locus, any DNA amplicon of, a reverse transcribed mRNA, or a cDNA from a locus of at least one of a gene set forth in TABLE 3. Any region of the aforementioned gene loci may be probed for a mutation or deletion using the compositions and methods disclosed herein. For example, in the EGFR gene locus, the compositions and methods for detection disclosed herein may be used to detect a single nucleotide polymorphism or a deletion.

[0398] In some embodiments, samples are used to diagnose a genetic disorder, also referred to as genetic disorder testing. The sample used for genetic disorder testing may comprise at least one target nucleic acid that may hybridize to a guide nucleic acid of the reagents described herein. The target nucleic acid, in some embodiments, is from a gene with a mutation associated with a genetic disorder, from a gene whose overexpression is associated with a genetic disorder, from a gene associated with abnormal cellular growth resulting in a genetic disorder, or from a gene associated with abnormal cellular metabolism resulting in a genetic disorder. In some embodiments, the target nucleic acid is a nucleic acid from a genomic locus, a transcribed mRNA, or a reverse transcribed mRNA, a DNA amplicon of or a cDNA from a locus of at least one of a gene set forth in TABLE 3.

[0399] A sample used for phenotyping testing may comprise at least one target nucleic acid that may hybridize to a guide nucleic acid of the reagents described herein. The target nucleic acid, in some embodiments, is a nucleic acid encoding a sequence associated with a phenotypic trait. A sample used for genotyping testing may comprise at least one target nucleic acid that may hybridize to a guide nucleic acid of the reagents described herein. A target nucleic acid, in some embodiments, is a nucleic acid encoding a sequence associated with a genotype of interest. A sample used for ancestral testing may comprise at least one target nucleic acid that may hybridize to a guide nucleic acid of the reagents described herein. A target nucleic acid, in some embodiments, is a nucleic acid encoding a sequence associated with a geographic region of origin or ethnic group. A sample may be used for identifying a disease status. For example, a sample is any sample described herein, and is obtained from a subject for use in identifying a disease status of a subject. In some embodiments, the disease is cancer. In some embodiments, the disease is a genetic disorder. In some embodiments, a method comprises obtaining a serum sample from a subject; and identifying a disease status of the subject.

### Certain Target Nucleic Acids

[0400] Disclosed herein are compositions, systems and methods for modifying and detecting target nucleic acids. In some embodiments, the target nucleic acid is a double stranded nucleic acid. In some embodiments, the target nucleic acid is a single stranded nucleic acid. In some embodiments, the target nucleic acid is a double stranded nucleic acid that is prepared into single stranded nucleic acids before or upon contacting a reagent or sample. In some embodiments, the target nucleic acid comprises DNA. In some embodiments, the target nucleic acid comprises RNA. The target nucleic acids include but are not limited to mRNA, rRNA, tRNA, non-coding RNA, long non-coding RNA, and microRNA (miRNA). In some cases, the target nucleic acid is single-stranded RNA (ssRNA) or mRNA.

[0401] In some embodiments, target nucleic acids comprise a mutation. The mutation may be a mutation of 1, 2, 3, 4, 5, 6, 7, 8, 9, 10, 11, 12, 13, 14, 15, 16, 17, 18, 19, 20 or more nucleotides. The mutation may result in the insertion of at least one amino acid in a polypeptide encoded by the target nucleic acid. The mutation may result in the deletion of at least one amino acid in a polypeptide encoded by the target nucleic acid. The mutation may result in the substitution of at least one amino acid in a polypeptide encoded by the target nucleic acid. The mutation may result in misfolding of the polypeptide. The mutation may result in a premature stop codon. The mutation may result in a truncation of the protein.

[0402] In some embodiments, at least a portion of a guide nucleic acid of a composition described herein hybridizes to a region of the target nucleic acid comprising the mutation. In some embodiments, at least a portion of a guide nucleic acid of a composition described herein hybridizes to a region of the target nucleic acid that is within 10 nucleotides, within 50 nucleotides, within 100 nucleotides, or within 200 nucleotides of the mutation. The mutation may be located in a non-coding region or a coding region of a gene.

[0403] In some embodiments, the mutation is an autosomal dominant mutation. In some embodiments, the mutation is a dominant negative mutation. In some embodiments, the mutation is a loss of function mutation. In some embodiments, the mutation is a single nucleotide polymorphism (SNP). In some embodiments, the SNP is associated with a phenotype of the sample or a phenotype of the organism from which the sample was taken. The SNP, in some cases, is associated with altered phenotype from wild type phenotype. The SNP may be a synonymous substitution or a nonsynonymous substitution. The nonsynonymous substitution may be a missense substitution, or a nonsense point mutation. The synonymous substitution may be a silent substitution. The mutation may be a deletion of one or more nucleotides. Often, the single nucleotide mutation, SNP, or deletion is associated with a disease such as cancer or a genetic disorder. The mutation, such as a single nucleotide mutation, a SNP, or a deletion, may be encoded in the sequence of a target nucleic acid from the germline of an organism or may be encoded in a target nucleic acid from a diseased cell, such as a cancer cell.

[0404] In some embodiments, the target nucleic acid comprises a mutation associated with a disease. In some examples, a mutation associated with a disease refers to a mutation which causes the disease, contributes to the development of the disease, or indicates the existence of the disease. In some embodiments, the mutation causes the disease.

[0405] Non-limiting examples of diseases associated with genetic mutations are cystic fibrosis, Duchenne muscular dystrophy, β-thalassemia, hemophilia, sickle cell anemia, amyotrophic lateral sclerosis (ALS), severe combined immunodeficiency, Huntington's disease, Alzheimer's Disease, alpha-1 antitrypsin deficiency, myotonic dystrophy Type 1, and Usher syndrome. The disease may comprise, at least in part, a cancer, an inherited disorder, an ophthalmological disorder, a neurological disorder, a blood disorder, a metabolic disorder, or a combination thereof.

[0406] The target nucleic acid, in some cases, comprises a portion of a gene comprising a mutation associated with cancer, a gene whose overexpression is associated with cancer, a tumor suppressor gene, an oncogene, a checkpoint inhibitor gene, a gene associated with cellular growth, a gene associated with cellular metabolism, or a gene associated with cell cycle. Sometimes, the target nucleic acid encodes a cancer biomarker, such as a prostate cancer biomarker or non-small cell lung cancer. In some cases, the assay may be used to detect “hotspots” in target nucleic acids that may be predictive of lung cancer. In some cases, the target nucleic acid comprises a portion of a nucleic acid that is associated with a blood fever. In some cases, the target nucleic acid is a portion of a nucleic acid from a genomic locus, any DNA amplicon of, a reverse transcribed mRNA, or a cDNA from a locus of at least one of: ALK, APC, ATM, AXIN2, BAP1, BARD1, BLM, BMPR1A, BRCA1, BRCA2, BRIP1, CASR, CDC73, CDH1, CDK4, CDKN1B, CDKN1C, CDKN2A, CEBPA, CHEK2, CTNNA1, DICER1, DIS3L2, EGFR, EPCAM, FH, FLCN, GATA2, GPC3, GREM1, HOXB13, HRAS, MAX, MEN1, MET, MITF, MLH1, MSH2, MSH3, MSH6, MUTYH, NBN, NF1, NF2, NTHL1, PALB2, PDGFRA, PHOX2B, PMS2, POLD1, POLE, POT1, PRKAR1A, PTCH1, PTEN, RAD50, RAD51C, RAD51D, RB1, RECQL4, RET, RUNX1, SDHA, SDHAF2, SDHB, SDHC, SDHD, SMAD4, SMARCA4, SMARCB1, SMARCE1, STK11, SUFU, TERC, TERT, TMEM127, TP53, TSC1, TSC2, VHL, WRN, and WT1. In some cases, the target nucleic acid comprises a portion of a nucleic acid from a genomic locus, any DNA amplicon of, a reverse transcribed mRNA, or a cDNA from a locus of at least one of: TRAC, B2M, PD1, PCSK9, DNMT1, HPRT1, RPL32P3, CCR5, FANCF, GRIN2B, EMX1, AAVS1, ALKBH5, CLTA, CDK11, CTNNB1, AXIN1, LRP6, TBK1, BAP1, TLE3, PPM1A, BCL2L2, SUFU, RICTOR, VPS35, TOP1, SIRT1, PTEN, MMD, PAQR8, H2AX, POU5F1, OCT4, SYS1, ARFRP1, TSPAN14, EMC2, EMC3, SEL1L, DERL2, UBE2G2, UBE2J1, and HRD1.

[0407] In some cases, the target nucleic acid is a portion of a nucleic acid from a genomic locus, any DNA amplicon of, a reverse transcribed mRNA, or a cDNA from a locus of at least one of: CFTR, FMR1, SMN1, ABCB11, ABCC8, ABCD1, ACAD9, ACADM, ACADVL, ACAT1, ACOX1, ACSF3, ADA, ADAMTS2, ADGRG1, AGA, AGL, AGPS, AGXT, AIRE, ALDH3A2, ALDOB, ALG6, ALMS1, ALPL, AMT, AQP2, ARG1, ARSA, ARSB, ASL, ASNS, ASPA, ASS1, ATM, ATP6V1B1, ATP7A, ATP7B, ATRX, BBS1, BBS10, BBS12, BBS2, BCKDHA, BCKDHB, BCS1L, BLM, BSND, CAPN3, CBS, CDH23, CEP290, CERKL, CHM, CHRNE, CIITA, CLN3, CLN5, CLN6, CLN8, CLRN1, CNGB3, COL27A1, COL4A3, COL4A4, COL4A5, COL7A1, CPS1, CPT1A, CPT2, CRB1, CTNS, CTSK, CYBA, CYBB, CYP11B1, CYP11B2, CYP17A1, CYP19A1, CYP27A1, DBT, DCLRE1C, DHCR7, DHDDS, DLD, DMD, DNAH5, DNAI1, DNAI2, DYSF, EDA, EIF2B5, EMD, ERCC6, ERCC8, ESCO2, ETFA, ETFDH, ETHE1, EVC, EVC2, EYS, F9, FAH, FAM161A, FANCA, FANCC, FANCG, FH, FKRP, FKTN, G6PC, GAA, GALC, GALK1, GALT, GAMT, GBA, GBE1, GCDH, GFM1, GJB1, GJB2, GLA, GLB1, GLDC, GLE1, GNE, GNPTAB, GNPTG, GNS, GRHPR, HADHA, HAX1, HBA1, HBA2, HBB, HEXA, HEXB, HGSNAT, HLCS, HMGCL, HOGA1, HPS1, HPS3, HSD17B4, HSD3B2, HYAL1, HYLS1, IDS, IDUA, IKBKAP, IL2RG, IVD, KCNJ11, LAMA2, LAMA3, LAMB3, LAMC2, LCA5, LDLR, LDLRAP1, LHX3, LIFR, LIPA, LOXHD1, LPL, LRPPRC, MAN2B1, MCOLN1, MED17, MESP2, MFSD8, MKS1, MLC1, MMAA, MMAB, MMACHC, MMADHC, MPI, MPL, MPV17, MTHFR, MTM1, MTRR, MTTP, MUT, MYO7A, NAGLU, NAGS, NBN, NDRG1, NDUFAF5, NDUFS6, NEB, NPC1, NPC2, NPHS1, NPHS2, NR2E3, NTRK1, OAT, OPA3, OTC, PAH, PC, PCCA, PCCB, PCDH15, PDHA1, PDHB, PEX1, PEX10, PEX12, PEX2, PEX6, PEX7, PFKM, PHGDH, PKHD1, PMM2, POMGNT1, PPT1, PROP1, PRPS1, PSAP, PTS, PUS1, PYGM, RAB23, RAG2, RAPSN, RARS2, RDH12, RMRP, RPE65, RPGRIP1L, RS1, RTEL1, SACS, SAMHD1, SEPSECS, SGCA, SGCB, SGCG, SGSH, SLC12A3, SLC12A6, SLC17A5, SLC22A5, SLC25A13, SLC25A15, SLC26A2, SLC26A4, SLC35A3, SLC37A4, SLC39A4, SLC4A11, SLC6A8, SLC7A7, SMARCAL1, SMPD1, STAR, SUMF1, TAT, TCIRG1, TECPR2, TFR2, TGM1, TH, TMEM216, TPP1, TRMU, TSFM, TTPA, TYMP, USHIC, USH2A, VPS13A, VPS13B, VPS45, VRK1, VSX2, WNT10A, XPA, XPC, and ZFYVE26.

[0408] The target nucleic acid may be from any organism, including, but not limited to, a bacterium, a virus, a parasite, a protozoon, a fungus, a mammal, a plant, and an insect. As another non-limiting example, the target nucleic acid may be responsible for a disease, contain a mutation (e.g., single strand polymorphism, point mutation, insertion, or deletion), be contained in an amplicon, or be uniquely identifiable from the surrounding nucleic acids (e.g., contain a unique sequence of nucleotides).

[0409] In some embodiments, the target nucleic acid is selected from those listed in TABLE 3.

TABLE 3
EXEMPLARY TARGETS
Exemplary targets

AAVS1, ABCA4, ABCB11, ABCC8, ABCD1, ABCG5, ABCG8, ACAD9, ACADM, ACADVL, ACAT1,
ACOX1, ACSF3, ACTA1, ADA, ADAMTS2, ADGRG1, AGA, AGL, AGPS, AGXT, AHI1, AIRE,
ALDH3A2, ALDOB, ALG6, ALK, ALKBH5, ALMS1, ALPL, AMRC9, AMT, ANAPC10, ANAPC11,
ANGPTL3, ANGPTLA, APC, Apo(a), APOCIII, APOEε4, APOL1, APP, AQP2, AR, ARFRP1, ARG1,
ARH, ARL13B, ARL6, ARSA, ARSB, ASL, ASNS, ASPA, ASS1, ATM, ATP6V1B1, ATP7A, ATP7B, ATRX,
ATXN1, ATXN10, ATXN2, ATXN3, ATXN7, ATXN8OS, AXIN1, AXIN2, B2M, BACE-1, BAK1, BAP1,
BARD1, BAX2, BBS1, BBS10, BBS12, BBS2, BCKDHA, BCKDHB, BCL2L2, BCS1L, BEST1, Betaglobin
gene, BLM, BMPR1A, BRAF, BRAFV600E, BRCA1, BRCA2, BRIP1, BSND, C9orf72, CA4, CACNA1A,
CAH1, CAPN3, CASR, CBS, CCNB1 CC2D2A, CCR5, CD1, CD2, CD3, CD3D, CD3Z, CD4, CD5,
CD6, CD7, CD8A, CD8B, CD9, CD14, CD18, CD19, CD21, CD22, CD23, CD27, CD28, CD30, CD33,
CD34, CD36, CD38, CD40, CD40L, CD44, CD46, CD47, CD48, CD52, CD55, CD57, CD58, CD59,
CD68, CD69, CD72, CD73, CD74, CD79A, CD80, CD81, CD83, CD84, CD86, CD90, CD93, CD96,
CD99, CD100, CD123, CD160, CD163, CD164, CD164L2, CD166, CD200, CD204, CD207, CD209,
CD226, CD244, CD247, CD274, CD276, CD300, CD320, CDC73, CDH1, CDH23, CDK11, CDK4,
CDKN1A, CDKN1B, CDKN1C, CDKN2A, CDKN2B, CEBPA, CELA3B, CEP290, CERKL, CFB, CFTR,
CHCHD10, CHEK2, CHM, CHRNE, CIDEB, CIITA, CLN3, CLN5, CLN6, CLN8, CLRN1, CLTA,
CMT1A, CNBP, CNGB1, CNGB3, COL1A1, COL1A2, COL27A1, COL4A3, COL4A4, COL4A5,
COL6A1, COL6A2, COL6A3, COL7A1, CPSI, CPTIA, CPT2, CRB1, CREBBP, CRX, CRYAA, CTNNA1,
CTNNB1, CTNND2, CTNS, CTSK, CXCL12, CYBA, CYBB, CYP11B1, CYP11B2, CYP17A1, CYP19A1,
CYP21A2, CYP27A1, DBT, DCC, DCLRE1C, DERL2, DFNA36, DFNB31, DGAT2, DHCR7, DHDDS,
DICER1, DIS3L2, DLD, DMD, DMPK, DNAH5, DNAI1, DNAI2, DNM2, DNMT1, DPC4, DYSF, EDA,
EDN3, EDNRB, EGFR, EIF2B5, EMC2, EMC3, EMD, EMX1, EN1, EPCAM, ERCC6, ERCC8, ESCO2,
ETFA, ETFDH, ETHE1, EVC, EVC2, EYS, F5, F9, FXI, FAH, FAM161A, FANCA, FANCB, FANCC,
FANCD1, FANCD2, FANCE, FANCF, FANCG, FANCI, FANCJ, FANCL, FANCM, FANCN, FANCP,
FANCS, FBN1, FGF14, FGFR2, FGFR3, FGA, FGB, FGG, FH, FHL1, FIX, FKRP, FKTN, FLCN,
FMR1, FOXP3, FSCN2, FSHD1, FUS, FUT8, FVIII, FXII, FXN, G6PC, GAA, GALC, GALK1, GALT,
GAMT, GATA2, GATA-4, GBA, GBEI, GCDH, GCGR, GDNF, GFAP, GFMI, GHR, GJB1, GJB2, GLA,
GLB1, GLDC, GLE1, GNE, GNPTAB, GNPTG, GNS, GPAM, GPC3, GPR98, GREM1, GRHPR,
GRIN2B, H2AFX, H2AX, HADHA, HAX1, HBA1, HBA2, HBB, HBV cccDNA, HER2, HEXA, HEXB,
HFE, HGSNAT, HLCS, HMGCL, HAO1, HOGA1, HOXB13, HPRPF3, HPRT1, HPS1, HPS3, HRAS,
HRD1, HSD3B2, HSD17B4, HSD17B13, HTT, HUSI, HYALI, HYLSI, IDS, IDUA, IFITM5, IKBKAP,
IL2RG, IL7R, IMPDH1, INPP5E, IRF4, ITGB2, ITPRI, IVD, JAGI, JAKI, JAK3, KCNC3, KCND3,
KCNJ11, KLKB1, KLHL7, KRAS, LAMA1, LAMA2, LAMA3, LAMB3, LAMC2, LCA5, LDHA, LDLR,
LDLRAP1, LHX3, LIFR, LIPA, LMNA, LMOD3, LOR, LOXHD1, LPA, LPL, LRAT, LRP6, LRPPRC,
LRRK2, MADR2, MAN2B1, MAPT, MARCI, MAX, MCM6, MCOLNI, MECP2, MED17, MEFV, MENI,
MERTK, MESP2, MET, METex14, MFN2, MFSD8, MIA3, MITF, MKL2, MKS1, MLC1, MLH1, MLH3,
MMAA, MMAB, MMACHC, MMADHC, MMD, MPI, MPL, MPV17, MSH2, MSH3, MSH6, MTHFD1L,
MTHFR, MTM1, MTRR, MTTP, MUT, MUTYH, MYC, MYH7, MYO7A, NAGLU, NAGS, NBN, NDRG1,
NDUFAF5, NDUFS6, NEB, NF1, NF2, NKX2-5, NOG, NOTCH1, NOTCH2, NPC1, NPC2, NPHP1,
NPHS1, NPHS2, NRAS, NR2E3, NTHL1, NTRK, NTRK1, OAT, OCT4, OFD1, OPA3, OTC, PAH,
PALB2, PAQR8, PAX3, PC, PCCA, PCCB, PCDH15, PCSK9, PD1, PDCD1, PDE6B, PDGFRA,
PDHA1, PDHB, PEX1, PEX10, PEX12, PEX13, PEX14, PEX16, PEX19, PEX2, PEX26, PEX3, PEX5,
PEX6, PEX7, PFKM, PHGDH, PHOX2B, PKD1, PKD2, PKHDI, PKK, PLEKHG4, PMM2, PMP22,
PMS1, PMS2, PNPLA3, POLD1, POLE, POMGNT1, POT1, POU5F1, PPM1A, PPP2R2B, PPT1,
PRCD, PRKAG2, PRKAR1A, PRKCG, PRNP, PROM1, PROP1, PRPF31, PRPF8, PRPH2, PRPS1,
PSAP, PSD3, PSD95, PSEN1, PSEN2, PSRC1, PTCH1, PTEN, PTS, PUS1, PYGM, RAB23, RAD50,
RAD51C, RAD51D, RAG1, RAG2, RAPSN, RARS2, RB1, RDH12, RECQL4, RET, RHO, RICTOR,
RMRP, ROS1, RP1, RP2, RPE65, RPGR, RPGRIP1L, RPL32P3, RS1, RTCA, RTEL1, RUNX1, SACS,
SAMHD1, SCN1A, SCN2A, SDHA, SDHAF2, SDHB, SDHC, SDHD, SEL1L, SEPSEC5, SERPINA1,
SERPINC1, SERPING1, SGCA, SGCB, SGCG, SGSH, SIRT1, SLC12A3, SLC12A6, SLC17A5, SLC22A5,
SLC25A13, SLC25A15, SLC26A2, SLC26A4, SLC35A3, SLC35B4, SLC37A4, SLC39A4, SLC4A11,
SLC6A8, SLC7A7, SMAD3, SMAD4, SMARCA4, SMARCAL1, SMARCB1, SMARCE1, SMN1, SMPD1,
SNAI2, SNCA, SNRNP200, SOD1, SOX10, SPARA7, SPTBN2, STAR, STAT3, STK11, SUFU, SUMF1,
SYNE1, SYNE2, SYS1, TARDBP, TAT, TBK1, TBP, TCIRG1, TCTN3, TECPR2, TERC, TERT, TFR2,
TGFBR2, TGM1, TH, TLE3, TMEM127, TMEM138, TMEM216, TMEM43, TMEM67, TMPRSS6, TOP1,
TOPORS, TP53, TPM2, TNNT1, TNN3, TNNI2, TPP1, TRAC, TRMU, TSC1, TSC2, TSFM, TSPAN14,
TTBK2, TTC8, TTPA, TTR, TULP1, TYMP, UBE2G2, UBE2J1, UBE3A, USH1C, USH1G, USH2A,
VEGF, VHL, VPS13A, VPS13B, VPS35, VPS45, VRK1, VSX2, VWF, WAS, WDR19, WDR48, WNT10A,
WRN, WS2B, WS2C, WT1, XPA, XPC, XPF, XRCC3, YAP1, ZAC1, ZEB1, ZFYVE26, and ZNF423

### IX. Compositions

[0410] Disclosed herein are compositions comprising one or more effector proteins described herein or nucleic acids encoding the one or more effector proteins, one or more guide nucleic acids described herein or nucleic acids encoding the one or more guide nucleic acids described herein, or combinations thereof. In some embodiments, a repeat sequence of the one or more guide nucleic acids are capable of interacting with the one or more of the effector proteins. In some embodiments, spacer sequences of the one or more guide nucleic acids hybridizes with a target sequence of a target nucleic acid. In some embodiments, the compositions comprise one or more donor nucleic acids described herein. In some embodiments, the compositions are capable of editing a target nucleic acid in a cell or a subject. In some embodiments, the compositions are capable of editing a target nucleic acid or the expression thereof in a cell, in a tissue, in an organ, in vitro, in vivo, or ex vivo. In some embodiments, the compositions are capable of editing a target nucleic acid in a sample comprising the target nucleic.

[0411] In some embodiments, compositions described herein comprise plasmids described herein, viral vectors described herein, non-viral vectors described herein, or combinations thereof. In some embodiments, compositions described herein comprise the viral vectors. In some embodiments, compositions described herein comprise an AAV. In some embodiments, compositions described herein comprise liposomes (e.g., cationic lipids or neutral lipids), dendrimers, lipid nanoparticle (LNP), or cell-penetrating peptides. In some embodiments, compositions described herein comprise an LNP.

### Pharmaceutical Compositions

[0412] In some embodiments, compositions described herein are pharmaceutical compositions. In some embodiments, the pharmaceutical compositions comprise compositions described herein and a pharmaceutically acceptable carrier or diluent. “Pharmaceutically acceptable excipient, carrier or diluent” refers to any substance formulated alongside the active ingredient of a pharmaceutical composition that allows the active ingredient to retain biological activity and is non-reactive with the subject's immune system. Such a substance can be included for the purpose of long-term stabilization, bulking up solid formulations that contain potent active ingredients in small amounts, or to confer a therapeutic enhancement on the active ingredient in the final dosage form, such as facilitating absorption, reducing viscosity, or enhancing solubility. The selection of appropriate substance can depend upon the route of administration and the dosage form, as well as the active ingredient and other factors. Compositions having such substances can be formulated by suitable methods (see, e.g., Remington's Pharmaceutical Sciences, 18th edition, A. Gennaro, ed., Mack Publishing Co., Easton, Pa., 1990; and Remington, The Science and Practice of Pharmacy 21st Ed. Mack Publishing, 2005).

[0413] Non-limiting examples of pharmaceutically acceptable carriers and diluents suitable for the pharmaceutical compositions disclosed herein include buffers (e.g., neutral buffered saline, phosphate buffered saline); carbohydrates (e.g., glucose, mannose, sucrose, dextran, mannitol); polypeptides or amino acids (e.g., glycine); antioxidants; chelating agents (e.g., EDTA, glutathione); adjuvants (e.g., aluminum hydroxide); surfactants (Polysorbate 80, Polysorbate 20, or Pluronic F68); glycerol; sorbitol; mannitol; polyethyleneglycol; and preservatives. In some embodiments, the vector is formulated for delivery through injection by a needle carrying syringe. In some embodiments, the composition is formulated for delivery by electroporation. In some embodiments, the composition is formulated for delivery by chemical method. In some embodiments, the pharmaceutical compositions comprise a virus vector or a non-viral vector.

[0414] Pharmaceutical compositions described herein comprise a salt. In some embodiments, the salt is a sodium salt. In some embodiments, the salt is a potassium salt. In some embodiments, the salt is a magnesium salt. In some embodiments, the salt is NaCl. In some embodiments, the salt is KNO₃. In some embodiments, the salt is Mg²⁺SO₄²⁻.

[0415] Pharmaceutical compositions described herein are in the form of a solution (e.g., a liquid). In some embodiments, the solution is formulated for injection, e.g., intravenous or subcutaneous injection. In some embodiments, the pH of the solution is about 7, about 7.1, about 7.2, about 7.3, about 7.4, about 7.5, about 7.6, about 7.7, about 7.8, about 7.9, about 8, about 8.1, about 8.2, about 8.3, about 8.4, about 8.5, about 8.6, about 8.7, about 8.8, about 8.9, or about 9. In some embodiments, the pH is 7 to 7.5, 7.5 to 8, 8 to 8.5, 8.5 to 9, or 7 to 8.5. In some cases, the pH of the solution is less than 7. In some cases, the pH is greater than 7.

### X. Systems

[0416] Disclosed herein, in some aspects, are systems for detecting a target nucleic acid, comprising any one of the effector proteins described herein. In some embodiments, systems comprise a guide nucleic acid. Systems may be used to detect a target nucleic acid. In some embodiments, systems comprise an effector protein described herein, a reagent, support medium, or a combination thereof. In some embodiments, systems comprise a fusion protein described herein. In some embodiments, effector proteins comprise an amino acid sequence that is at least 70%, at least 75%, at least 80%, at least 85%, at least 90%, at least 95%, or 100% identical to any one of the amino acid sequences selected from SEQ ID NOS: 1-10,484 or 15,022-24,165. In some embodiments, the amino acid sequence of the effector protein is at least 70%, at least 75%, at least 80%, at least 85%, at least 90%, at least 95%, or 100% identical to any one of the amino acid sequences selected from SEQ ID NOS: 1-10,484 or 15,022-24,165. In some embodiments, systems comprise an effector protein that is at least 90% identical to an effector protein sequence provide in TABLE 1, and a guide nucleic acid that is at least 90% identical to a corresponding guide nucleic from TABLE 1, wherein corresponding means the effector protein sequence and guide nucleic acid sequence are selected from the same column number (e.g., A1 and B1) and same row.

[0417] Systems may be used for detecting the presence of a target nucleic acid associated with or causative of a disease, such as cancer, a genetic disorder, or an infection. In some embodiments, systems are useful for phenotyping, genotyping, or determining ancestry. Unless specified otherwise, systems include kits and may be referred to as kits. Unless specified otherwise, systems include devices and may also be referred to as devices. Systems described herein may be provided in the form of a companion diagnostic assay or device, a point-of-care assay or device, or an over-the-counter diagnostic assay/device.

[0418] Reagents and effector proteins of various systems may be provided in a reagent chamber or on a support medium. Alternatively, the reagent and/or effector protein may be contacted with the reagent chamber or the support medium by the individual using the system. An exemplary reagent chamber is a test well or container. The opening of the reagent chamber may be large enough to accommodate the support medium. Optionally, the system comprises a buffer and a dropper. The buffer may be provided in a dropper bottle for ease of dispensing. The dropper may be disposable and transfer a fixed volume. The dropper may be used to place a sample into the reagent chamber or on the support medium.

[0419] Disclosed herein are systems for detecting and/or editing target nucleic acid. In some embodiments, systems comprise components comprising one or more of: compositions described herein; a solution or buffer; a reagent; a support medium; other components or appurtenances as described herein; or combinations thereof.

### System Solutions

[0420] In general, system components comprise a solution in which the activity of an effector protein occurs. Often, the solution comprises or consists essentially of a buffer. The solution or buffer may comprise a buffering agent, a salt, a crowding agent, a detergent, a reducing agent, a competitor, or a combination thereof. Often the buffer is the primary component or the basis for the solution in which the activity occurs. Thus, concentrations for components of buffers described herein (e.g., buffering agents, salts, crowding agents, detergents, reducing agents, and competitors) are the same or essentially the same as the concentration of these components in the solution in which the activity occurs. In some embodiments, a buffer is required for cell lysis activity or viral lysis activity.

[0421] In some embodiments, systems comprise a buffer, wherein the buffer comprise at least one buffering agent. Exemplary buffering agents include HEPES, TRIS, MES, ADA, PIPES, ACES, MOPSO, BIS-TRIS propane, BES, MOPS, TES, DISO, Trizma, TRICINE, GLY-GLY, HEPPS, BICINE, TAPS, A MPD, A MPSO, CHES, CAPSO, AMP, CAPS, phosphate, citrate, acetate, imidazole, or any combination thereof. In some embodiments, the concentration of the buffering agent in the buffer is 1 mM to 200 mM. A buffer compatible with an effector protein may comprise a buffering agent at a concentration of 10 mM to 30 mM. A buffer compatible with an effector protein may comprise a buffering agent at a concentration of about 20 mM. A buffering agent may provide a pH for the buffer or the solution in which the activity of the effector protein occurs. The pH may be 3 to 4, 3.5 to 4.5, 4 to 5, 4.5 to 5.5, 5 to 6, 5.5 to 6.5, 6 to 7, 6.5 to 7.5, 7 to 8, 7.5 to 8.5, 8 to 9, 8.5 to 9.5, 9 to 10, or 9.5 to 10.5.

[0422] In some embodiments, systems comprise a solution, wherein the solution comprises at least one salt. In some embodiments, the at least one salt is selected from potassium acetate, magnesium acetate, sodium chloride, potassium chloride, magnesium chloride, calcium chloride, and any combination thereof. In some embodiments, the concentration of the at least one salt in the solution is 5 mM to 100 mM, 5 mM to 10 mM, 1 mM to 60 mM, or 1 mM to 10 mM. In some embodiments, the concentration of the at least one salt is about 105 mM. In some embodiments, the concentration of the at least one salt is about 55 mM. In some embodiments, the concentration of the at least one salt is about 7 mM. In some embodiments, the solution comprises potassium acetate and magnesium acetate. In some embodiments, the solution comprises sodium chloride and magnesium chloride. In some embodiments, the solution comprises potassium chloride and magnesium chloride. In some embodiments, the salt is a magnesium salt and the concentration of magnesium in the solution is at least 5 mM, 7 mM, at least 9 mM, at least 11 mM, at least 13 mM, or at least 15 mM. In some embodiments, the concentration of magnesium is less than 20 mM, less than 18 mM, or less than 16 mM.

[0423] In some embodiments, systems comprise a solution, wherein the solution comprises at least one crowding agent. A crowding agent may reduce the volume of solvent available for other molecules in the solution, thereby increasing the effective concentrations of said molecules. Exemplary crowding agents include glycerol and bovine serum albumin. In some embodiments, the crowding agent is glycerol. In some embodiments, the concentration of the crowding agent in the solution is 0.01% (v/v) to 10% (v/v). In some embodiments, the concentration of the crowding agent in the solution is 0.5% (v/v) to 10% (v/v).

[0424] In some embodiments, systems comprise a solution, wherein the solution comprises at least one detergent. Exemplary detergents include Tween, Triton-X, and IGEPAL. A solution may comprise Tween, Triton-X, or any combination thereof. A solution may comprise Triton-X. A solution may comprise IGEPAL CA-630. In some embodiments, the concentration of the detergent in the solution is 2% (v/v) or less. In some embodiments, the concentration of the detergent in the solution is 1% (v/v) or less. In some embodiments, the concentration of the detergent in the solution is 0.00001% (v/v) to 0.01% (v/v). In some embodiments, the concentration of the detergent in the solution is about 0.01% (v/v).

[0425] In some embodiments, systems comprise a solution, wherein the solution comprises at least one reducing agent. Exemplary reducing agents comprise dithiothreitol (DTT), B-mercaptoethanol (BME), or tris(2-carboxyethyl) phosphine (TCEP). In some embodiments, the reducing agent is DTT. In some embodiments, the concentration of the reducing agent in the solution is 0.01 mM to 100 mM. In some embodiments, the concentration of the reducing agent in the solution is 0.1 mM to 10 mM. In some embodiments, the concentration of the reducing agent in the solution is 0.5 mM to 2 mM. In some embodiments, the concentration of the reducing agent in the solution is 0.01 mM to 100 mM. In some embodiments, the concentration of the reducing agent in the solution is 0.1 mM to 10 mM. In some embodiments, the concentration of the reducing agent in the solution is about 1 mM.

[0426] In some embodiments, systems comprise a solution, wherein the solution comprises a competitor. In general, competitors compete with the target nucleic acid or the reporter nucleic acid for cleavage by the effector protein or a dimer thereof. Exemplary competitors include heparin, and imidazole, and salmon sperm DNA. In some embodiments, the concentration of the competitor in the solution is 1 μg/mL to 100 μg/mL. In some embodiments, the concentration of the competitor in the solution is 40 μg/mL to 60 μg/mL.

[0427] In some embodiments, systems comprise a solution, wherein the solution comprises a co-factor. In some embodiments, the co-factor allows an effector protein or a multimeric complex thereof to perform a function, including pre-crRNA processing and/or target nucleic acid cleavage. The suitability of a cofactor for an effector protein or a multimeric complex thereof may be assessed, such as by methods based on those described by Sundaresan et al. (Cell Rep. 2017 Dec. 26; 21(13): 3728-3739). In some embodiments, an effector or a multimeric complex thereof forms a complex with a co-factor. In some embodiments, the co-factor is a divalent metal ion. In some embodiments, the divalent metal ion is selected from Mg²⁺, Mn²⁺, Zn²⁺, Ca²⁺, Cu²⁺. In some embodiments, the divalent metal ion is Mg²⁺. In some embodiments, the co-factor is Mg²⁺.

### Reporters

[0428] In some embodiments, systems disclosed herein comprise a reporter. By way of non-limiting and illustrative example, a reporter may comprise a single stranded nucleic acid and a detection moiety (e.g., a labeled single stranded RNA reporter), wherein the nucleic acid is capable of being cleaved by an effector protein (e.g., a CRISPR/Cas protein as disclosed herein) or a multimeric complex thereof, releasing the detection moiety, and generating a detectable signal. As used herein, “reporter” is used interchangeably with “reporter nucleic acid” or “reporter molecule”. The effector proteins disclosed herein, activated upon hybridization of a guide nucleic acid to a target nucleic acid, may cleave the reporter. Cleaving the “reporter” may be referred to herein as cleaving the “reporter nucleic acid,” the “reporter molecule,” or the “nucleic acid of the reporter.” Reporters may comprise RNA. Reporters may comprise DNA. Reporters may be double-stranded. Reporters may be single-stranded.

[0429] In some embodiments, reporters comprise a protein capable of generating a signal. A signal may be a calorimetric, potentiometric, amperometric, optical (e.g., fluorescent, colorimetric, etc.), or piezo-electric signal. In some embodiments, the reporter comprises a detection moiety. Suitable detectable labels and/or moieties that may provide a signal include, but are not limited to, an enzyme, a radioisotope, a member of a specific binding pair; a fluorophore; a fluorescent protein; a quantum dot; and the like.

[0430] In some embodiments, the reporter comprises a detection moiety and a quenching moiety. In some embodiments, the reporter comprises a cleavage site, wherein the detection moiety is located at a first site on the reporter and the quenching moiety is located at a second site on the reporter, wherein the first site and the second site are separated by the cleavage site. Sometimes the quenching moiety is a fluorescence quenching moiety. In some embodiments, the quenching moiety is 5′ to the cleavage site and the detection moiety is 3′ to the cleavage site. In some embodiments, the detection moiety is 5′ to the cleavage site and the quenching moiety is 3′ to the cleavage site. Sometimes the quenching moiety is at the 5′ terminus of the nucleic acid of a reporter. Sometimes the detection moiety is at the 3′ terminus of the nucleic acid of a reporter. In some embodiments, the detection moiety is at the 5′ terminus of the nucleic acid of a reporter. In some embodiments, the quenching moiety is at the 3′ terminus of the nucleic acid of a reporter.

[0431] Suitable fluorescent proteins include, but are not limited to, green fluorescent protein (GFP) or variants thereof, blue fluorescent variant of GFP (BFP), cyan fluorescent variant of GFP (CFP), yellow fluorescent variant of GFP (YFP), enhanced GFP (EGFP), enhanced CFP (ECFP), enhanced YFP (EYFP), GFPS65T, Emerald, Topaz (TYFP), Venus, Citrine, mCitrine, GFPuv, destabilised EGFP (dEGFP), destabilised ECFP (dECFP), destabilised EYFP (dEYFP), mCFPm, Cerulean, T-Sapphire, CyPet, YPet, mKO, HcRed, t-HcRed, DsRed, DsRed2, DsRed-monomer, J-Red, dimer2, t-dimer2(12), mRFP1, pocilloporin, Renilla GFP, Monster GFP, paGFP, Kaede protein and kindling protein, Phycobiliproteins and Phycobiliprotein conjugates including B-Phycoerythrin, R-Phycoerythrin and Allophycocyanin. Suitable enzymes include, but are not limited to, horseradish peroxidase (HRP), alkaline phosphatase (AP), beta-galactosidase (GAL), glucose-6-phosphate dehydrogenase, beta-N-acetylglucosaminidase, β-glucuronidase, invertase, Xanthine Oxidase, firefly luciferase, and glucose oxidase (GO).

[0432] In some embodiments, the detection moiety comprises an invertase. The substrate of the invertase may be sucrose. A DNS reagent may be included in the system to produce a colorimetric change when the invertase converts sucrose to glucose. In some embodiments, the reporter nucleic acid and invertase are conjugated using a heterobifunctional linker by sulfo-SMCC chemistry.

[0433] Suitable fluorophores may provide a detectable fluorescence signal in the same range as 6-Fluorescein (Integrated DNA Technologies), IRDye 700 (Integrated DNA Technologies), TYE 665 (Integrated DNA Technologies), Alex Fluor 594 (Integrated DNA Technologies), or ATTO TM 633 (NHS Ester) (Integrated DNA Technologies). Non-limiting examples of fluorophores are fluorescein amidite, 6-Fluorescein, IRDye 700, TYE 665, Alex Fluor 594, or ATTO TM 633 (NHS Ester). The fluorophore may be an infrared fluorophore. The fluorophore may emit fluorescence in the range of 500 nm and 720 nm. In some embodiments, the fluorophore emits fluorescence at a wavelength of 700 nm or higher. In other embodiments, the fluorophore emits fluorescence at about 665 nm. In some embodiments, the fluorophore emits fluorescence in the range of 500 nm to 520 nm, 500 nm to 540 nm, 500 nm to 590 nm, 590 nm to 600 nm, 600 nm to 610 nm, 610 nm to 620 nm, 620 nm to 630 nm, 630 nm to 640 nm, 640 nm to 650 nm, 650 nm to 660 nm, 660 nm to 670 nm, 670 nm to 680 nm, 690 nm to 690 nm, 690 nm to 700 nm, 700 nm to 710 nm, 710 nm to 720 nm, or 720 nm to 730 nm. In some embodiments, the fluorophore emits fluorescence in the range 450 nm to 750 nm, 500 nm to 650 nm, or 550 to 650 nm.

[0434] Systems may comprise a quenching moiety. A quenching moiety may be chosen based on its ability to quench the detection moiety. A quenching moiety may be a non-fluorescent fluorescence quencher. A quenching moiety may quench a detection moiety that emits fluorescence in the range of 500 nm and 720 nm. A quenching moiety may quench a detection moiety that emits fluorescence in the range of 500 nm and 720 nm. In some embodiments, the quenching moiety quenches a detection moiety that emits fluorescence at a wavelength of 700 nm or higher. In other embodiments, the quenching moiety quenches a detection moiety that emits fluorescence at about 660 nm or about 670 nm. In some embodiments, the quenching moiety quenches a detection moiety that emits fluorescence in the range of 500 to 520, 500 to 540, 500 to 590, 590 to 600, 600 to 610, 610 to 620, 620 to 630, 630 to 640, 640 to 650, 650 to 660, 660 to 670, 670 to 680, 690 to 690, 690 to 700, 700 to 710, 710 to 720, or 720 to 730 nm. In some embodiments, the quenching moiety quenches a detection moiety that emits fluorescence in the range 450 nm to 750 nm, 500 nm to 650 nm, or 550 to 650 nm. A quenching moiety may quench fluorescein amidite, 6-Fluorescein, IRDye 700, TYE 665, Alex Fluor 594, or ATTO TM 633 (NHS Ester). A quenching moiety may be Iowa Black RQ, Iowa Black FQ or IRDye QC-1 Quencher. A quenching moiety may quench fluorescein amidite, 6-Fluorescein (Integrated DNA Technologies), IRDye 700 (Integrated DNA Technologies), TYE 665 (Integrated DNA Technologies), Alex Fluor 594 (Integrated DNA Technologies), or ATTO TM 633 (NHS Ester) (Integrated DNA Technologies). A quenching moiety may be Iowa Black RQ (Integrated DNA Technologies), Iowa Black FQ (Integrated DNA Technologies) or IRDye QC-1 Quencher (LiCor). Any of the quenching moieties described herein may be from any commercially available source, may be an alternative with a similar function, a generic, or a non-tradename of the quenching moieties listed.

[0435] The generation of the detectable signal from the release of the detection moiety may indicate that cleavage by the effector protein has occurred and that the sample contains the target nucleic acid. In some embodiments, the detection moiety comprises a fluorescent dye. Sometimes the detection moiety comprises a fluorescence resonance energy transfer (FRET) pair. In some embodiments, the detection moiety comprises an infrared (IR) dye. In some embodiments, the detection moiety comprises an ultraviolet (UV) dye. Alternatively, or in combination, the detection moiety comprises a protein. Sometimes the detection moiety comprises a biotin. Sometimes the detection moiety comprises at least one of avidin or streptavidin. In some embodiments, the detection moiety comprises a polysaccharide, a polymer, or a nanoparticle. In some embodiments, the detection moiety comprises a gold nanoparticle or a latex nanoparticle.

[0436] A detection moiety may be any moiety capable of generating a calorimetric, potentiometric, amperometric, optical (e.g., fluorescent, colorimetric, etc.), or piezo-electric signal. A nucleic acid of a reporter, sometimes, is protein-nucleic acid that is capable of generating a calorimetric, potentiometric, amperometric, optical (e.g., fluorescent, colorimetric, etc.), or piezo-electric signal upon cleavage of the nucleic acid. Often a calorimetric signal is heat produced after cleavage of the nucleic acids of a reporter. Sometimes, a calorimetric signal is heat absorbed after cleavage of the nucleic acids of a reporter. A potentiometric signal, for example, is electrical potential produced after cleavage of the nucleic acids of a reporter. An amperometric signal may be movement of electrons produced after the cleavage of nucleic acid of a reporter. Often, the signal is an optical signal, such as a colorimetric signal or a fluorescence signal. An optical signal is, for example, a light output produced after the cleavage of the nucleic acids of a reporter. Sometimes, an optical signal is a change in light absorbance between before and after the cleavage of nucleic acids of a reporter. Often, a piezo-electric signal is a change in mass between before and after the cleavage of the nucleic acid of a reporter.

[0437] The detectable signal may be a colorimetric signal or a signal visible by eye. In some embodiments, the detectable signal may be fluorescent, electrical, chemical, electrochemical, or magnetic. In some embodiments, the first detection signal may be generated by interaction of the detection moiety to the capture molecule in the detection region, where the first detection signal indicates that the sample contained the target nucleic acid. Sometimes systems are capable of detecting more than one type of target nucleic acid, wherein the system comprises more than one type of guide nucleic acid and more than one type of reporter nucleic acid. In some embodiments, the detectable signal may be generated directly by the cleavage event. Alternatively, or in combination, the detectable signal may be generated indirectly by the signal event. Sometimes the detectable signal is not a fluorescent signal. In some embodiments, the detectable signal may be a colorimetric or color-based signal. In some embodiments, the detected target nucleic acid may be identified based on its spatial location on the detection region of the support medium. In some embodiments, the second detectable signal may be generated in a spatially distinct location than the first generated signal.

[0438] In some embodiments, the reporter nucleic acid is a single-stranded nucleic acid sequence comprising ribonucleotides. The nucleic acid of a reporter may be a single-stranded nucleic acid sequence comprising at least one ribonucleotide. In some embodiments, the nucleic acid of a reporter is a single-stranded nucleic acid comprising at least one ribonucleotide residue at an internal position that functions as a cleavage site. In some embodiments, the nucleic acid of a reporter comprises at least 2, at least 3, at least 4, at least 5, at least 6, at least 7, at least 8, at least 9, or at least 10 ribonucleotide residues at an internal position. In some embodiments, the nucleic acid of a reporter comprises from 2 to 10, from 3 to 9, from 4 to 8, or from 5 to 7 ribonucleotide residues at an internal position. Sometimes the ribonucleotide residues are continuous. Alternatively, the ribonucleotide residues are interspersed in between non-ribonucleotide residues. In some embodiments, the nucleic acid of a reporter has only ribonucleotide residues. In some embodiments, the nucleic acid of a reporter has only DNA residues. In some embodiments, the nucleic acid comprises nucleotides resistant to cleavage by the effector protein described herein. In some embodiments, the nucleic acid of a reporter comprises synthetic nucleotides. In some embodiments, the nucleic acid of a reporter comprises at least one ribonucleotide residue and at least one non-ribonucleotide residue.

[0439] In some embodiments, the nucleic acid of a reporter comprises at least one uracil ribonucleotide. In some embodiments, the nucleic acid of a reporter comprises at least two uracil ribonucleotides. Sometimes the nucleic acid of a reporter has only uracil ribonucleotides. In some embodiments, the nucleic acid of a reporter comprises at least one adenine ribonucleotide. In some embodiments, the nucleic acid of a reporter comprises at least two adenine ribonucleotides. In some embodiments, the nucleic acid of a reporter has only adenine ribonucleotides. In some embodiments, the nucleic acid of a reporter comprises at least one cytosine ribonucleotide. In some embodiments, the nucleic acid of a reporter comprises at least two cytosine ribonucleotides. In some embodiments, the nucleic acid of a reporter comprises at least one guanine ribonucleotide. In some embodiments, the nucleic acid of a reporter comprises at least two guanine ribonucleotides. In some embodiments, a nucleic acid of a reporter comprises a single unmodified ribonucleotide. In some embodiments, a nucleic acid of a reporter comprises only unmodified DNAs.

[0440] In some embodiments, the nucleic acid of a reporter is 5 to 20, 5 to 15, 5 to 10, 7 to 20, 7 to 15, or 7 to 10 nucleotides in length. In some embodiments, the nucleic acid of a reporter is 3 to 20, 4 to 10, 5 to 10, or 5 to 8 nucleotides in length. In some embodiments, the nucleic acid of a reporter is 5 to 12 nucleotides in length. In some embodiments, the reporter nucleic acid is at least 2, at least 3, at least 4, at least 5, at least 6, at least 7, at least 8, at least 9, at least 10, at least 11, at least 12, at least 13, at least 14, at least 15, at least 16, at least 17, at least 18, at least 19, at least 20, at least 21, at least 22, at least 23, at least 24, at least 25, at least 26, at least 27, at least 28, at least 29, or at least 30 nucleotides in length. In some embodiments, the reporter nucleic acid is 2, 3, 4, 5, 6, 7, 8, 9, 10, 11, 12, 13, 14, 15, 16, 17, 18, 19, 20, 21, 22, 23, 24, 25, 26, 27, 28, 29, or 30 nucleotides in length.

[0441] In some embodiments, systems comprise a plurality of reporters. The plurality of reporters may comprise a plurality of signals. In some embodiments, systems comprise at least 2, at least 3, at least 4, at least 5, at least 6, at least 7, at least 8, at least 9, at least 10, at least 11, at least 12, at least 13, at least 14, at least 15, at least 20, at least 30, at least 40, or at least 50 reporters. In some embodiments, there are 2 to 50, 3 to 40, 4 to 30, 5 to 20, or 6 to 10 different reporters.

[0442] Herein, detection of reporter cleavage to determine the presence of a target nucleic acid may be referred to as ‘DETECTR’. In some embodiments described herein is a method of assaying for a target nucleic acid in a sample comprising contacting the target nucleic acid with an effector protein, a non-naturally occurring guide nucleic acid that hybridizes to a segment of the target nucleic acid, and a reporter nucleic acid, and assaying for a change in a signal, wherein the change in the signal is produced by cleavage of the reporter nucleic acid.

[0443] In the presence of a large amount of non-target nucleic acids, an activity of an effector protein (e.g., an effector protein as disclosed herein) may be inhibited. This is because the activated effector proteins collaterally cleave any nucleic acids. If total nucleic acids are present in large amounts, they may outcompete reporters for the effector proteins. In some embodiments, systems comprise an excess of reporter(s), such that when the system is operated and a solution of the system comprising the reporter is combined with a sample comprising a target nucleic acid, the concentration of the reporter in the combined solution-sample is greater than the concentration of the target nucleic acid. In some embodiments, the sample comprises amplified target nucleic acid. In some embodiments, the sample comprises an unamplified target nucleic acid. In some embodiments, the concentration of the reporter is greater than the concentration of target nucleic acids and non-target nucleic acids. The non-target nucleic acids may be from the original sample, either lysed or unlysed. The non-target nucleic acids may comprise byproducts of amplification. In some embodiments, systems comprise a reporter wherein the concentration of the reporter in a solution is 1.5 fold, at least 2 fold, at least 3 fold, at least 4 fold, at least 5 fold, at least 6 fold, at least 7 fold, at least 8 fold, at least 9 fold, at least 10 fold, at least 11 fold, at least 12 fold, at least 13 fold, at least 14 fold, at least 15 fold, at least 16 fold, at least 17 fold, at least 18 fold, at least 19 fold, at least 20 fold, at least 30 fold, at least 40 fold, at least 50 fold, at least 60 fold, at least 70 fold, at least 80 fold, at least 90 fold, at least 100 fold excess of total nucleic acids. In some embodiments, systems comprise a reporter wherein the concentration of the reporter in a solution is 1.5 fold to 100 fold, 2 fold to 10 fold, 10 fold to 20 fold, 20 fold to 30 fold, 30 fold to 40 fold, 40 fold to 50 fold, 50 fold to 60 fold, 60 fold to 70 fold, 70 fold to 80 fold, 80 fold to 90 fold, 90 fold to 100 fold, 1.5 fold to 10 fold, 1.5 fold to 20 fold, 10 fold to 40 fold, 20 fold to 60 fold, or 10 fold to 80 fold excess of total nucleic acids.

### Amplification Reagents/Components

[0444] In some embodiments, systems described herein comprise a reagent or component for amplifying a nucleic acid. Non-limiting examples of reagents for amplifying a nucleic acid include polymerases, primers, and nucleotides. In some embodiments, systems comprise reagents for nucleic acid amplification of a target nucleic acid in a sample. Nucleic acid amplification of the target nucleic acid may improve at least one of sensitivity, specificity, or accuracy of the assay in detecting the target nucleic acid. In some embodiments, nucleic acid amplification is isothermal nucleic acid amplification, providing for the use of the system or system in remote regions or low resource settings without specialized equipment for amplification. In some embodiments, amplification of the target nucleic acid increases the concentration of the target nucleic acid in the sample relative to the concentration of nucleic acids that do not correspond to the target nucleic acid.

[0445] The reagents for nucleic acid amplification may comprise a recombinase, an oligonucleotide primer, a single-stranded DNA binding (SSB) protein, a polymerase, or a combination thereof that is suitable for an amplification reaction. Non-limiting examples of amplification reactions are transcription mediated amplification (TMA), helicase dependent amplification (HDA), or circular helicase dependent amplification (cHDA), strand displacement amplification (SDA), recombinase polymerase amplification (RPA), loop mediated amplification (LAMP), exponential amplification reaction (EXPAR), rolling circle amplification (RCA), ligase chain reaction (LCR), simple method amplifying RNA targets (SMART), single primer isothermal amplification (SPIA), multiple displacement amplification (MDA), nucleic acid sequence based amplification (NASBA), hinge-initiated primer-dependent amplification of nucleic acids (HIP), nicking enzyme amplification reaction (NEAR), and improved multiple displacement amplification (IMDA).

[0446] In some embodiments, systems described herein comprise a PCR tube, a PCR well or a PCR plate. In some embodiments, the wells of the PCR plate may be pre-aliquoted with the reagent for amplifying a nucleic acid, as well as a guide nucleic acid, an effector protein, a multimeric complex, or any combination thereof.

[0447] In some embodiments, systems comprise a PCR plate; a guide nucleic acid targeting a target sequence; an effector protein capable of being activated when complexed with the guide nucleic acid and the target sequence; and a single stranded reporter nucleic acid comprising a detection moiety, wherein the reporter nucleic acid is capable of being cleaved by the activated nuclease, thereby generating a detectable signal.

[0448] In some embodiments, systems described herein comprise a support medium; a guide nucleic acid targeting a target sequence; and an effector protein capable of being activated when complexed with the guide nucleic acid and the target sequence. In some embodiments, nucleic acid amplification is performed in a nucleic acid amplification region on the support medium. Alternatively, or in combination, the nucleic acid amplification is performed in a reagent chamber, and the resulting sample is applied to the support medium.

[0449] In some embodiments, a system described herein for editing a target nucleic acid comprises a PCR plate; a guide nucleic acid targeting a target sequence; and an effector protein capable of being activated when complexed with the guide nucleic acid and the target sequence. In some embodiments, the wells of the PCR plate may be pre-aliquoted with the guide nucleic acid targeting a target sequence, and an effector protein capable of being activated when complexed with the guide nucleic acid and the target sequence. A user may thus add the biological sample of interest to a well of the pre-aliquoted PCR plate.

[0450] In some embodiments, wells of the PCR plate may be pre-aliquoted with a guide nucleic acid targeting a target sequence, an effector protein capable of being activated when complexed with the guide nucleic acid and the target sequence, and at least one population of a single stranded reporter nucleic acid comprising a detection moiety. In some embodiments, the reporter nucleic acid is capable of being cleaved by the activated nuclease, thereby generating a detectable signal. A user may thus add the biological sample of interest to a well of the pre-aliquoted PCR plate and measure for the detectable signal with a fluorescent light reader or a visible light reader.

[0451] In some embodiments, amplification reaction of nucleic acid as described herein is performed for no greater than 1, 2, 3, 4, 5, 6, 7, 8, 9, 10, 11, 12, 13, 14, 15, 16, 17, 18, 19, 20, 25, 30, 40, 50, or 60 minutes, or any value 1 to 60 minutes. In some embodiments, the amplification reaction is performed for 1 to 60, 5 to 55, 10 to 50, 15 to 45, 20 to 40, or 25 to 35 minutes. In some embodiments, the amplification reaction is performed at a temperature of around 20-45° C. In some embodiments, the amplification reaction is performed at a temperature no greater than 20° C., 25° C., 30° C., 35° C., 37° C., 40° C., 45° C., or any value 20° C. to 45° C. In some embodiments, the amplification reaction is performed at a temperature of at least 20° C., 25° C., 30° C., 35° C., 37° C., 40° C., or 45° C., or any value 20° C. to 45° C.

[0452] In some embodiments, the amplification reaction is performed at a temperature of 20° C. to 45° C., 25° C. to 40° C., 30° C. to 40° C., or 35° C. to 40° C.

[0453] In some embodiments, systems comprise primers for amplifying a target nucleic acid to produce an amplification product comprising the target nucleic acid and a PAM. In some embodiments, at least one of the primers may comprise the PAM that is incorporated into the amplification product during amplification. The compositions for amplification of target nucleic acids and methods of use thereof, as described herein, are compatible with any of the methods disclosed herein including methods of assaying for at least one base difference (e.g., assaying for a SNP or a base mutation) in a target nucleic acid, methods of assaying for a target nucleic acid that lacks a PAM by amplifying the target nucleic acid to introduce a PAM, and compositions used in introducing a PAM by amplification into the target nucleic acid.

### Additional System Components

[0454] In some embodiments, systems include a package, carrier, or container that is compartmentalized to receive one or more containers such as vials, tubes, and the like, each of the container(s) comprising one of the separate elements to be used in a method described herein. Suitable containers include, for example, test wells, bottles, vials, and test tubes. In some embodiments, the containers are formed from a variety of materials such as glass, plastic, or polymers. In some embodiments, the system or systems described herein contain packaging materials. Examples of packaging materials include, but are not limited to, pouches, blister packs, bottles, tubes, bags, containers, bottles, and any packaging material suitable for intended mode of use.

[0455] In some embodiments, systems described herein include labels listing contents and/or instructions for use, or package inserts with instructions for use. In some embodiments, the systems include a set of instructions and/or a label is on or associated with the container. In some embodiments, the label is on a container when letters, numbers or other characters forming the label are attached, molded, or etched into the container itself; a label is associated with a container when it is present within a receptacle or carrier that also holds the container (e.g., as a package insert). In some embodiments, the label is used to indicate that the contents are to be used for a specific therapeutic application. In some embodiments, the label indicates directions for use of the contents, such as in the methods described herein. In some embodiments, after packaging the formed product and wrapping or boxing to maintain a sterile barrier, the product is terminally sterilized by heat sterilization, gas sterilization, gamma irradiation, or by electron beam sterilization. Alternatively, in some embodiments, the product is prepared and packaged by aseptic processing.

[0456] In some embodiments, systems comprise a solid support. An RNP or effector protein may be attached to a solid support. The solid support may be an electrode or a bead. The bead may be a magnetic bead. Upon cleavage, the RNP is liberated from the solid support and interacts with other mixtures. For example, upon cleavage of the nucleic acid of the RNP, the effector protein of the RNP flows through a chamber into a mixture comprising a substrate. When the effector protein meets the substrate, a reaction occurs, such as a colorimetric reaction, which is then detected. As another example, the protein is an enzyme substrate, and upon cleavage of the nucleic acid of the enzyme substrate-nucleic acid, the enzyme flows through a chamber into a mixture comprising the enzyme. When the enzyme substrate meets the enzyme, a reaction occurs, such as a calorimetric reaction, which is then detected.

### Certain System Conditions

[0457] In some embodiments, systems and methods are employed under certain conditions that enhance an activity of the effector protein relative to alternative conditions, as measured by a detectable signal released from cleavage of a reporter in the presence of the target nucleic acid. In some embodiments, the reporter nucleic acid is a homopolymeric reporter nucleic acid comprising 5 to 20 consecutive adenines, 5 to 20 consecutive thymines, 5 to 20 consecutive cytosines, or 5 to 20 consecutive guanines. In some embodiments, the reporter is an RNA-FQ reporter.

[0458] In some embodiments, effector proteins disclosed herein recognize, bind, or are activated by, different target nucleic acids having different sequences, but are active toward the same reporter nucleic acid, allowing for facile multiplexing in a single assay having a single ssRNA-FQ reporter.

[0459] In some embodiments, systems and methods are employed under certain conditions that enhance cis-cleavage activity of the effector protein.

[0460] Certain conditions that may enhance the activity of an effector protein include a certain salt presence or salt concentration of the solution in which the activity occurs. For example, cis-cleavage activity of an effector protein may be inhibited or halted by a high salt concentration. The salt may be a sodium salt, a potassium salt, or a magnesium salt. In some embodiments, the salt is NaCl. In some embodiments, the salt is KNO₃. In some embodiments, the salt concentration is less than 150 mM, less than 125 mM, less than 100 mM, less than 75 mM, less than 50 mM, or less than 25 mM.

[0461] Certain conditions that may enhance the activity of an effector protein include the pH of a solution in which the activity. In some embodiments, the pH is about 7, about 7.1, about 7.2, about 7.3, about 7.4, about 7.5, about 7.6, about 7.7, about 7.8, about 7.9, about 8, about 8.1, about 8.2, about 8.3, about 8.4, about 8.5, about 8.6, about 8.7, about 8.8, about 8.9, or about 9. In some embodiments, the pH is 7 to 7.5, 7.5 to 8, 8 to 8.5, 8.5 to 9, or 7 to 8.5. In some embodiments, the pH is less than 7. In some embodiments, the pH is greater than 7.

[0462] Certain conditions that may enhance the activity of an effector protein includes the temperature at which the activity is performed. In some embodiments, the temperature is about 25° C. to about 50° C. In some embodiments, the temperature is about 20° C. to about 40° C., about 30° C. to about 50° C., or about 40° C. to about 60° C. In some embodiments, the temperature is about 25° C., about 30° C., about 35° C., about 40° C., about 45° C., or about 50° C.

### XI. Methods and Formulations for Introducing System Components and Compositions into a Target Cell

[0463] A guide nucleic acid (or a nucleic acid comprising a nucleotide sequence encoding same) and/or an effector protein described herein may be introduced into a host cell by any of a variety of well-known methods. As a non-limiting example, a guide nucleic acid and/or effector protein may be combined with a lipid. As another non-limiting example, a guide nucleic acid and/or effector protein may be combined with a particle or formulated into a particle.

### Methods for Introducing System Components and Compositions to a Host

[0464] Described herein are methods of introducing various components described herein to a host. A host may be any suitable host, such as a host cell. When described herein, a host cell may be an in vivo or in vitro eukaryotic cell, a prokaryotic cell (e.g., bacterial or archaeal cell), or a cell from a multicellular organism (e.g., a cell line) cultured as a unicellular entity, which eukaryotic or prokaryotic cells may be, or have been, used as recipients for methods of introduction described herein, and include the progeny of the original cell which has been transformed by the methods of introduction described herein. It is understood that the progeny of a single cell may not necessarily be completely identical in morphology or in genomic or total DNA complement as the original parent, due to natural, accidental, or deliberate mutation. A host cell may be a recombinant host cell or a genetically modified host cell, if a heterologous nucleic acid, e.g., an expression vector, has been introduced into the cell.

[0465] Methods of introducing a nucleic acid and/or protein into a host cell are known in the art, and any convenient method may be used to introduce a subject nucleic acid (e.g., an expression construct/vector) into a target cell (e.g., a human cell, and the like). Suitable methods include, e.g., viral infection, transfection, conjugation, protoplast fusion, lipofection, electroporation, calcium phosphate precipitation, polyethyleneimine (PEI)-mediated transfection, DEAE-dextran mediated transfection, liposome-mediated transfection, particle gun technology, calcium phosphate precipitation, direct micro injection, nanoparticle-mediated nucleic acid delivery (see, e.g., Panyam et al. Adv Drug Deliv Rev. 2012 Sep. 13. pii: S0169-409X(12)00283-9. doi: 10.1016/j.addr.2012.09.023), and the like. In some embodiments, the nucleic acid and/or protein are introduced into a disease cell comprised in a pharmaceutical composition comprising the guide nucleic acid and/or effector protein and a pharmaceutically acceptable excipient.

[0466] In some embodiments, molecules of interest, such as nucleic acids of interest, are introduced to a host. In some embodiments, polypeptides, such as an effector protein are introduced to a host. In some embodiments, vectors, such as lipid particles and/or viral vectors may be introduced to a host. Introduction may be for contact with a host or for assimilation into the host, for example, introduction into a host cell.

[0467] In some embodiments, described herein are methods of introducing one or more nucleic acids, such as a nucleic acid encoding an effector protein, a nucleic acid that, when transcribed, produces an engineered guide nucleic acid, and/or a donor nucleic acid, or combinations thereof, into a host cell. Any suitable method may be used to introduce a nucleic acid into a cell. Suitable methods include, for example, viral infection, transfection, lipofection, electroporation, calcium phosphate precipitation, polyethyleneimine (PEI)-mediated transfection, DEAE-dextran mediated transfection, liposome-mediated transfection, particle gun technology, calcium phosphate precipitation, direct microinjection, nanoparticle-mediated nucleic acid delivery, and the like. Further methods are described throughout.

[0468] Introducing one or more nucleic acids into a host cell may occur in any culture media and under any culture conditions that promote the survival of the cells. Introducing one or more nucleic acids into a host cell may be carried out in vivo or ex vivo. Introducing one or more nucleic acids into a host cell may be carried out in vitro.

[0469] In some embodiments, an effector protein may be provided as RNA. The RNA may be provided by direct chemical synthesis or may be transcribed in vitro from a DNA (e.g., encoding the effector protein). Once synthesized, the RNA may be introduced into a cell by way of any suitable technique for introducing nucleic acids into cells (e.g., microinjection, electroporation, transfection, etc.). In some embodiments, introduction of one or more nucleic acid may be through the use of a vector and/or a vector system, accordingly, in some embodiments, compositions and system described herein comprise a vector and/or a vector system.

[0470] Vectors may be introduced directly to a host. In some embodiments, host cells may be contacted with one or more vectors as described herein, and in some embodiments, said vectors are taken up by the cells. Methods for contacting cells with vectors include but are not limited to electroporation, calcium chloride transfection, microinjection, lipofection, micro-injection, contact with the cell or particle that comprises a molecule of interest, or a package of cells or particles that comprise molecules of interest.

[0471] Components described herein may also be introduced directly to a host. For example, an engineered guide nucleic acid may be introduced to a host, specifically introduced into a host cell. Methods of introducing nucleic acids, such as RNA into cells include, but are not limited to direct injection, transfection, or any other method used for the introduction of nucleic acids.

[0472] Polypeptides (e.g., effector proteins) described herein may also be introduced directly to a host. In some embodiments, polypeptides described herein may be modified to promote introduction to a host. For example, polypeptides described herein may be modified to increase the solubility of the polypeptide. Such a polypeptide may optionally be fused to a polypeptide domain that increases solubility. The domain may be linked to the polypeptide through a defined protease cleavage site, such as TEV sequence which is cleaved by TEV protease. The linker may also include one or more flexible sequences, e.g. from 1 to 10 glycine residues. In some embodiments, the cleavage of the polypeptide is performed in a buffer that maintains solubility of the product, e.g. in the presence of from 0.5 to 2 M urea, in the presence of polypeptides and/or polynucleotides that increase solubility, and the like. Domains of interest include endosomolytic domains, e.g. influenza HA domain; and other polypeptides that aid in production, e.g. IF2 domain, GST domain, GRPE domain, and the like. In another example, the polypeptide may be modified to improve stability. For example, the polypeptides may be PEGylated, where the polyethyleneoxy group provides for enhanced lifetime in the blood stream. Polypeptides may also be modified to promote uptake by a host, such as a host cell. For example, a polypeptide described herein may be fused to a polypeptide permeant domain to promote uptake by a host cell. Any suitable permeant domains may be used in the non-integrating polypeptides of the present disclosure, including peptides, peptidomimetics, and non-peptide carriers. Examples include penetratin, a permeant peptide may be derived from the third alpha helix of Drosophila melanogaster transcription factor Antennapaedia; the HIV-1 tat basic region amino acid sequence, e.g., amino acids 49-57 of a naturally-occurring tat protein; and poly-arginine motifs, for example, the region of amino acids 34-56 of HIV-1 rev protein, nonaarginine, octa-arginine, and the like. The site at which the fusion is made may be selected in order to optimize the biological activity, secretion or binding characteristics of the polypeptide. The optimal site may be determined by suitable methods.

### Formulations for Introducing System Components and Compositions to a Host

[0473] Described herein are formulations of introducing compositions or components of a system described herein to a host. In some embodiments, such formulations, systems and compositions described herein comprise an effector protein and a carrier (e.g., excipient, diluent, vehicle, or filling agent). In some aspects of the present disclosure, the effector protein is provided in a pharmaceutical composition comprising the effector protein and any pharmaceutically acceptable excipient, carrier, or diluent.

### XII. Methods of Modifying a Nucleic Acid

[0474] Provided herein are compositions, methods, and systems for modifying (e.g., editing) target nucleic acids. In general, modifying refers to changing the physical composition of a target nucleic acid. However, compositions, methods, and systems disclosed herein may also be capable of modifying target nucleic acids, such as making epigenetic modifications of target nucleic acids, which does not change the nucleotide sequence of the target nucleic acids per se. Effector proteins, compositions and systems described herein may be used for modifying a target nucleic acid, which includes editing a target nucleic acid sequence. Modifying a target nucleic acid may comprise one or more of: cleaving the target nucleic acid, deleting one or more nucleotides of the target nucleic acid, inserting one or more nucleotides into the target nucleic acid, mutating one or more nucleotides of the target nucleic acid, or otherwise changing one or more nucleotides of the target nucleic acid. Modifying a target nucleic acid may comprise one or more of: methylating, demethylating, deaminating, or oxidizing one or more nucleotides of the target nucleic acid.

[0475] Compositions, methods, and systems described herein may modify a coding portion of a gene, a non-coding portion of a gene, or a combination thereof. Modifying at least one gene using the compositions, methods or systems described herein may reduce or increase expression of one or more genes. In some embodiments, the compositions, methods or systems reduce expression of one or more genes by at least 10%, at least 20%, at least 30%, at least 40%, at least 50%, at least 60%, at least 70%, at least 80%, at least 90%, or at least 95%. In some embodiments, the compositions, methods or systems remove all expression of a gene, also referred to as genetic knock out. In some embodiments, the compositions, methods or systems increase expression of one or more genes by at least 10%, at least 20%, at least 30%, at least 40%, at least 50%, at least 60%, at least 70%, at least 80%, at least 90%, or at least 100%.

[0476] In some embodiments, the compositions, methods or systems comprise a nucleic acid expression vector, or use thereof, to introduce an effector protein, guide nucleic acid, donor template or any combination thereof to a cell. In some embodiments, the nucleic acid expression vector is a viral vector. Viral vectors include, but are not limited to, retroviruses, adenoviruses, adeno-associated viruses, and herpes simplex viruses. In some embodiments, the viral vector is a replication-defective viral vector, comprising an insertion of a therapeutic gene inserted in genes essential to the lytic cycle, preventing the virus from replicating and exerting cytotoxic effects. In some embodiments, the viral vector is an adeno associated viral (AAV) vector. In some embodiments, the nucleic acid expression vector is a non-viral vector. In some embodiments, compositions and methods comprise a lipid, polymer, nanoparticle, or a combination thereof, or use thereof, to introduce a Cas protein, guide nucleic acid, donor template or any combination thereof to a cell. Non-limiting examples of lipids and polymers are cationic polymers, cationic lipids, or bio-responsive polymers. In some embodiments, the bio-responsive polymer exploits chemical-physical properties of the endosomal environment (e.g., pH) to preferentially release the genetic material in the intracellular space.

[0477] Methods of modifying may comprise contacting a target nucleic acid with one or more components, compositions or systems described herein. In some embodiments, a method of modifying comprises contacting a target nucleic acid with at least one of: a) one or more effector proteins, or one or more nucleic acids encoding one or more effector proteins; or b) one or more guide nucleic acids, or one or more nucleic acids encoding one or more guide nucleic acids. In some embodiments, a method of modifying comprises contacting a target nucleic acid with a system described herein wherein the system comprises components comprising at least one of: a) one or more effector proteins, or one or more nucleic acids encoding one or more effector proteins; or b) one or more guide nucleic acids, or one or more nucleic acids encoding one or more guide nucleic acids. In some embodiments, a method of modifying comprises contacting a target nucleic acid with a composition described herein comprising at least one of: a) one or more effector proteins, or one or more nucleic acids encoding one or more effector proteins; or b) one or more guide nucleic acids, or one or more nucleic acids encoding one or more guide nucleic acids; in a composition.

[0478] Editing a target nucleic acid sequence may introduce a mutation (e.g., point mutations, deletions) in a target nucleic acid relative to a corresponding wildtype nucleotide sequence. Editing may remove or correct a disease-causing mutation in a nucleic acid sequence to produce a corresponding wildtype nucleotide sequence. Editing a target nucleic acid sequence may remove/correct point mutations, deletions, null mutations, or tissue-specific mutations in a target nucleic acid. Editing a target nucleic acid sequence may be used to generate gene knock-out, gene knock-in, gene editing, gene tagging, or a combination thereof. Methods of the disclosure may be targeted to any locus in a genome of a cell.

[0479] Modifying may comprise single stranded cleavage, double stranded cleavage, donor nucleic acid insertion, epigenetic modification (e.g., methylation, demethylation, acetylation, or deacetylation), or a combination thereof. In some embodiments, cleavage (single-stranded or double-stranded) is site-specific, meaning cleavage occurs at a specific site in the target nucleic acid, often within the region of the target nucleic acid that hybridizes with the guide nucleic acid spacer sequence. In some embodiments, the effector proteins introduce a single-stranded break in a target nucleic acid to produce a cleaved nucleic acid. In some embodiments, the effector protein is capable of introducing a break in a single stranded RNA (ssRNA). The effector protein may be coupled to a guide nucleic acid that targets a particular region of interest in the ssRNA. In some embodiments, the target nucleic acid, and the resulting cleaved nucleic acid is contacted with a nucleic acid for homologous recombination (e.g., homology directed repair (HDR)) or non-homologous end joining (NHEJ). In some embodiments, a double-stranded break in the target nucleic acid may be repaired (e.g., by NHEJ or HDR) without insertion of a donor template, such that the repair results in an indel in the target nucleic acid at or near the site of the double-stranded break. In some embodiments, an indel, sometimes referred to as an insertion-deletion or indel mutation, is a type of genetic mutation that results from the insertion and/or deletion of one or more nucleotide in a target nucleic acid. An indel may vary in length (e.g., 1 to 1,000 nucleotides in length) and be detected using methods well known in the art, including sequencing. If the number of nucleotides in the insertion/deletion is not divisible by three, and it occurs in a protein coding region, it is also a frameshift mutation. Indel percentage is the percentage of sequencing reads that show at least one nucleotide has been mutation that results from the insertion and/or deletion of nucleotides regardless of the size of insertion or deletion, or number of nucleotides mutated. For example, if there is at least one nucleotide deletion detected in a given target nucleic acid, it counts towards the percent indel value. As another example, if one copy of the target nucleic acid has one nucleotide deleted, and another copy of the target nucleic acid has 10 nucleotides deleted, they are counted the same. This number reflects the percentage of target nucleic acids that are edited by a given effector protein.

[0480] In some embodiments, methods of modifying described herein cleave a target nucleic acid at one or more locations to generate a cleaved target nucleic acid. In some embodiments, the cleaved target nucleic acid undergoes recombination (e.g., NHEJ or HDR). In some embodiments, cleavage in the target nucleic acid may be repaired (e.g., by NHEJ or HDR) without insertion of a donor nucleic acid, such that the repair results in an indel in the target nucleic acid at or near the site of the cleavage site. In some embodiments, cleavage in the target nucleic acid may be repaired (e.g., by NHEJ or HDR) with insertion of a donor nucleic acid, such that the repair results in an indel in the target nucleic acid at or near the site of the cleavage site.

[0481] In some embodiments, wherein the compositions, systems, and methods of the present disclosure comprise an additional guide nucleic acid or a use thereof, and such dual-guided compositions, systems, and methods described herein may modify the target nucleic acid in two locations. In some embodiments, dual-guided modifying may comprise cleavage of the target nucleic acid in the two locations targeted by the guide nucleic acids. In some embodiments, upon removal of the sequence between the guide nucleic acids, the wild-type reading frame is restored. A wild-type reading frame may be a reading frame that produces at least a partially, or fully, functional protein. A non-wild-type reading frame may be a reading frame that produces a non-functional or partially non-functional protein. The term “functional protein” refers to protein that retains at least some if not all activity relative to the wildtype protein. A functional protein can also include a protein having enhanced activity relative to the wildtype protein. Assays are known and available for detecting and quantifying protein activity, e.g., colorimetric and fluorescent assays. In some instances, a functional protein is a wildtype protein. In some instances, a functional protein is a functional portion of a wildtype protein.

[0482] Accordingly, in some embodiments, compositions, systems, and methods described herein may edit 1 to 1,000 nucleotides or any integer in between, in a target nucleic acid. In some embodiments, 1 to 1,000, 2 to 900, 3 to 800, 4 to 700, 5 to 600, 6 to 500, 7 to 400, 8 to 300, 9 to 200, or 10 to 100 nucleotides, or any integer in between, may be edited by the compositions, systems, and methods described herein. In some embodiments, 1, 2, 3, 4, 5, 6, 7, 8, 9, 10, or more nucleotides may be edited by the compositions, systems, and methods described herein. In some embodiments, 10, 20, 30, 40, 50, 60, 70, 80 90, 100 or more nucleotides, or any integer in between, may be edited by the compositions, systems, and methods described herein. In some embodiments, 100, 200, 300, 400, 500, 600, 700, 800, 900 or more nucleotides, or any integer in between, may be edited by the compositions, systems, and methods described herein.

[0483] Methods may comprise use of two or more effector proteins. An illustrative method for introducing a break in a target nucleic acid comprises contacting the target nucleic acid with: (a) a first engineered guide nucleic acid comprising a region that binds to a first effector protein described herein; and (b) a second engineered guide nucleic acid comprising a region that binds to a second effector protein described herein, wherein the first engineered guide nucleic acid comprises an additional region that hybridizes to the target nucleic acid and wherein the second engineered guide nucleic acid comprises an additional region that hybridizes to the target nucleic acid. In some embodiments, the first and second effector protein are identical. In some embodiments, the first and second effector protein are not identical.

[0484] In some embodiments, editing a target nucleic acid comprises genome editing. Genome editing may comprise editing a genome, chromosome, plasmid, or other genetic material of a cell or organism. In some embodiments, the genome, chromosome, plasmid, or other genetic material of the cell or organism is modified in vivo. In some embodiments, the genome, chromosome, plasmid, or other genetic material of the cell or organism is modified in a cell. In some embodiments, the genome, chromosome, plasmid, or other genetic material of the cell or organism is modified in vitro. For example, a plasmid may be edited in vitro using a composition described herein and introduced into a cell or organism.

[0485] In some embodiments, editing a target nucleic acid may comprise deleting a sequence from a target nucleic acid. For example, a mutated sequence or a sequence associated with a disease may be removed from a target nucleic acid. In some embodiments, editing a target nucleic acid may comprise replacing a sequence in a target nucleic acid with a second sequence. For example, a mutated sequence or a sequence associated with a disease may be replaced with a second sequence lacking the mutation or that is not associated with the disease. In some embodiments, editing a target nucleic acid may comprise introducing a sequence into a target nucleic acid. For example, a beneficial sequence or a sequence that may reduce or eliminate a disease may be inserted into the target nucleic acid.

[0486] In some embodiments, methods comprise inserting a donor nucleic acid into a cleaved target nucleic acid. The donor nucleic acid may be inserted at a specified (e.g., effector protein targeted) point within the target nucleic acid. In some embodiments, the cleaved target nucleic acid is cleaved at a single location. In such embodiments, the methods comprise contacting a target nucleic acid with an effector protein described herein, thereby introducing a single-stranded break in the target nucleic acid; and contacting the target nucleic acid with a donor nucleic acid for homologous recombination, optionally by HDR or NHEJ, thereby introducing a new sequence into the target nucleic acid (e.g., at a cleavage site). In some embodiments, the cleaved target nucleic acid is cleaved at two locations. In such embodiments, the methods comprise contacting a target nucleic acid with an effector protein described herein, thereby introducing a single-stranded break in the target nucleic acid; contacting the target nucleic acid with a second effector protein described herein, to generate a second cleavage site in the target nucleic acid, ligating the regions flanking the first and second cleavage site, optionally through NHEJ or single-strand annealing, thereby resulting in the excision of a portion of the target nucleic acid between the first and second cleavage sites from the target nucleic acid; and contacting the target nucleic acid with a donor nucleic acid for homologous recombination, optionally by HDR or NHEJ, thereby introducing a new sequence into the target nucleic acid (e.g., in between two cleavage sites).

[0487] In some embodiments, methods comprise editing a target nucleic acid with two or more effector proteins. Editing a target nucleic acid may comprise introducing a two or more single-stranded breaks in a target nucleic acid. In some embodiments, a break may be introduced by contacting a target nucleic acid with an effector protein and a guide nucleic acid. The guide nucleic acid may bind to the effector protein and hybridize to a region of the target nucleic acid, thereby recruiting the effector protein to the region of the target nucleic acid. Binding of the effector protein to the guide nucleic acid and the region of the target nucleic acid may activate the effector protein, and the effector protein may introduce a break (e.g., a single stranded break) in the region of the target nucleic acid. In some embodiments, editing a target nucleic acid may comprise introducing a first break in a first region of the target nucleic acid and a second break in a second region of the target nucleic acid. For example, editing a target nucleic acid may comprise contacting a target nucleic acid with a first guide nucleic acid that binds to a first effector protein and hybridizes to a first region of the target nucleic acid and a second guide nucleic acid that binds to a second programmable nickase and hybridizes to a second region of the target nucleic acid. The first effector protein may introduce a first break in a first strand at the first region of the target nucleic acid, and the second effector protein may introduce a second break in a second strand at the second region of the target nucleic acid. In some embodiments, a segment of the target nucleic acid between the first break and the second break may be removed, thereby editing the target nucleic acid. In some embodiments, a segment of the target nucleic acid between the first break and the second break may be replaced (e.g., with donor nucleic acid), thereby editing the target nucleic acid.

[0488] Methods, systems and compositions described herein may edit a target nucleic acid wherein such editing may effect one or more indels. In some embodiments, where compositions, systems, and/or methods described herein effect one or more indels, the impact on the transcription and/or translation of the target nucleic acid may be predicted depending on: 1) the amount of indels generated; and 2) the location of the indel on the target nucleic acid. For example, as described herein, in some embodiments, if the amount of indels is not divisible by three, and the indels occur within or along a protein coding region, then the edit or mutation may be a frameshift mutation. In some embodiments, if the amount of indels is divisible by three, then a frameshift mutation may not be effected, but a splicing disruption mutation and/or sequence skip mutation may be effected, such as an exon skip mutation. In some embodiments, if the amount of indels is not evenly divisible by three, then a frameshift mutation may be effected.

[0489] Methods, systems and compositions described herein may edit a target nucleic acid wherein such editing may be measured by indel activity. Indel activity measures the amount of change in a target nucleic acid (e.g., nucleotide deletion(s) and/or insertion(s)) compared to a target nucleic acid that has not been contacted by a polypeptide described in compositions, systems, and methods described herein. For example, indel activity may be detected by next generation sequencing of one or more target loci of a target nucleic acid where indel percentage is calculated as the fraction of sequencing reads containing insertions or deletions relative to an unedited reference sequence. In some embodiments, methods, systems, and compositions comprising an effector protein and guide nucleic acid described herein may exhibit about 0.0001% to about 65% or more indel activity upon contact to a target nucleic acid compared to a target nucleic acid non-contacted with compositions, systems, or by methods described herein. For example, methods, systems, and compositions comprising an effector protein and guide nucleic acid described herein may exhibit about 0.0001%, about 0.001%, about 0.01%, about 0.1%, about 1%, about 5%, about 10%, about 15%, about 20%, about 25%, about 30%, about 35%, about 40%, about 45%, about 50%, about 55%, about 60%, about 65% or more indel activity.

[0490] In some embodiments, editing of a target nucleic acid as described herein effects one or more mutations comprising splicing disruption mutations, frameshift mutations (e.g., 1+ or 2+frameshift mutation), sequence deletion, sequence skipping, sequence reframing, sequence knock-in, or any combination thereof. In some embodiments, the splicing disruption can be an editing that disrupts a splicing of a target nucleic acid or a splicing of a sequence that is transcribed from a target nucleic acid relative to a target nucleic acid without the splicing disruption. In some embodiments, the frameshift mutation can be an editing that alters the reading frame of a target nucleic acid relative to a target nucleic acid without the frameshift mutation. In some embodiments, the frameshift mutation can be a +2 frameshift mutation, wherein a reading frame is edited by 2 bases. In some embodiments, the frameshift mutation can be a +1 frameshift mutation, wherein a reading frame is edited by 1 base. In some embodiments, the frameshift mutation is an editing that alters the number of bases in a target nucleic acid so that it is not divisible by three. In some embodiments, the frameshift mutation can be an editing that is not a splicing disruption. In some embodiments a sequence as described in reference to the sequence deletion, sequence skipping, sequence reframing, and sequence knock-in can be a DNA sequence, a RNA sequence, an edited DNA or RNA sequence, a mutated sequence, a wild-type sequence, a coding sequence, a non-coding sequence, an exonic sequence (exon), an intronic sequence (intron), or any combination thereof. In some embodiments, the sequence deletion is an editing where one or more sequences in a target nucleic acid are deleted relative to a target nucleic acid without the sequence deletion. In some embodiments, the sequence deletion can result in or effect a splicing disruption or a frameshift mutation. In some embodiments, the sequence deletion result in or effect a splicing disruption. In some embodiments, the sequence skipping is an editing where one or more sequences in a target nucleic acid are skipped upon transcription or translation of the target nucleic acid relative to a target nucleic acid without the sequence skipping. In some embodiments, the sequence skipping can result in or effect a splicing disruption or a frameshift mutation. In some embodiments, the sequence skipping can result in or effect a splicing disruption. In some embodiments, the sequence reframing is an editing where one or more bases in a target are edited so that the reading frame of the sequence is reframed relative to a target nucleic acid without the sequence reframing. In some embodiments, the sequence reframing can result in or effect a splicing disruption or a frameshift mutation. In some embodiments, the sequence reframing can result in or effect a frameshift mutation. In some embodiments, the sequence knock-in is an editing where one or more sequences is inserted into a target nucleic acid relative to a target nucleic acid without the sequence knock-in. In some embodiments, the sequence knock-in can result in or effect a splicing disruption or a frameshift mutation. In some embodiments, the sequence knock-in can result in or effect a splicing disruption.

[0491] In some embodiments, editing of a target nucleic acid can be locus specific, wherein compositions, systems, and methods described herein can edit a target nucleic acid at one or more specific loci to effect one or more specific mutations comprising splicing disruption mutations, frameshift mutations, sequence deletion, sequence skipping, sequence reframing, sequence knock-in, or any combination thereof. For example, editing of a specific locus can affect any one of a splicing disruption, frameshift (e.g., 1+ or 2+ frameshift), sequence deletion, sequence skipping, sequence reframing, sequence knock-in, or any combination thereof. In some embodiments, editing of a target nucleic acid can be locus specific, modification specific, or both. In some embodiments, editing of a target nucleic acid can be locus specific, modification specific, or both, wherein compositions, systems, and methods described herein comprise an effector protein described herein and a guide nucleic acid described herein.

[0492] Methods of editing a target nucleic acid or modulating the expression of a target nucleic acid may be performed in vivo. Methods of editing a target nucleic acid or modulating the expression of a target nucleic acid may be performed in vitro. For example, a plasmid may be edited in vitro using a composition described herein and introduced into a cell or organism. Methods of editing a target nucleic acid or modulating the expression of a target nucleic acid may be performed ex vivo. For example, methods may comprise obtaining a cell from a subject, editing a target nucleic acid in the cell with methods described herein, and returning the cell to the subject.

[0493] In some embodiments, methods of modifying described herein comprise contacting a target nucleic acid with one or more components, compositions or systems described herein. In some embodiments, the one or more components, compositions or systems described herein comprise at least one of: a) one or more effector proteins, or one or more nucleic acids encoding one or more effector proteins; and b) one or more guide nucleic acids, or one or more nucleic acids encoding one or more guide nucleic acids. In some embodiments, the one or more effector proteins introduce a single-stranded break or a double-stranded break in the target nucleic acid.

[0494] In some embodiments, methods of modifying described herein comprise using one or more guide nucleic acids or uses thereof, wherein the methods modify a target nucleic acid at a single location. In some embodiments, the methods comprise contacting an RNP comprising an effector protein and a guide nucleic acid to the target nucleic acid. In some embodiments, the methods introduce a mutation (e.g., point mutations, deletions) in the target nucleic acid relative to a corresponding wildtype nucleotide sequence. In some embodiments, the methods remove or correct a disease-causing mutation in a nucleic acid sequence to produce a corresponding wildtype nucleotide sequence. In some embodiments, the methods remove/correct point mutations, deletions, null mutations, or tissue-specific mutations in a target nucleic acid. In some embodiments, the methods introduce a single stranded cleavage, a nick, a deletion of one or two nucleotides, an insertion of one or two nucleotides, a substitution of one or two nucleotides, an epigenetic modification (e.g., methylation, demethylation, acetylation, or deacetylation), or a combination thereof to the target nucleic acid. In some embodiments, the methods comprise using an effector protein and two guide nucleic acids, wherein two RNPs cleave the target nucleic acid at the same location, wherein a first RNP comprises the effector protein and a first guide nucleic acid, and wherein a second RNP comprises the effector protein and a second guide nucleic acid. In some embodiments, methods comprising using two effector protein and two guide nucleic acids, wherein both RNPs cleave the target nucleic acid at the same location, wherein a first RNP comprises a first effector protein and a first target nucleic acid, and wherein a second RNP comprises a second effector protein and a second target nucleic acid.

[0495] In some embodiments, methods of modifying described herein comprise using one or more guide nucleic acids or uses thereof, wherein the methods modify a target nucleic acid at two different locations. In some embodiments, the methods introduce two cleavage sites in the target nucleic acid, wherein a first cleavage site and a second cleavage site comprise one or more nucleotides therebetween. In some embodiments, the methods cause deletion of the one or more nucleotides. In some embodiments, the deletion restores a wild-type reading frame. In some embodiments, the wild-type reading frame produces at least a partially functional protein. In some embodiments, the deletion causes a non-wild-type reading frame. In some embodiments, a non-wild-type reading frame produces a partially functional protein or non-functional protein. In some embodiments, the at least partially functional protein has at least 50%, at least 60%, at least 70%, at least 80%, at least 90%, at least 100%, at least 110%, at least 120%, at least 130%, at least 140%, at least 150%, at least 180%, at least 200%, at least 300%, at least 400% activity compared to a corresponding wildtype protein. In some embodiments, the methods comprise using an effector protein and two guide nucleic acids, wherein two RNPs cleave the target nucleic acid at different locations, wherein a first RNP comprises the effector protein and a first guide nucleic acid, and wherein a second RNP comprises the effector protein and a second guide nucleic acid. In some embodiments, methods comprising using two effector protein and two guide nucleic acids, wherein both RNPs cleave the target nucleic acid at the same location, wherein a first RNP comprises a first effector protein and a first target nucleic acid, and wherein a second RNP comprises a second effector protein and a second target nucleic acid.

[0496] In some embodiments, methods of editing described herein comprise inserting a donor nucleic acid into a cleaved target nucleic acid. In some embodiments, the cleaved target nucleic acid formed by introducing a single-stranded break into a target nucleic acid. The donor nucleic acid may be inserted at a specified (e.g., effector protein targeted) point within the target nucleic acid. In some embodiments, the cleaved target nucleic acid is cleaved at a single location. In such embodiments, the methods comprise contacting a target nucleic acid with an effector protein described herein, thereby introducing a single-stranded break in the target nucleic acid; and contacting the target nucleic acid with a donor nucleic acid for homologous recombination, optionally by HDR or NHEJ, thereby introducing a new sequence into the target nucleic acid (e.g., at a cleavage site). In some embodiments, the cleaved target nucleic acid is cleaved at two locations. In such embodiments, the methods comprise contacting a target nucleic acid with an effector protein described herein, thereby introducing a single-stranded break in the target nucleic acid; contacting the target nucleic acid with a second effector protein described herein, to generate a second cleavage site in the target nucleic acid, ligating the regions flanking the first and second cleavage site, optionally through NHEJ or single-strand annealing, thereby resulting in the excision of a portion of the target nucleic acid between the first and second cleavage sites from the target nucleic acid; and contacting the target nucleic acid with a donor nucleic acid for homologous recombination, optionally by HDR or NHEJ, thereby introducing a new sequence into the target nucleic acid (e.g., in between two cleavage sites).

[0497] Provided herein are methods of modifying target nucleic acids or the expression thereof. In some embodiments, methods comprise editing a target nucleic acid. In general, editing refers to modifying the nucleobase sequence of a target nucleic acid. Also provided herein are methods of modulating the expression of a target nucleic acid. Fusion effector proteins and systems described herein may be used for such methods. Methods of editing a target nucleic acid may comprise one or more of cleaving the target nucleic acid, deleting one or more nucleotides of the target nucleic acid, inserting one or more nucleotides into the target nucleic acid, modifying one or more nucleotides of the target nucleic acid. Methods of modulating expression of target nucleic acids may comprise modifying the target nucleic acid or a protein associated with the target nucleic acid, e.g., a histone.

[0498] In some embodiments, methods of modifying a target nucleic acid comprise contacting a target nucleic acid with a composition described herein. In some embodiments, methods comprise contacting a target nucleic acid with an effector protein described herein. In some embodiments, methods comprise contacting a target nucleic acid with a fusion effector protein described herein. The effector protein may be an effector protein described herein, including catalytically inactive effector proteins. The effector protein may comprise an amino acid sequence that is at least 70%, at least 75%, at least 80%, at least 85%, at least 90%, at least 95%, at least 97%, at least 98%, at least 99% or 100% identical to a sequence selected from SEQ ID NOS: 1-10,484 or 15,022-24,165. In some embodiments, the amino acid sequence of the effector protein is at least 70%, at least 75%, at least 80%, at least 85%, at least 90%, at least 95%, at least 97%, at least 98%, at least 99% or 100% identical to a sequence selected from SEQ ID NOS: 1-10,484 or 15,022-24,165. In some embodiments, methods comprise contacting a target nucleic acid with an effector protein that is at least 90% identical to an effector protein sequence provide in TABLE 1, and a guide nucleic acid that is at least 90% identical to a corresponding guide nucleic from TABLE 1, wherein corresponding means the effector protein sequence and guide nucleic acid sequence are selected from the same column number (e.g., A1 and B1) and same row.

[0499] In some embodiments, methods comprise contacting a target nucleic acid with a donor nucleic acid. In some embodiments, composition described herein comprise a donor nucleic acid. Methods may comprise contacting a target nucleic acid, including but not limited to a cell comprising the target nucleic acid, with such compositions. In some embodiments, the donor nucleic acid is inserted at a site that has been cleaved by a composition disclosed herein. In some embodiments, the donor nucleic acid comprises a sequence that serves as a template in the process of homologous recombination. The sequence may carry one or more nucleobase modifications that are to be introduced into the target nucleic acid. By using this donor nucleic acid as a template, the genetic information, including the modification(s), is copied into the target nucleic acid by way of homologous recombination. In reference to a viral vector, the term donor nucleic acid refers to a sequence of nucleotides that will be or has been introduced into a cell following transfection of the viral vector. The donor nucleic acid may be introduced into the cell by any mechanism of the transfecting viral vector, including, but not limited to, integration into the genome of the cell or introduction of an episomal plasmid or viral genome.

[0500] In some embodiments, methods comprise base editing. In some embodiments, base editing comprises contacting a target nucleic acid with a fusion effector protein comprising an effector protein fused to a base editing enzyme, such as a deaminase, thereby changing a nucleobase of the target nucleic acid to an alternative nucleobase. In some embodiments, the nucleobase of the target nucleic acid is adenine (A) and the method comprises changing A to guanine (G). In some embodiments, the nucleobase of the target nucleic acid is cytosine (C) and the method comprises changing C to thymine (T). In some embodiments, the nucleobase of the target nucleic acid is C and the method comprises changing C to G. In some embodiments, the nucleobase of the target nucleic acid is A and the method comprises changing A to G.

[0501] In some embodiments, methods introduce a nucleobase change in a target nucleic acid relative to a corresponding wildtype or mutant nucleobase sequence. In some embodiments, methods remove or correct a disease-causing mutation in a nucleic acid sequence, e.g., to produce a corresponding wildtype nucleobase sequence. In some embodiments, methods remove/correct point mutations, deletions, null mutations, or tissue-specific mutations in a target nucleic acid. In some embodiments, methods generate gene knock-out, gene knock-in, gene editing, gene tagging, or a combination thereof. Methods of the disclosure may be targeted to a locus in a genome of a cell.

[0502] In some embodiments, methods of editing a target nucleic acid or modulating the expression of a target nucleic acid are performed in vivo. In some embodiments, methods of editing a target nucleic acid or modulating the expression of a target nucleic acid are performed in vitro. For example, a plasmid may be modified in vitro using a composition described herein and introduced into a cell or organism. In some embodiments, methods of editing a target nucleic acid or modulating the expression of a target nucleic acid are performed ex vivo. For example, methods may comprise obtaining a cell from a subject, modifying a target nucleic acid in the cell with methods and compositions described herein, and returning the cell to the subject. Methods of editing performed ex vivo may be particularly advantageous to produce CAR T-cells. In some embodiments, methods comprise editing a target nucleic acid or modulating the expression of the target nucleic acid in a cell or a subject. The cell may be a dividing cell. The cell may be a terminally differentiated cell. In some embodiments, the target nucleic acid is a gene.

[0503] Methods of editing a target nucleic acid or modulating the expression of a target nucleic acid described herein may be employed to generate a genetically modified cell. The cell may be a prokaryotic cell. The cell may be an archaeal cell. The cell may be a eukaryotic cell. The cell may be a mammalian cell. The cell may be a human cell. The cell may be a T cell. The cell may be a hematopoietic stem cell. The cell may be a bone marrow derived cell, a white blood cell, a blood cell progenitor, or a combination thereof. Generating a genetically modified cell may comprise contacting a target cell with an effector protein or a fusion effector protein described herein and a guide nucleic acid. Contacting may comprise electroporation, acoustic poration, optoporation, viral vector-based delivery, iTOP, nanoparticle delivery (e.g., lipid or gold nanoparticle delivery), cell-penetrating peptide (CPP) delivery, DNA nanostructure delivery, or any combination thereof. In some cases, the nanoparticle delivery comprises lipid nanoparticle delivery or gold nanoparticle delivery. In some cases, the nanoparticle delivery comprises lipid nanoparticle delivery. In some cases, the nanoparticle delivery comprises gold nanoparticle delivery.

[0504] Methods may comprise cell line engineering. Generally, cell line engineering comprises modifying a pre-existing cell (e.g., naturally-occurring or engineered) or pre-existing cell line to produce a novel cell line or modified cell line. In some embodiments, modifying the pre-existing cell or cell line comprises contacting the pre-existing cell or cell line with an effector protein or fusion effector protein described herein and a guide nucleic acid. The resulting modified cell line may be useful for production of a protein of interest. Non-limiting examples of cell lines includes: 132-d5 human fetal fibroblasts, 10.1 mouse fibroblasts, 293-T, 3T3, 3T3 Swiss, 3T3-L1, 721, 9L, A-549, A10, A172, A20, A253, A2780, A2780ADR, A2780cis, A375, A431, ALC, ARH-77, B16, B35, BALB/3T3 mouse embryo fibroblast, BC-3, BCP-1 cells, BEAS-2B, BHK-21, BR 293, BS-C-1 monkey kidney epithelial, Bcl-1, bEnd.3, BxPC3, C3H-10T1/2, C6/36, C8161, CCRF-CEM, CHO, CHO Dhfr-/-, CHO-7, CHO-IR, CHO-K1, CHO-K2, CHO-T, CIR, CML T1, CMT, COR-L23, COR-L23/5010, COR-L23/CPR, COR-L23/R23, COS, COS-1, COS-6, COS-7, COS-M6A, COV-434, CT26, CTLL-2, CV1, CaCo2, Cal-27, Calu1, D17, DH82, DLD2, DU145, DuCaP, EL4, EM2, EM3, EMT6/AR1, EMT6/AR10.0, FM3, H1299, H69, HASMC, HB54, HB55, HB56, HCA2, HEK-293, HEKa, HEKn, HL-60, HMEC, HT-29, HUVEC, HeLa, HeLa B, HeLa T4, HeLa-S3, Hep G2, Hepa1c1c7, Huh1, Huh4, Huh7, IC21, J45.01, J82, JY cells, Jurkat, Jurkat, K562 cells, KCL22, KG1, KYO1, Ku812, LNCap, LRMB, MC-38, MCF-10A, MCF-7, MDA-MB-231, MDA-MB-435, MDA-MB-468, MDCK II, MDCK II, MEF, mIMCD-3C8161, MOLT, MONO-MAC 6, MOR/0.2R, MRC5, MTD-1A, Ma-Mel 1-48, MiaPaCell, MyEnd, NALM-1, NCI-H69/CPR, NCI-H69/LX10, NCI-H69/LX20, NCI-H69/LX4, NHDF, NIH-3T3, NRK, NRK-52E, NW-145, OPCN/OPCT cell lines, P388D1, PC-3, PNT-1A/PNT 2, Panc1, Peer, RIN-5F, RMA/RMAS, RPTE, Rat6, Raw264.7, RenCa, SEM-K2, SK-UT, SKOV3, SW480, SW620, Saos-2 cells, Sf-9, SkBr3, T-47D, T2, T24, T84, TF1, THP1 cell line, TIB55, U373, U87, U937, VCaP, Vero cells, WEHI-231, WM39, WT-49, X63, YAC-1, and YAR.

### Donor Nucleic Acids

[0505] In some embodiments, a donor nucleic acid comprises a nucleic acid that is incorporated into a target nucleic acid or genome. In some embodiments, a donor nucleic acid comprises a sequence that is derived from a plant, bacteria, fungi, virus, or an animal. In some embodiments, the animal is a non-human animal, such as, by way of non-limiting example, a mouse, rat, hamster, rabbit, pig, bovine, deer, sheep, goat, chicken, cat, dog, ferret, a bird, non-human primate (e.g., marmoset, rhesus monkey). In some embodiments, the non-human animal is a domesticated mammal or an agricultural mammal. In some embodiments, the animal is a human. In some embodiments, the sequence comprises a human wild-type (WT) gene or a portion thereof. In some embodiments, the human WT gene or the portion thereof comprises a nucleotide sequence that is at least 70%, at least 80%, at least 90%, at least 92%, at least 95%, at least 97%, at least 99%, or 100% identical to an equal length portion of the WT sequence of any one of the genes recited in TABLE 3. In some embodiments, the donor nucleic acid is incorporated into an insertion site of a target nucleic acid.

[0506] In some embodiments, a donor nucleic acid of any suitable size is integrated into a target nucleic acid or a genome. In some embodiments, the donor nucleic acid integrated into the target nucleic acid or the genome is less than 3, about 3, 3.5, 4, 4.5, 5, 5.5, 6, 6.5, 7, 7.5, 8, 8.5, 9, 9.5, 10, 10.5, 11, 11.5, 12, 12.5, 13, 13.5, 14, 14.5, 15, 16, 17, 18, 19, 20, 25, 30, 35, 40, 45, 50, 100, 150, 200, 250, 300, 350, 400, 450, 500 kilobases in length. In some embodiments, the donor nucleic acid is more than 500 kilobases (kb) in length.

[0507] In some embodiments, a viral vector comprising a donor nucleic acid introduces the donor nucleic acid into a cell following transfection. In some embodiments, the donor nucleic acid is introduced into the cell by any mechanism of the transfecting viral vector, including, but not limited to, integration into the genome of the cell or introduction of an episomal plasmid or viral genome.

[0508] In some embodiments, an effector protein as described herein facilitates insertion of a donor nucleic acid at a site of cleavage or between two cleavage sites by cleaving (hydrolysis of a phosphodiester bond) of a nucleic acid resulting in a nick or double strand break-nuclease activity.

[0509] In some embodiments, a donor nucleic acid serves as a template in the process of homologous recombination, which may carry an alteration that is to be or has been introduced into a target nucleic acid. By using the donor nucleic acid as a template, the genetic information, including the alteration, is copied into the target nucleic acid by way of homologous recombination.

### Genetically Modified Cells and Organisms

[0510] Methods of editing described herein may be employed to generate a genetically modified cell. In some embodiments, the cell is a eukaryotic cell (e.g., a mammalian cell) or a prokaryotic cell (e.g., an archaeal cell). In some embodiments, the cell is derived from a multicellular organism and cultured as a unicellular entity. In some embodiments, the cell comprises a heritable genetic modification, such that progeny cells derived therefrom comprise the heritable genetic mutation. In some embodiments, the cell is progeny of a genetically modified cell comprising a genetic modification of the genetically modified parent cell. In some embodiments, the genetically modified cell comprises a deletion, insertion, mutation, or non-native sequence relative to a wild-type version of the cell or the organism from which the cell was derived.

[0511] Methods of editing described herein may be performed in a cell. In some embodiments, the cell is in vitro. In some embodiments, the cell is in vivo. In some embodiments, the cell is ex vivo. In some embodiments, the cell is an isolated cell. In some embodiments, the cell is inside of an organism. In some embodiments, the cell is an organism. In some embodiments, the cell is in a cell culture. In some embodiments, the cell is one of a collection of cells. In some embodiments, the cell is a mammalian cell or derived there from. In some embodiments, the cell is a rodent cell or derived there from. In some embodiments, the cell is a human cell or derived there from. In some embodiments, the cell is a eukaryotic cell or derived there from. In some embodiments, the cell is a progenitor cell or derived there from. In some embodiments, the cell is a pluripotent stem cell or derived there from. In some embodiments, the cell is an animal cell or derived there from. In some embodiments, the cell is an invertebrate cell or derived there from. In some embodiments, the cell is a vertebrate cell or derived there from. In some embodiments, the cell is from a specific organ or tissue. In some embodiments, the cell is a hepatocyte. In some embodiments, the tissue is a subject's blood, bone marrow, or cord blood. In some embodiments, the tissue is a heterologous donor blood, cord blood, or bone marrow. In some embodiments, the tissue is an allogenic blood, cord blood, or bone marrow. In some embodiments, the tissue may be muscle. In some embodiments, the muscle may be a skeletal muscle. In some embodiments, skeletal muscles include the following: abductor digiti minimi (foot), abductor digiti minimi (hand), abductor hallucis, abductor pollicis brevis, abductor pollicis longus, adductor brevis, adductor hallucis, adductor longus, adductor magnus, adductor pollicis, anconeus, articularis cubiti, articularis genu, aryepiglotticus, auricularis, biceps brachii, biceps femoris, brachialis, brachioradialis, buccinator, bulbospongiosus, constrictor of pharynx-inferior, constrictor of pharynx-middle, constrictor of pharynx-superior, coracobrachialis, corrugator supercilii, cremaster, cricothyroid, dartos, deep transverse perinei, deltoid, depressor anguli oris, depressor labii inferioris, diaphragm, digastric, digastric (anterior view), erector spinae—spinalis, erector spinae—iliocostalis, erector spinae—longissimus, extensor carpi radialis brevis, extensor carpi radialis longus, extensor carpi ulnaris, extensor digiti minimi (hand), extensor digitorum (hand), extensor digitorum brevis (foot), extensor digitorum longus (foot), extensor hallucis brevis, extensor hallucis longus, extensor indicis, extensor pollicis brevis, extensor pollicis longus, external oblique abdominis, flexor carpi radialis, flexor carpi ulnaris, flexor digiti minimi brevis (foot), flexor digiti minimi brevis (hand), flexor digitorum brevis, flexor digitorum longus (foot), flexor digitorum profundus, flexor digitorum superficialis, flexor hallucis brevis, flexor hallucis longus, flexor pollicis brevis, flexor pollicis longus, frontalis, gastrocnemius, gemellus inferior, gemellus superior, genioglossus, geniohyoid, gluteus maximus, gluteus medius, gluteus minimus, gracilis, hyoglossus, iliacus, inferior oblique, inferior rectus, infraspinatus, intercostals external, intercostals innermost, intercostals internal, internal oblique abdominis, interossei-dorsal of hand, interossei-dorsal of foot, interossei-palmar of hand, interossei—plantar of foot, interspinales, intertransversarii, intrinsic muscles of tongue, ishiocavernosus, lateral cricoarytenoid, lateral pterygoid, lateral rectus, latissimus dorsi, levator anguli oris, levator ani-coccygeus, levator ani-iliococcygeus, levator ani-pubococcygeus, levator ani-puborectalis, levator ani-pubovaginalis, levator labii superioris, levator labii superioris, alaeque nasi, levator palpebrae superioris, levator scapulae, levator veli palatini, levatores costarum, longus capitis, longus colli, lumbricals of foot, lumbricals of hand, masseter, medial pterygoid, medial rectus, mentalis, m. uvulae, mylohyoid, nasalis, oblique arytenoid, obliquus capitis inferior, obliquus capitis superior, obturator externus, obturator internus (A), obturator internus (B), omohyoid, opponens digiti minimi (hand), opponens pollicis, orbicularis oculi, orbicularis oris, palatoglossus, palatopharyngeus, palmaris brevis, palmaris longus, pectineus, pectoralis major, pectoralis minor, peroneus brevis, peroneus longus, peroneus tertius, piriformis (A), piriformis (B), plantaris, platysma, popliteus, posterior cricoarytenoid, procerus, pronator quadratus, pronator teres, psoas major, psoas minor, pyramidalis, quadratus femoris, quadratus lumborum, quadratus plantae, rectus abdominis, rectus capitus anterior, rectus capitus lateralis, rectus capitus posterior major, rectus capitus posterior minor, rectus femoris, rhomboid major, rhomboid minor, risorius, salpingopharyngeus, sartorius, scalenus anterior, scalenus medius, scalenus minimus, scalenus posterior, semimembranosus, semitendinosus, serratus anterior, serratus posterior inferior, serratus posterior superior, soleus, sphincter ani, sphincter urethrae, splenius capitis, splenius cervicis, stapedius, sternocleidomastoideohyoid, sternothyroid, styloglossus, stylohyoid, stylohyoid (anterior view), stylopharyngeus, subclavius, subcostalis, subscapularis, superficial transverse perinei, superior oblique, superior rectus, supinator, supraspinatus, temporalis, temporoparietalis, tensor fasciae lata, tensor tympani, tensor veli palatini, teres major, teres minor, thyro-arytenoid & vocalis, thyro-epiglotticus, thyrohyoid, tibialis anterior, tibialis posterior, transverse arytenoid, transversospinalis-multifidus, transversospinalis-rotatores, transversospinalis-semispinalis, transversus abdominis, transversus thoracis, trapezius, triceps, vastus intermedius, vastus lateralis, vastus medialis, zygomaticus major, or zygomaticus minor. In some embodiments, the cell is a myocyte. In some embodiments, the cell is a muscle cell. In some embodiments, the muscle cell is a skeletal muscle cell. In some embodiments, the skeletal muscle cell is a red (slow) skeletal muscle cell, a white (fast) skeletal muscle cell or an intermediate skeletal muscle cell.

[0512] Methods of editing described herein may comprise contacting cells with compositions or systems described herein. In some embodiments, the contacting comprises

[0513] Methods of editing described herein may be performed in a subject. In some embodiments, the methods comprise administering compositions described herein to the subject. In some embodiments, the subject is a human. In some embodiments, the subject is a mammal (e.g., rat, mouse, cow, dog, pig, sheep, horse). In some embodiments, the subject is a vertebrate or an invertebrate. In some embodiments, the subject is a laboratory animal. In some embodiments, the subject is a patient. In some embodiments, the subject is at risk of developing, suffering from, or displaying symptoms of a disease. In some embodiments, the subject may have a mutation associated with a gene described herein. In some embodiments, the subject may display symptoms associated with a mutation of a gene described herein.

[0514] In some aspects, disclosed herein are modified cells or populations of modified cells, wherein the modified cell comprises an effector protein described herein, a nucleic acid encoding an effector protein described herein, or a combination thereof. In some embodiments, the modified cell comprises a fusion effector protein described herein, a nucleic acid encoding an effector protein described herein, or a combination thereof. In some embodiments, the modified cell is a modified prokaryotic cell. In some embodiments, the modified cell is a modified eukaryotic cell. A modified cell may be a modified fungal cell. In some embodiments, the modified cell is a modified vertebrate cell. In some embodiments, the modified cell is a modified invertebrate cell. In some embodiments, the modified cell is a modified mammalian cell. In some embodiments, the modified cell is a modified human cell. In some embodiments, the modified cell is in a subject. A modified cell may be in vitro. A modified cell may be in vivo. A modified cell may be ex vivo. A modified cell may be a cell in a cell culture. A modified cell may be a cell obtained from a biological fluid, organ or tissue of a subject and modified with a composition and/or method described herein. Non-limiting examples of biological fluids are blood, plasma, serum, and cerebrospinal fluid. Non-limiting examples of tissues and organs are bone marrow, adipose tissue, skeletal muscle, smooth muscle, spleen, thymus, brain, lymph node, adrenal gland, prostate gland, intestine, colon, liver, kidney, pancreas, heart, lung, bladder, ovary, uterus, breast, and testes. Non-limiting examples of cells that may be obtained from a subject are hepatocytes, epithelial cells, endothelial cells, neurons, cardiomyocytes, muscle cells and adipocytes. Non-limiting examples of cells that may be modified with compositions and methods described herein include immune cells, such as CAR T-cells, T-cells, B-cells, NK cells, granulocytes, basophils, eosinophils, neutrophils, mast cells, monocytes, macrophages, dendritic cells, microglia, Kuppfer cells, antigen-presenting cells (APC), or adaptive cells.

[0515] Non-limiting examples of cells that may be engineered or modified with compositions and methods described herein include stem cells, such as human stem cells, animal stem cells, stem cells that are not derived from human embryonic stem cells, embryonic stem cells, mesenchymal stem cells, pluripotent stem cells, induced pluripotent stem cells (iPS), somatic stem cells, adult stem cells, hematopoietic stem cells, tissue-specific stem cells. A cell may be a pluripotent cell.

[0516] Non-limiting examples of cells that may be engineered or modified with compositions and methods described herein include include plant cells, such as parenchyma, sclerenchyma, collenchyma, xylem, phloem, germline (e.g., pollen). Cells from lycophytes, ferns, gymnosperms, angiosperms, bryophytes, charophytes, chlorophytes, rhodophytes, or glaucophytes.

### XIII. Methods of Detecting a Target Nucleic Acid

[0517] Provided herein are methods of detecting target nucleic acids. In some embodiments, the methods comprise detecting a target nucleic acid with compositions or systems described herein. In some embodiments, the methods of detecting a target nucleic acid comprising: a) contacting the target nucleic acid with a composition comprising an effector protein as described herein, a guide nucleic acid as described herein, and a reporter nucleic acid that is cleaved in the presence of the effector protein, the guide nucleic acid, and the target nucleic acid; and b) detecting a signal produced by cleavage of the reporter nucleic acid, thereby detecting the target nucleic acid in the sample. In some embodiments, the methods result in cis cleavage of the reporter nucleic acid. In some embodiments, the reporter nucleic acid is a single stranded nucleic acid. In some embodiments, the reporter comprises a detection moiety. In some embodiments, the reporter nucleic acid is capable of being cleaved by the effector protein. In some embodiments, a cleaved reporter nucleic acid generates a first detectable signal. In some embodiments, the first detectable signal is a change in color. In some embodiments, the change is color is measured indicating presence of the target nucleic acid. In some embodiments, the first detectable signal is measured on a support medium.

[0518] In some embodiments, methods of detecting comprise contacting a target nucleic acid, a cell comprising the target nucleic acid, or a sample comprising a target nucleic acid with an effector protein that comprises an amino acid sequence that is at least is at least 70%, at least 75%, at least 80%, at least 85%, at least 90%, at least 92%, at least 95%, at least 97%, at least 98%, at least 99%, or 100% identical to any one of SEQ ID NOS: 1-10,484 or 15,022-24, 165. In some embodiments, the amino acid sequence of the effector protein is at least 70%, at least 75%, at least 80%, at least 85%, at least 90%, at least 92%, at least 95%, at least 97%, at least 98%, at least 99%, or 100% identical to any one of SEQ ID NOS: 1-10,484 or 15,022-24,165.

[0519] In some embodiments, the methods comprise contacting the sample to a composition as described herein; and assaying for a signal indicating cleavage of at least some protein-nucleic acids of a population of protein-nucleic acids, wherein the signal indicates a presence of the target nucleic acid in the sample and wherein absence of the signal indicates an absence of the target nucleic acid in the sample.

[0520] In some embodiments, methods comprise contacting the sample comprising the target nucleic acid with a guide nucleic acid targeting a target nucleic acid segment, an effector protein capable of being activated when complexed with the guide nucleic acid and the target nucleic acid segment, a single stranded nucleic acid of a reporter comprising a detection moiety, wherein the nucleic acid of a reporter is capable of being cleaved by the activated effector protein, thereby generating a first detectable signal, cleaving the single stranded nucleic acid of a reporter using the effector protein that cleaves as measured by a change in color, and measuring the first detectable signal on the support medium.

[0521] Methods may comprise contacting a sample or a cell with a composition described herein at a temperature of at least about 25° C., at least about 30° C., at least about 35° C., at least about 40° C., at least about 50° C., or at least about 65° C. In some embodiments, the temperature is not greater than 80° C. In some embodiments, the temperature is about 25° C., about 30° C., about 35° C., about 40° C., about 45° C., about 50° C., about 55° C., about 60° C., about 65° C., or about 70° C. In some embodiments, the temperature is about 25° C. to about 45° C., about 35° C. to about 55° C., or about 55° C. to about 65° C.

[0522] In some embodiments, methods of detecting a target nucleic acid are by a cleavage assay. In some embodiments, the target nucleic acid is a single-stranded target nucleic acid. In some embodiments, the cleavage assay comprises: a) contacting the target nucleic acid with a composition comprising an effector protein as described; and b) cleaving the target nucleic acid. In some embodiments, the cleavage assay comprises an assay designed to visualize, quantitate or identify cleavage of a nucleic acid. In some embodiments, the method is an in vitro trans-cleavage assay. In some embodiments, a cleavage activity is a trans-cleavage activity. In some embodiments, the method is an in vitro cis-cleavage assay. In some embodiments, a cleavage activity is a cis-cleavage activity. In some embodiments, the cleavage assay follows a procedure comprising: (i) providing a composition comprising an equimolar amounts of an effector protein as described herein, and a guide nucleic acid described herein, under conditions to form an RNP complex; (ii) adding a plasmid comprising a target nucleic acid, wherein the target nucleic acid is a linear dsDNA, wherein the target nucleic acid comprises a target sequence and a PAM (iii) incubating the mixture under conditions to enable cleavage of the plasmid; (iv) quenching the reaction with EDTA and a protease; and (v) analyzing the reaction products (e.g., viewing the cleaved and uncleaved linear dsDNA with gel electrophoresis).

[0523] In some embodiments, methods are not capable of detecting target nucleic acids that are present in a sample or solution at a concentration less than or equal to 10 nM. The term “threshold of detection” is used herein to describe the minimal amount of target nucleic acid that must be present in the sample in order for detection to occur. For example, in some embodiments, when a threshold of detection is 10 nM, then a signal can be detected when a target nucleic acid is present in the sample at a concentration of 10 nM or more. In such embodiments, the methods are not capable of detecting target nucleic acids that are present in a sample at a concentration less than 10 nM. In some embodiments, the threshold is less than or equal to 5 nM, 1 nM, 0.5 nM, 0.1 nM, 0.05 nM, 0.01 nM, 0.005 nM, 0.001 nM, 0.0005 nM, 0.0001 nM, 0.00005 nM, 0.00001 nM, 10 pM, 1 pM, 500 fM, 250 fM, 100 fM, 50 fM, 10 fM, 5 fM, 1 fM, 500 attomole (aM), 100 aM, 50 aM, 10 aM, or 1 aM. In some embodiments, the threshold is in a range of from 1 aM to 1 nM, 1 aM to 500 pM, 1 aM to 200 pM, 1 aM to 100 pM, 1 aM to 10 PM, 1 aM to 1 pM, 1 aM to 500 fM, 1 aM to 100 fM, 1 aM to 1 fM, 1 aM to 500 aM, 1 aM to 100 aM, 1 aM to 50 aM, 1 aM to 10 aM, 10 aM to 1 nM, 10 aM to 500 pM, 10 aM to 200 pM, 10 aM to 100 pM, 10 aM to pM, 10 aM to 1 pM, 10 aM to 500 fM, 10 aM to 100 fM, 10 aM to 1 fM, 10 aM to 500 aM, 10 aM to 100 aM, 10 aM to 50 aM, 100 aM to 1 nM, 100 aM to 500 pM, 100 pM to 200 pM, 100 aM to 100 pM, 100 aM to 10 pM, 100 aM to 1 pM, 100 aM to 500 fM, 100 aM to 100 fM, 100 aM to 1 fM, 100 aM to 500 aM, 500 aM to 1 nM, 500 aM to 500 pM, 500 aM to 200 pM, 500 aM to 100 pM, 500 aM to 10 pM, 500 aM to 1 pM, 500 aM to 500 fM, 500 aM to 100 fM, 500 aM to 1 fM, 1 fM to 1 nM, 1 fM to 500 pM, 1 fM to 200 pM, 1 fM to 100 pM, 1 fM to 10 pM, 1 fM to 1 pM, 10 fM to 1 nM, 10 fM to 500 pM, 10 fM to 200 pM, 10 fM to 100 pM, 10 fM to 10 pM, 10 fM to 1 pM, 500 fM to 1 nM, 500 fM to 500 pM, 500 fM to 200 pM, 500 fM to 100 pM, 500 fM to 10 pM, 500 fM to 1 pM, 800 fM to 1 nM, 800 fM to 500 pM, 800 fM to 200 pM, 800 fM to 100 pM, 800 fM to 10 pM, 800 fM to 1 pM, 1 pM to 1 nM, 1 pM to 500 pM, 1 pM to 200 pM, 1 pM to 100 pM, or 1 pM to 10 pM. In some embodiments, the threshold of detection in a range of from 800 fM to 100 pM, 1 pM to 10 pM, 10 fM to 500 fM, 10 fM to 50 fM, 50 fM to 100 fM, 100 fM to 250 fM, or 250 fM to 500 fM. In some embodiments, the threshold is in a range of from 2 aM to 100 pM, from 20 aM to 50 pM, from 50 aM to 20 pM, from 200 aM to 5 PM, or from 500 aM to 2 pM.

[0524] In some embodiments, a minimum concentration at which the methods detect a target nucleic acid a sample is in a range of from 1 aM to 1 nM, 10 aM to 1 nM, 100 aM to 1 nM, 500 aM to 1 nM, 1 fM to 1 nM, 1 fM to 500 pM, 1 fM to 200 pM, 1 fM to 100 pM, 1 fM to 10 pM, 1 fM to 1 pM, 10 fM to 1 nM, 10 fM to 500 pM, 10 fM to 200 pM, 10 fM to 100 pM, 10 fM to 10 pM, 10 fM to 1 pM, 500 fM to 1 nM, 500 fM to 500 pM, 500 fM to 200 pM, 500 fM to 100 pM, 500 fM to 10 pM, 500 fM to 1 pM, 800 fM to 1 nM, 800 fM to 500 pM, 800 fM to 200 pM, 800 fM to 100 pM, 800 fM to 10 pM, 800 fM to 1 pM, 1 pM to 1 nM, 1 pM to 500 pM, from 1 pM to 200 pM, 1 pM to 100 pM, or 1 pM to 10 pM. In some embodiments, a minimum concentration at which the methods detect in a sample is in a range of from 2 aM to 100 pM, from 20 aM to 50 pM, from 50 aM to 20 pM, from 200 aM to 5 PM, or from 500 aM to 2 pM. In some embodiments, a minimum concentration at which the methods detect a single stranded target nucleic acid in a sample is in a range of from 1 aM to 100 pM. In some embodiments, a minimum concentration at which the methods detect a target nucleic acid in a sample is in a range of from 1 fM to 100 pM. In some embodiments, a minimum concentration at which the methods detect a single stranded target nucleic acid in a sample is in a range of from 10 fM to 100 pM.

[0525] In some embodiments, a minimum concentration at which the methods detect a single stranded target nucleic acid in a sample is in a range of from 800 fM to 100 pM. In some embodiments, a minimum concentration at which the methods detect a single stranded target nucleic acid in a sample is in a range of from 1 pM to 10 pM. In some embodiments, the devices, systems, fluidic devices, kits, and methods described herein detect a single stranded target nucleic acid in a sample comprising a plurality of nucleic acids such as a plurality of non-target nucleic acids, where the target single-stranded nucleic acid is present at a concentration as low as 1 aM, 10 aM, 100 aM, 500 aM, 1 fM, 10 fM, 500 fM, 800 fM, 1 pM, 10 pM, 100 pM, or 1 pM.

[0526] In some embodiments, a minimum concentration at which the methods detect a target nucleic acid at a concentration of about 10 nM, about 20 nM, about 30 nM, about 40 nM, about 50 nM, about 60 nM, about 70 nM, about 80 nM, about 90 nM, about 100 nM, about 200 nM, about 300 nM, about 400 nM, about 500 nM, about 600 nM, about 700 nM, about 800 nM, about 900 nM, about 1 μM, about 10 μM, or about 100 μM. In some embodiments, a minimum concentration at which the methods detect a target nucleic acid at a concentration of from 10 nM to 20 nM, from 20 nM to 30 nM, from 30 nM to 40 nM, from 40 nM to 50 nM, from 50 nM to 60 nM, from 60 nM to 70 nM, from 70 nM to 80 nM, from 80 nM to 90 nM, from 90 nM to 100 nM, from 100 nM to 200 nM, from 200 nM to 300 nM, from 300 nM to 400 nM, from 400 nM to 500 nM, from 500 nM to 600 nM, from 600 nM to 700 nM, from 700 nM to 800 nM, from 800 nM to 900 nM, from 900 nM to 1 pM, from 1 μM to 10 μM, from 10 μM to 100 pM, from 10 nM to 100 nM, from 10 nM to 1 μM, from 10 nM to 10 UM, from 10 nM to 100 μM, from 100 nM to 1 μM, from 100 nM to 10 pM, from 100 nM to 100 μM, or from 1 μM to 100 μM. In some embodiments, a minimum concentration at which the methods detect a target nucleic acid at a concentration of from 20 nM to 5 μM, from 50 nM to 20 μM, or from 200 nM to 5 μM.

[0527] In some embodiments, methods detect a target nucleic acid in less than 60 minutes. In some embodiments, methods detect a target nucleic acid in less than about 120 minutes, less than about 110 minutes, less than about 100 minutes, less than about 90 minutes, less than about 80 minutes, less than about 70 minutes, less than about 60 minutes, less than about 55 minutes, less than about 50 minutes, less than about 45 minutes, less than about 40 minutes, less than about 35 minutes, less than about 30 minutes, less than about 25 minutes, less than about 20 minutes, less than about 15 minutes, less than about 10 minutes, less than about 5 minutes, less than about 4 minutes, less than about 3 minutes, less than about 2 minutes, or less than about 1 minute.

[0528] In some embodiments, methods require at least about 120 minutes, at least about 110 minutes, at least about 100 minutes, at least about 90 minutes, at least about 80 minutes, at least about 70 minutes, at least about 60 minutes, at least about 55 minutes, at least about 50 minutes, at least about 45 minutes, at least about 40 minutes, at least about 35 minutes, at least about 30 minutes, at least about 25 minutes, at least about 20 minutes, at least about 15 minutes, at least about 10 minutes, or at least about 5 minutes to detect a target nucleic acid. In some embodiments, the sample is contacted with the reagents for from 5 minutes to 120 minutes, from 5 minutes to 100 minutes, from 10 minutes to 90 minutes, from 15 minutes to 45 minutes, or from 20 minutes to 35 minutes.

[0529] In some embodiments, methods of detecting are performed in less than 10 hours, less than 9 hours, less than 8 hours, less than 7 hours, less than 6 hours, less than 5 hours, less than 4 hours, less than 3 hours, less than 2 hours, less than 1 hour, less than 50 minutes, less than 45 minutes, less than 40 minutes, less than 35 minutes, less than 30 minutes, less than 25 minutes, less than 20 minutes, less than 15 minutes, less than 10 minutes, less than 9 minutes, less than 8 minutes, less than 7 minutes, less than 6 minutes, or less than 5 minutes. In some embodiments, methods of detecting are performed in about 5 minutes to about 10 hours, about 10 minutes to about 8 hours, about 15 minutes to about 6 hours, about 20 minutes to about 5 hours, about 30 minutes to about 2 hours, or about 45 minutes to about 1 hour.

[0530] In some embodiments, methods comprise detection of a detectable signal. In some embodiments, the detection occurs within 5 minutes of contacting a sample and/or a target nucleic acid with a composition described herein. In some embodiments, the detection occurs within 1, 2, 3, 4, 5, 6, 7, 8, 9, 10, 11, 12, 13, 14, 15, 20, 25, 30, 35, 40, 45, 50, 55, 60, 70, 80, 90, 100, 110, or 120 minutes of contacting the target nucleic acid. In some embodiments, the detection occurs within 1 to 120, 5 to 100, 10 to 90, 15 to 80, 20 to 60, or 30 to 45 minutes of contacting the target nucleic acid.

### Amplification

[0531] In some embodiments, methods of detecting comprise amplifying a target nucleic acid for detection using any of the compositions or systems described herein. Amplifying may comprise changing the temperature of the amplification reaction, also known as thermal amplification (e.g., PCR). Amplifying may be performed at essentially one temperature, also known as isothermal amplification. Amplifying may improve at least one of sensitivity, specificity, or accuracy of the detection of the target nucleic acid.

[0532] In some embodiments, amplifying comprises subjecting a target nucleic acid to an amplification reaction selected from transcription mediated amplification (TMA), helicase dependent amplification (HDA), or circular helicase dependent amplification (cHDA), strand displacement amplification (SDA), recombinase polymerase amplification (RPA), loop mediated amplification (LAMP), exponential amplification reaction (EXPAR), rolling circle amplification (RCA), ligase chain reaction (LCR), simple method amplifying RNA targets (SMART), single primer isothermal amplification (SPIA), multiple displacement amplification (MDA), nucleic acid sequence based amplification (NASBA), hinge-initiated primer-dependent amplification of nucleic acids (HIP), nicking enzyme amplification reaction (NEAR), and improved multiple displacement amplification (IMDA).

[0533] In some embodiments, amplification of the target nucleic acid comprises modifying the sequence of the target nucleic acid. For example, in some embodiments, the methods are used for inserting a PAM sequence into a target nucleic acid that lacks a PAM sequence. In some embodiments, the methods are used for increasing the homogeneity of a target nucleic acid in a sample. For example, in some embodiments, the methods are used for removing a nucleic acid variation that is not of interest in the target nucleic acid.

[0534] In some embodiments, methods of amplifying a nucleic acid takes 1, 2, 3, 4, 5, 6, 7, 8, 9, 10, 11, 12, 13, 14, 15, 16, 17, 18, 19, 20, 25, 30, 40, 50, or 60 minutes. In some embodiments, the methods performed at a temperature of around 20-45° C. In some embodiments, the methods are performed at a temperature of less than about 20° C., less than about 25° C., less than about 30° C., less than about 35° C., less than about 37° C., less than about 40° C., or less than about 45° C. In some embodiments, the methods are performed at a temperature of at least about 20° C., at least about 25° C., at least about 30° C., at least about 35° C., at least about 37° C., at least about 40° C., or at least about 45° C.

### XIV. Methods of Treating a Disorder

[0535] Described herein are methods for treating a disease in a subject by editing a target nucleic acid associated with a gene or expression of a gene related to the disease. In some embodiments, the methods comprise methods of editing nucleic acid described herein.

[0536] In some embodiments, methods for treating a disease in a subject comprises administration of a composition(s) or component(s) of a system described herein. In some embodiments, the composition(s) or component(s) of the system comprises use of a recombinant nucleic acid (DNA or RNA), administered for the purpose to edit a nucleic acid. In some embodiments, the composition or component of the system comprises use of a vector to introduce a functional gene or transgene. In some embodiments, vectors comprise nonviral vectors, including cationic polymers, cationic lipids, or bio-responsive polymers. In some embodiments, the bio-responsive polymer exploits chemical-physical properties of the endosomal environment (e.g., pH) to preferentially release the genetic material in the intracellular space. In some embodiments, vectors comprise viral vectors, including retroviruses, adenoviruses, adeno-associated viruses, and herpes simplex viruses. In some embodiments, the vector comprises a replication-defective viral vector, comprising an insertion of a therapeutic gene inserted in genes essential to the lytic cycle, preventing the virus from replicating and exerting cytotoxic effects. Methods of gene therapy that are applicable to the compositions and systems described herein are described in more detail in Ingusci et al., “Gene Therapy Tools for Brain Diseases”, Front. Pharmacol. 10:724 (2019), which is hereby incorporated by reference in its entirety.

[0537] In some embodiments, treating, preventing, or inhibiting disease or disorder in a subject may comprise contacting a target nucleic acid associated with a particular ailment with a composition described herein. In some aspects, the methods of treating, preventing, or inhibiting a disease or disorder may involve removing, editing, modifying, replacing, transposing, or affecting the regulation of a genomic sequence of a patient in need thereof. In some embodiments, the methods of treating, preventing, or inhibiting a disease or disorder may involve modulating gene expression.

[0538] Described herein are compositions and methods for treating a disease in a subject by editing a target nucleic acid associated with a gene or expression of a gene related to the disease. In some embodiments, methods comprise administering a composition or cell described herein to a subject. By way of non-limiting example, the disease may be a cancer, an ophthalmological disorder, a neurological disorder, a neurodegenerative disease, a blood disorder, or a metabolic disorder, or a combination thereof. The disease may be an inherited disorder, also referred to as a genetic disorder. The disease may be the result of an infection or associated with an infection.

[0539] The compositions and methods described herein may be used to treat, prevent, or inhibit a disease or syndrome in a subject. In some embodiments, the disease is a genetic disease. The term “genetic disease” refers to a disease, disorder, condition, or syndrome associated with or caused by one or more mutations in the DNA of an organism having genetic disease. In some embodiments, the disease is a liver disease, a lung disease, an eye disease, or a muscle disease. Exemplary diseases and syndromes include but are not limited to the diseases and syndromes listed in TABLE 4.

TABLE 4
EXEMPLARY DISEASES
Exemplary Diseases and Syndromes

11-hydroxylase deficiency; 17,20-desmolase deficiency; 17-hydroxylase deficiency; 3-
hydroxyisobutyrate aciduria; 3-hydroxysteroid dehydrogenase deficiency; 46,XY gonadal dysgenesis;
AAA syndrome; ABCA3 deficiency; ABCC8-associated hyperinsulinism; aceruloplasminemia;
acromegaly; achondrogenesis type 2; acral peeling skin syndrome; acrodermatitis enteropathica;
adrenocortical micronodular hyperplasia; adrenoleukodystrophies; adrenomyeloneuropathies; Aicardi-
Goutieres syndrome; Alagille disease (also called Alagille Syndrome); Alexander Disease; Alpers
syndrome; alpha-1 antitrypsin deficiency (AATD); alpha-mannosidosis; Alstrom syndrome;
Alzheimer's disease; amebic dysentery; amelogenesis imperfecta; amish type microcephaly;
amyotrophic lateral sclerosis (ALS); anaplastic large cell lymphoma; anauxetic dysplasia; androgen
insensitivity syndrome; angiopathic thrombosis; antiphospholipid syndrome; Antley-Bixler syndrome;
APECED; Apert syndrome; aplasia of lacrimal and salivary glands; arginase-1 deficiency;
argininosuccinic aciduria; argininemia; arrhythmogenic right ventricular dysplasia; Arts syndrome;
ARVD2; arylsulfatase deficiency type metachromatic leukodystrophy; ataxia telangiectasia;
atherosclerotic cardiovascular disease; autoimmune lymphoproliferative syndrome; autoimmune
polyglandular syndrome type 1; autosomal dominant anhidrotic ectodermal dysplasia; autosomal
dominant deafness; autosomal dominant polycystic kidney disease; autosomal recessive microtia;
autosomal recessive renal glucosuria; autosomal visceral heterotaxy; babesiosis; balantidial dysentery;
Bardet-Biedl syndrome; Bartter syndrome; basal cell nevus syndrome; Batten disease; benign recurrent
intrahepatic cholestasis; beta-mannosidosis; β-thalassemia; Bethlem myopathy; Blackfan-Diamond
anemia; bleeding disorder (coagulation); blepharophimosis; Byler disease; C syndrome; CADASIL;
calcific aortic stenosis; calcification of joints and arteries; carbamoyl phosphate synthetase I deficiency;
cardiofaciocutaneous syndrome; Carney triad; carnitine palmitoyltransferase deficiencies; cartilage-hair
hypoplasia; cblC type of combined methylmalonic aciduria; CD18 deficiency; CD3Z-associated
primary T-cell immunodeficiency; CD40L deficiency; CDAGS syndrome; CDG1A; CDG1B;
CDG1M; CDG2C; CEDNIK syndrome; central core disease; centronuclear myopathy; cerebral
capillary malformation; cerebrooculofacioskeletal syndrome type 4; cerebrooculogacioskeletal
syndrome; cerebrotendinous xanthomatosis; Chaga's Disease; Charcot Marie Tooth Disesase;
cherubism; CHILD syndrome; chronic granulomatous disease; chronic recurrent multifocal
osteomyelitis; cirrhosis; citrin deficiency; citrullinemia type I; citrullinemia type II; classic
hemochromatosis; CNPPB syndrome; cobalamin C disease; Cockayne syndrome; coenzyme Q10
deficiency; Coffin-Lowry syndrome; Cohen syndrome; combined deficiency of coagulation factors V;
common variable immune deficiency 3; complement hyperactivation; complete androgen insentivity;
cone rod dystrophies; conformational diseases; congenital adrenal hyperplasia; congenital bile adid
synthesis defect type 1; congenital bile adid synthesis defect type 2; congenital defect in bile acid
synthesis type; congenital erythropoietic porphyria; congenital generalized osteosclerosis; Congenital
muscular dystrophy; Cornelia de Lange syndrome; coronary heart disease; Cousin syndrome; Cowden
disease; COX deficiency; Cri du chat syndrome; Crigler-Najjar disease; Crigler-Najjar syndrome type
1; Crisponi syndrome; Crouzon syndrome; Currarino syndrome; Curth-Macklin type ichthyosis hystrix;
cutis laxa; cystic fibrosis; cystinosis; d-2-hydroxyglutaric aciduria; DDP syndrome; Dejerine-Sottas
disease; Denys-Drash syndrome; Dercum disease; desmin cardiomyopathy; desmin myopathy;
DGUOK-associated mitochondrial DNA depletion; diabetes Type I; diabetes Type II; disorders of
glutamate metabolism; distal spinal muscular atrophy type 5; DNA repair diseases; dominant optic
atrophy; Doyne honeycomb retinal dystrophy; Dravet Syndrome; Duchenne muscular dystrophy;
dyskeratosis congenita; Ehlers-Danlos syndrome type 4; Ehlers-Danlos syndromes; Elejalde disease;
Ellis-van Creveld disease; Emery-Dreifuss muscular dystrophies; encephalomyopathic mtDNA
depletion syndrome; encephalitis; enzymatic diseases; EPCAM-associated congenital tufting
enteropathy; epidermolysis bullosa with pyloric atresia; epilepsy; fabry disease; facioscapulohumeral
muscular dystrophy; Factor V Leiden thrombophilia; Faisalabad histiocytosis; familial atypical
mycobacteriosis; familial capillary malformation-arteriovenous; Familial Creutzfeld-Jakob disease;
familial esophageal achalasia; familial glomuvenous malformation; familial hemophagocytic
lymphohistiocytosis; familial mediterranean fever; familial megacalyces; familial schwannomatosis;
familial spina bifida; familial splenic asplenia/hypoplasia; familial thrombotic thrombocytopeni
purpura; Fanconi disease (Fanconi anemia); Feingold syndrome; FENIB; fibrodysplasia ossificans
progressiva; FKTN; Fragile X syndrome; Francois-Neetens fleck corneal dystrophy; Frasier syndrome;
Friedreich's ataxia; FTDP-17; Fuchs corneal dystrophy; fucosidosis; G6PD deficiency;
galactosialidosis; Galloway syndrome; Gardner syndrome; Gaucher disease; Gitelman syndrome;
GLUT1 deficiency; GM2-Gangliosidoses (e.g., Tay Sachs Disease, Sandhoff Disease) glycogen
storage disease type 1b; glycogen storage disease type 2; glycogen storage disease type 3; glycogen
storage disease type 4; glycogen storage disease type 9a; glycogen storage diseases; GM1-
gangliosidosis; Greenberg syndrome; Greig cephalopolysyndactyly syndrome; hair genetic diseases;
hairy cell leukemia; HANAC syndrome; harlequin type ichtyosis congenita; HDR syndrome; hearing
loss; hemochromatosis type 3; hemochromatosis type 4; hemolytic anemia; hemolytic uremic
syndrome; hemophilia A; hemophilia B; hereditary angioedema type 3; hereditary angioedemas;
hereditary hemorrhagic telangiectasia; hereditary hypofibrinogenemia; hereditary intraosseous vascular
malformation; hereditary leiomyomatosis and renal cell cancer; hereditary neuralgic amyotrophy;
hereditary sensory and autonomic neuropathy type; Hermansky-Pudlak disease; HHH syndrome;
HHT2; hidrotic ectodermal dysplasia type 1; hidrotic ectodermal dysplasias; histiocytic sarcoma;
HNF4A-associated hyperinsulinism; HNPCC; homozygous familial hypercholesterolemia; human
immunodeficiency with microcephaly; Human monkeypox (MPX); human papilloma virus (HPV)
infection; Huntington's disease; hyper-IgD syndrome; hyperinsulinism-hyperammonemia syndrome;
hypercholesterolemia; hypertrophy of the retinal pigment epithelium; hypochondrogenesis;
hypohidrotic ectodermal dysplasia; ICF syndrome; idiopathic congenital intestinal pseudo-obstruction;
immunodeficiency 13; immunodeficiency 17; immunodeficiency 25; immunodeficiency with hyper-
IgM type 1; immunodeficiency with hyper-IgM type 3; immunodeficiency with hyper-IgM type 4;
immunodeficiency with hyper-IgM type 5; immunoglobulin alpha deficiency; inborn errors of thyroid
metabolism; infantile myofibromatosis; infantile visceral myopathy; infantile X-linked spinal muscular
atrophy; intrahepatic cholestasis of pregnancy; IPEX syndrome; IRAK4 deficiency; isolated congenital
asplenia; Jeune syndrome; Johanson-Blizzard syndrome; Joubert syndrome; JP-HHT syndrome;
juvenile hemochromatosis; juvenile hyalin fibromatosis; juvenile nephronophthisis; Kabuki mask
syndrome; Kallmann syndromes; Kartagener syndrome; KCNJ11-associated hyperinsulinism; Kearns-
Sayre syndrome; Kostmann disease; Kozlowski type of spondylometaphyseal dysplasia; Krabbe
disease; LADD syndrome; late infantile-onset neuronal ceroid lipofuscinosis; LCK deficiency; LDHCP
syndrome; Leber Congenital Amaurosis Teyp 10; Legius syndrome; Leigh syndrome; lethal congenital
contracture syndrome 2; lethal congenital contracture syndromes; lethal contractural syndrome type 3;
lethal neonatal CPT deficiency type 2; lethal osteosclerotic bone dysplasia; leukocyte adhesion
deficiency; Li Fraumeni syndrome; LIG4 syndrome; Limb Girdle Muscular Dystrophies;
lipodystrophy; lissencephaly type 1; lissencephaly type 3; Loeys-Dietz syndrome; low phospholipid-
associated cholelithiasis; Lynch Syndrome; lysinuric protein intolerance; a lysosomal storage disease
(e.g., Hunter syndrome, Hurler syndrome); macular dystrophy; Maffucci syndrome; Majeed syndrome;
mannose-binding protein deficiency; mantle cell lymphoma; Marfan disease; Marshall syndrome;
MASA syndrome; mastocytosis; MCAD deficiency; McCune-Albright syndrome; MCKD2; Meckel
syndrome; MECP2 Duplication Syndrome; Meesmann corneal dystrophy; megacystis-microcolon-
intestinal hypoperistalsis; megaloblastic anemia type 1; MEHMO; MELAS; Melnick-Needles
syndrome; MEN2s; meningitis; Menkes disease; metachromatic leukodystrophies; methymalonic
acidemia due to transcobalamin receptor defect; methylmalonic acidurias; methylvalonic aciduria;
microcoria-congenital nephrosis syndrome; microvillous atrophy; migraine; mitochondrial
neurogastrointestinal encephalomyopathy; monilethrix; monosomy X; mosaic trisomy 9 syndrome;
Mowat-Wilson syndrome; mucolipidosis type 2; mucolipidosis type Ma; mucolipidosis type IV;
mucopolysaccharidoses; mucopolysaccharidosis type 3A; mucopolysaccharidosis type 3C;
mucopolysaccharidosis type 4B; multiminicore disease; multiple acyl-CoA dehydrogenation
deficiency; multiple cutaneous and mucosal venous malformations; multiple endocrine neoplasia type
1; multiple sulfatase deficiency; mycosis fungoides; myotonic dystrophy; NAIC; nail-patella
syndrome; nemaline myopathies; neonatal diabetes mellitus; neonatal surfactant deficiency;
nephronophtisis; Netherton disease; neurofibromatoses; neurofibromatosis type 1; Niemann-Pick
disease type A; Niemann-Pick disease type B; Niemann-Pick disease type C; NKX2E; non-alcoholic
fatty liver disease (NAFLD); non-alcoholic steatohepatitis (NASH); Noonan syndrome; North
American Indian childhood cirrhosis; NROB1 duplication-associated DSD; ocular genetic diseases;
oculo-auricular syndrome; OLEDAID; oligomeganephronia; oligomeganephronic renal hypolasia;
Ollier disease; Opitz-Kaveggia syndrome; orofaciodigital syndrome type 1; orofaciodigital syndrome
type 2; osseous Paget disease; osteogenesis imperfecta; otopalatodigital syndrome type 2; OXPHOS
diseases; palmoplantar hyperkeratosis; panlobar nephroblastomatosis; Parkes-Weber syndrome;
Parkinson's disease; partial deletion of 21q22.2-q22.3; Pearson syndrome; Pelizaeus-Merzbacher
disease; Pendred syndrome; pentalogy of Cantrell; peroxisomal acyl-CoA-oxidase deficiency; Peutz-
Jeghers syndrome; Pfeiffer syndrome; Pierson syndrome; pigmented nodular adrenocortical disease;
pipecolic acidemia; Pitt-Hopkins syndrome; plasmalogens deficiency; platelet glycoprotein IV
deficiency; pleuropulmonary blastoma and cystic nephroma; polycystic kidney disease; polycystic
ovarian disease; polycystic lipomembranous osteodysplasia; Pompe disease; including infantile onset
Pompe disease (IOPD) and late onset Pompe disease (LOPD); porphyrias; PRKAG2 cardiac syndrome;
premature ovarian failure; primary erythermalgia; primary hemochromatoses; primary hyperoxaluria;
progressive familial intrahepatic cholestasis; propionic acidemia; protein-losing enteropathy; pyruvate
decarboxylase deficiency; RAPADILINO syndrome; renal cystinosis; retinitis pigmentosa; Rett
Syndrome; rhabdoid tumor predisposition syndrome; Rieger syndrome; ring chromosome 4; Roberts
syndrome; Robinow-Sorauf syndrome; Rothmund-Thomson syndrome; severe combined
immunodeficiency disorder (SCID); Saethre-Chotzen syndrome; Sandhoff disease; SC phocomelia
syndrome; SCAS; Schinzel phocomelia syndrome; severe hypertriglyceridemia; short rib-polydactyly
syndrome type 1; short rib-polydactyly syndrome type 4; short-rib polydactyly syndrome type 2; short-
rib polydactyly syndrome type 3; Shwachman disease; Shwachman-Diamond disease; sickle cell
anemia; Silver-Russell syndrome; Simpson-Golabi-Behmel syndrome; Smith-Lemli-Opitz syndrome;
SPG7-associated hereditary spastic paraplegia; spherocytosis; spinocerebellar ataxia; spinal muscular
atrophy; split-hand/foot malformation with long bone deficiencies; spondylocostal dysostosis;
sporadic visceral myopathy with inclusion bodies; storage diseases; Stargardt macular dystrophy;
STRA6-associated syndrome; stroke; Tay-Sachs disease; thanatophoric dysplasia; thrombophilia due
to antithrombin III deficiency; thyroid metabolism diseases; Tourette syndrome; transcarbamylase
deficiency; transthyretin-associated amyloidosis; trisomy 13; trisomy 22; trisomy 2p syndrome;
tuberous sclerosis; tufting enteropathy; Ullrich Congenital Muscular Dystrophy; urea cycle diseases;
Usher Syndrome; Van Den Ende-Gupta syndrome; Van der Woude syndrome; variegated mosaic
aneuploidy syndrome; VLCAD deficiency; von Hippel-Lindau disease; von Willebrand disease;
Waardenburg syndrome; WAGR syndrome; Walker-Warburg syndrome; Werner syndrome; Wilson
disease; Wiskott-Aldrich Syndrome; Wolcott-Rallison syndrome; Wolfram syndrome; X-linked
agammaglobulinemia; X-linked chronic idiopathic intestinal pseudo-obstruction; X-linked cleft palate
with ankyloglossia; X-linked dominant chondrodysplasia punctata; X-linked ectodermal dysplasia; X-
linked Emery-Dreifuss muscular dystrophy; X-linked lissencephaly; X-linked lymphoproliferative
disease; X-linked visceral heterotaxy; xanthinuria type 1; xanthinuria type 2; xeroderma pigmentosum;
XPV; and Zellweger disease.

[0540] In some embodiments, compositions and methods edit at least one gene associated with a disease described herein or the expression thereof. In some embodiments, the disease is Alzheimer's disease and the gene is selected from APP, BACE-1, PSD95, MAPT, PSEN1, PSEN2, and APOE&4. In some embodiments, the disease is Parkinson's disease and the gene is selected from SNCA, GDNF, and LRRK2. In some embodiments, the disease comprises Centronuclear myopathy and the gene is DNM2. In some embodiments, the disease is Huntington's disease and the gene is HTT. In some embodiments, the disease is Alpha-1 antitrypsin deficiency (AATD) and the gene is SERPINA1. In some embodiments, the disease is amyotrophic lateral sclerosis (ALS) and the gene is selected from SOD1, FUS, C9ORF72, ATXN2, TARDBP, and CHCHD10. In some embodiments, the disease comprises Alexander Disease and the gene is GFAP. In some embodiments, the disease comprises anaplastic large cell lymphoma and the gene is CD30. In some embodiments, the disease comprises Angelman Syndrome and the gene is UBE3A. In some embodiments, the disease comprises calcific aortic stenosis and the gene is Apo(a). In some embodiments, the disease comprises CD3Z-associated primary T-cell immunodeficiency and the gene is CD3Z or CD247. In some embodiments, the disease comprises CD18 deficiency and the gene is ITGB2. In some embodiments, the disease comprises CD40L deficiency and the gene is CD40L. In some embodiments, the disease is congenital adrenal hyperplasia and the gene is CAH1. In some embodiments, the disease comprises CNS trauma and the gene is VEGF. In some embodiments, the disease comprises coronary heart disease and the gene is selected from FGA, FGB, and FGG. In some embodiments, the disease comprises MECP2 Duplication syndrome and Rett syndrome and the gene is MECP2. In some embodiments, the disease comprises a bleeding disorder (coagulation) and the gene is FXI. In some embodiments, the disease comprises fragile X syndrome and the gene is FMR1. In some embodiments, the disease comprises Fuchs corneal dystrophy and the gene is selected from ZEB1, SLC4A11, and LOXHD1. In some embodiments, the disease comprises GM2-Gangliosidoses (e.g., Tay Sachs Disease, Sandhoff disease) and the gene is selected from HEXA and HEXB. In some embodiments, the disease comprises Hearing loss disorders and the gene is DFNA36. In some embodiments, the disease is Pompe disease, including infantile onset Pompe disease (IOPD) and late onset Pompe disease (LOPD) and the gene is GAA. In some embodiments, the disease is Retinitis pigmentosa and the gene is selected from PDE6B, RHO, RP1, RP2, RPGR, PRPH2, IMPDH1, PRPF31, CRB1, PRPF8, TULP1, CA4, HPRPF3, ABCA4, EYS, CERKL, FSCN2, TOPORS, SNRNP200, PRCD, NR2E3, MERTK, USH2A, PROM1, KLHL7, CNGB1, TTC8, ARL6, DHDDS, BEST1, LRAT, SPARA7, CRX, CLRN1, RPE65, and WDR19. In some embodiments, the disease comprises Leber Congenital Amaurosis Type 10 and the gene is CEP290. In some embodiments, the disease is cardiovascular disease and/or lipodystrophies and the gene is selected from ABCG5, ABCG8, AGT, ANGPTL3, APOCHII, APOA1, APOL1, ARH, CDKN2B, CFB, CXCL12, FXI, FXII, GATA-4, MIA3, MKL2, MTHFD1L, MYH7, NKX2-5, NOTCH1, PKK, PCSK9, PSRC1, SMAD3, and TTR. In some embodiments, the disease is cardiovascular disease and/or lipodystrophies and the gene is ANGPTL3. In some embodiments, the disease is cardiovascular disease and/or lipodystrophies and the gene is PCSK9. In some embodiments, the disease is cardiovascular disease and/or lipodystrophies and the gene is TTR. In some embodiments, the disease is severe hypertriglyceridemia (SHTG) and the gene is APOCIII or ANGPTL4. In some embodiments, the disease comprises acromegaly and the gene is GHR. In some embodiments, the disease comprises acute myeloid leukemia and the gene is CD22. In some embodiments, the disease is diabetes and the gene is GCGR. In some embodiments, the disease is NAFLD/NASH and the gene is selected from HSD17B13, PSD3, GPAM, CIDEB, DGAT2 and PNPLA3. In some embodiments, the disease is NASH/cirrhosis and the gene is MARCI. In some embodiments, the disease is cancer and the gene is selected from STAT3, YAP1, FOXP3, AR (Prostate cancer), and IRF4 (multiple myeloma). In some embodiments, the disease is cystic fibrosis and the gene is CFTR. In some embodiments, the disease is Duchenne muscular dystrophy and the gene is DMD. In some embodiments, the disease is ornithine transcarbamylase deficiency (OTCD) and the gene is OTC. In some embodiments, the disease is congenital adrenal hyperplasia (CAH) and the gene is CYP21A2. In some embodiments, the disease is atherosclerotic cardiovascular disease (ASCVD) and the gene is LPA. In some embodiments, the disease is hepatitis B virus infection (CHB) and the gene is HBV covalently closed circular DNA (cccDNA). In some embodiments, the disease is citrullinemia type I and the gene is ASS1. In some embodiments, the disease is citrullinemia type I and the gene is SLC25A13. In some embodiments, the disease is citrullinemia type I and the gene is ASS1. In some embodiments, the disease is arginase-1 deficiency and the gene is ARG1. In some embodiments, the disease is carbamoyl phosphate synthetase I deficiency and the gene is CPS1. In some embodiments, the disease is argininosuccinic aciduria and the gene is ASL. In some embodiments, the disease comprises angioedema and the gene is PKK. In some embodiments, the disease comprises thalassemia and the gene is TMPRSS6. In some embodiments, the disease comprises achondroplasia and the gene is FGFR3. In some embodiments, the disease comprises Cri du chat syndrome and the gene is selected from CTNND2. In some embodiments, the disease comprises sickle cell anemia and the gene is Beta globin gene. In some embodiments, the disease comprises Alagille Syndrome and the gene is selected from JAG1 and NOTCH2. In some embodiments, the disease comprises Charcot-Marie-Tooth disease and the gene is selected from PMP22 and MFN2. In some embodiments, the disease comprises Crouzon syndrome and the gene is selected from FGFR2, FGFR3, and FGFR3. In some embodiments, the disease comprises Dravet Syndrome and the gene is selected from SCN1A and SCN2A. In some embodiments, the disease comprises Emery-Dreifuss syndrome and the gene is selected from EMD. LMNA, SYNE1, SYNE2, FHL1, and TMEM43. In some embodiments, the disease comprises Factor V Leiden thrombophilia and the gene is F5. In some embodiments, the disease is fabry disease and the gene is GLA. In some embodiments, the disease is facioscapulohumeral muscular dystrophy and the gene is FSHD1. In some embodiments, the disease comprises Fanconi anemia and the gene is selected from FANCA, FANCB, FANCC, FANCD1, FANCD2, FANCE, FANCF. FANCG, FANCI, FANCJ, FANCL, FANCM, FANCN, FANCP, FANCS, RAD51C, and XPF. In some embodiments, the disease comprises Familial Creutzfeld-Jakob disease and the gene is PRNP. In some embodiments, the disease comprises Familial Mediterranean Fever and the gene is MEFV. In some embodiments, the disease comprises Friedreich's ataxia and the gene is FXN. In some embodiments, the disease comprises Gaucher disease and the gene is GBA. In some embodiments, the disease comprises human papilloma virus (HPV) infection and the gene is HPV E7. In some embodiments, the disease comprises hemochromatosis and the gene is HFE, optionally comprising a C282Y mutation. In some embodiments, the disease comprises Hemophilia A and the gene is FVIII. In some embodiments, the disease is hereditary angioedema and the gene is SERPING1 or KLKB1. In some embodiments, the disease comprises histiocytosis and the gene is CD1. In some embodiments, the disease comprises immunodeficiency 17 and the gene is CD3D. In some embodiments, the disease comprises immunodeficiency 13 and the gene is CD4. In some embodiments, the disease comprises Common Variable Immunodeficiency and the gene is selected from CD19 and CD81. In some embodiments, the disease comprises Joubert syndrome and the gene is selected from INPP5E, TMEM216, AHI1, NPHP1, CEP290, TMEM67, RPGRIP1L, ARL13B, CC2D2A, OFD1, TMEM138, TCTN3, ZNF423, and AMRC9. In some embodiments, the disease comprises leukocyte adhesion deficiency and the gene is CD18. In some embodiments, the disease comprises Li-Fraumeni syndrome and the gene is TP53. In some embodiments, the disease comprises lymphoproliferative syndrome and the gene is CD27. In some embodiments, the disease comprises Lynch syndrome and the gene is selected from MSH2. MLH1. MSH6, PMS2, PMS1, TGFBR2, and MLH3. In some embodiments, the disease comprises mantle cell lymphoma and the gene is CD5. In some embodiments, the disease comprises Marfan syndrome and the gene is FBN1. In some embodiments, the disease comprises mastocytosis and the gene is CD2. In some embodiments, the disease comprises methylmalonic acidemia and the gene is selected from MMAA, MMAB, and MUT. In some embodiments, the disease is mycosis fungoides and the gene is CD7. In some embodiments, the disease is myotonic dystrophy and the gene is selected from CNBP and DMPK. In some embodiments, the disease comprises neurofibromatosis and the gene is selected from NF1, and NF2. In some embodiments, the disease comprises osteogenesis imperfecta and the gene is selected from COL1A1, COL1A2, and IFITM5. In some embodiments, the disease is non-small cell lung cancer and the gene is selected from KRAS, EGFR, ALK, METex14, BRAF V600E. ROS1, RET, and NTRK. In some embodiments, the disease comprises Peutz-Jeghers syndrome and the gene is STK11. In some embodiments, the disease comprises polycystic kidney disease and the gene is selected from PKD1 and PKD2. In some embodiments, the disease comprises Severe Combined Immune Deficiency and the gene is selected from IL7R, RAG1, and JAK3. In some embodiments, the disease comprises PRKAG2 cardiac syndrome and the gene is PRKAG2. In some embodiments, the disease comprises spinocerebellar ataxia and the gene is selected from ATXN1, ATXN2, ATXN3, PLEKHG4, SPTBN2, CACNA1A, ATXN7, ATXN8OS, ATXN10, TTBK2, PPP2R2B, KCNC3, PRKCG, ITPR1, TBP, KCND3, and FGF14. In some embodiments, the disease is thrombophilia due to antithrombin III deficiency and the gene is SERPINC1. In some embodiments the disease is spinal muscular atrophy and the gene is SMN1. In some embodiments, the disease comprises Usher Syndrome and the gene is selected from MYO7A, USHIC. CDH23, PCDH15, USH1G, USH2A, GPR98, DFNB31, and CLRN1. In some embodiments, the disease comprises von Willebrand disease and the gene is VWF. In some embodiments, the disease comprises Waardenburg syndrome and the gene is selected from PAX3, MITF, WS2B, WS2C, SNAI2, EDNRB, EDN3, and SOX10. In some embodiments, the disease comprises Wiskott-Aldrich Syndrome and the gene is WAS. In some embodiments, the disease comprises von Hippel-Lindau disease and the gene is VHL. In some embodiments, the disease comprises Wilson disease and the gene is ATP7B. In some embodiments, the disease comprises Zellweger syndrome and the gene is selected from PEX1, PEX2, PEX3, PEX5, PEX6, PEX10, PEX12, PEX13, PEX14, PEX16, PEX19, and PEX26. In some embodiments, the disease comprises infantile myofibromatosis and the gene is CD34. In some embodiments, the disease comprises platelet glycoprotein IV deficiency and the gene is CD36. In some embodiments, the disease comprises immunodeficiency with hyper-IgM type 3 and the gene is CD40. In some embodiments, the disease comprises hemolytic uremic syndrome and the gene is CD46. In some embodiments, the disease comprises complement hyperactivation, angiopathic thrombosis, or protein-losing enteropathy and the gene is CD55. In some embodiments, the disease comprises hemolytic anemia and the gene is CD59. In some embodiments, the disease comprises calcification of joints and arteries and the gene is CD73. In some embodiments, the disease comprises immunoglobulin alpha deficiency and the gene is CD79A. In some embodiments, the disease comprises C syndrome and the gene is CD96. In some embodiments, the disease comprises hairy cell leukemia and the gene is CD123. In some embodiments, the disease comprises histiocytic sarcoma and the gene is CD163. In some embodiments, the disease comprises autosomal dominant deafness and the gene is CD164. In some embodiments, the disease comprises immunodeficiency 25 and the gene is CD247. In some embodiments, the disease comprises methymalonic acidemia due to transcobalamin receptor defect and the gene is CD320.

### Cancer

[0541] In some embodiments, compositions, systems or methods described herein edit at least one gene associated with a cancer or the expression thereof. Non-limiting examples of cancers include: acute lymphoblastic leukemia; acute lymphoblastic lymphoma; acute lymphocytic leukemia; acute myelogenous leukemia; acute myeloid leukemia (adult/childhood); adrenocortical carcinoma; anal cancer; appendix cancer; astrocytoma; atypical teratoid/rhabdoid tumor; basal-cell carcinoma; bile duct cancer; bladder cancer; bone osteosarcoma; brain cancer; brain tumor; brainstem glioma; breast cancer; bronchial adenoma, carcinoid, or tumor; Burkitt lymphoma; carcinomacervical cancer; chronic lymphocytic leukemia; chronic myelogenous leukemia; chronic myeloid leukemia; colon cancer; colorectal cancer; emphysema; endometrial cancer; esophageal cancer; Ewing sarcoma; gallbladder cancer; gastric (stomach) cancer; gastrointestinal tumor; gliomahairy cell leukemia; head and neck cancer; liver cancer; Hodgkin's lymphoma; hypopharyngeal cancer; Kaposi Sarcoma; kidney cancer lip and oral cavity cancer; liposarcoma; lung cancer, non-small cell lung cancer; Waldenström; melanoma; mesotheliomamyelogenous leukemia; myeloid leukemia; myeloma; nasopharyngeal carcinoma; neuroblastoma; non-Hodgkin's lymphoma; ovarian cancer; pancreatic cancer; pineal cancer; pituitary tumor; prostate cancer; rectal cancer; renal cell carcinomaretinoblastoma; spinal cord tumor; squamous cell carcinoma; squamous neck cancer; T-cell lymphoma, cutaneous (Mycosis Fungoides and Sézary syndrome); testicular cancer; throat cancer; thyroid cancer; urethral cancer; uterine cancervaginal cancer; and Wilms Tumor. In some embodiments, the cancer is a solid cancer (i.e., a tumor). In some embodiments, the cancer is selected from a blood cell cancer, a leukemia, and a lymphoma. The cancer can be a leukemia, such as, by way of non-limiting example, acute myeloid (or myelogenous) leukemia (AML), chronic myeloid (or myelogenous) leukemia (CML), acute lymphocytic (or lymphoblastic) leukemia (ALL), and chronic lymphocytic leukemia (CLL). In some embodiments, the cancer is any one of colon cancer, rectal cancer, renal-cell carcinoma, liver cancer, bladder cancer, cancer of the kidney or ureter, lung cancer, non-small cell lung cancer, cancer of the small intestine, esophageal cancer, melanoma, bone cancer, pancreatic cancer, skin cancer, brain cancer (e.g., glioblastoma), cancer of the head or neck, melanoma, uterine cancer, ovarian cancer, breast cancer, testicular cancer, cervical cancer, stomach cancer, Hodgkin's Disease, non-Hodgkin's lymphoma, and thyroid cancer.

[0542] In some embodiments, compositions, systems or methods described herein edit at least one mutation in a target nucleic acid, wherein the at least one mutation is associated with cancer or causative of cancer. In some embodiments, the target nucleic acid comprises a gene associated with cancer, a gene whose overexpression is associated with cancer, a tumor suppressor gene, an oncogene, a checkpoint inhibitor gene, a gene associated with cellular growth, a gene associated with cellular metabolism, a gene associated with cell cycle, combinations thereof, or portions thereof. Non-limiting examples of genes comprising a mutation associated with cancer are ABL, ACE, AF4/HRX, AKT-2, ALK, ALK/NPM, AML1, AML1/MTG8, APC, ATM, AXIN2, AXL, BAP1, BARD1, BCL-2, BCL-3, BCL-6, BCR/ABL, BLM, BMPR1A, BRCA1, BRCA2, BRIP1, c-MYC, CASR, CCR5, CDC73, CDH1, CDK4, CDKN1B, CDKN1C, CDKN2A, CEBPA, CHEK2, CREBBP, CTNNA1, DBL, DEK/CAN, DICER1, DIS3L2, E2A/PBX1, EGFR, ENL/HRX, EPCAM, ERG/TLS, ERBB, ERBB-2, ETS-1, EWS/FLI-1, FH, FKRP, FLCN, FMS, FOS, FPS, GATA2, GCG, GLI, GPC3, GPGSP, GREM1, HER2/neu, HOX11, HOXB13, HRAS, HST, IL-3, INT-2, JAKI, JUN, KIT, KS3, K-SAM, LBC, LCK, LMO1, LMO2, L-MYC, LYL-1, LYT-10, LYT-10/Cal, MAS, MAX, MDM-2, MEN1, MET, MITF, MLH1, MLL, MOS, MSH1, MSH2, MSH3, MSH6, MTG8/AML1, MUTYH, MYB, MYH11/CBFB, NBN, NEU, NF1, NF2, N-MYC, NTHL1, OST, PALB2, PAX-5, PBX1/E2A, PCDC1, PDGFRA, PHOX2B, PIM-1, PMS2, POLD1, POLE, POT1, PPARG, PRAD-1, PRKAR1A, PTCH1, PTEN, RAD50, RAD51C, RAD51D, RAF, RAR/PML, RAS-H, RAS-K, RAS-N, RB1, RECQL4, REL/NRG, RET, RHOM1, RHOM2, ROS, RUNX1, SDHA, SDHAF, SDHAF2, SDHB, SDHC, SDHD, SET/CAN, SIS, SKI, SMAD4, SMARCA4, SMARCB1, SMARCE1, SRC, STK11, SUFU, TAL1, TAL2, TAN-1, TIAM1, TERC, TERT, TIMP3, TMEM127, TNF, TP53, TRAC, TSC1, TSC2, TRK, VHL, WRN, and WT1, Non-limiting examples of oncogenes are KRAS, NRAS, BRAF, MYC, CTNNB1, and EGFR, In some embodiments, the oncogene is a gene that encodes a cyclin dependent kinase (CDK). Non-limiting examples of CDKs are Cdk1, Cdk4, Cdk5, Cdk7, Cdk8, Cdk9, Cdk11 and CDK20. Non-limiting examples of tumor suppressor genes are TP53, RB1, and PTEN.

### Infections

[0543] In some embodiments, compositions, systems or methods described herein treats an infection in a subject. In some embodiments, the infections are caused by a pathogen (e.g., bacteria, viruses, fungi, and parasites). In some embodiments, compositions, systems or methods described herein modifies a target nucleic acid associated with the pathogen or parasite causing the infection. In some embodiments, the target nucleic acid may be in the pathogen or parasite itself or in a cell, tissue or organ of the subject that the pathogen or parasite infects. In some embodiments, the methods described herein include treating an infection caused by one or more bacterial pathogens. Non-limiting examples of bacterial pathogens include Acholeplasma laidlawii, Brucella abortus, Chlamydia psittaci, Chlamydia trachomatis, Cryptococcus neoformans, Escherichia coli, Legionella pneumophila, Lyme disease spirochetes, methicillin-resistant Staphylococcus aureus, Mycobacterium leprae, Mycobacterium tuberculosis, Mycoplasma arginini, Mycoplasma arthritidis, Mycoplasma genitalium, Mycoplasma hyorhinis, Mycoplasma orale, Mycoplasma pneumoniae, Mycoplasma salivarium, Neisseria gonorrhoeae, Neisseria meningitidis, Pneumococcus, Pseudomonas aeruginosa, sexually transmitted infection, Streptococcus agalactiae, Streptococcus pyogenes, and Treponema pallidum.

[0544] In some embodiments, compositions, systems or methods described herein treats an infection caused by one or more viral pathogens. Non-limiting examples of viral pathogens include adenovirus, blue tongue virus, chikungunya, coronavirus (e.g., SARS-COV-2), cytomegalovirus, Dengue virus, Ebola, Epstein-Barr virus, feline leukemia virus, Hemophilus influenzae B, Hepatitis virus A, Hepatitis virus B, Hepatitis virus C, herpes simplex virus I, herpes simplex virus II, human papillomavirus (HPV) including HPV16 and HPV18, human serum parvo-like virus, human T-cell leukemia viruses, immunodeficiency virus (e.g., HIV), influenza virus, lymphocytic choriomeningitis virus, measles virus, mouse mammary tumor virus, mumps virus, murine leukemia virus, polio virus, rabies virus, Reovirus, respiratory syncytial virus (RSV), rubella virus, Sendai virus, simian virus 40, Sindbis virus, varicella-zoster virus, vesicular stomatitis virus, wart virus, West Nile virus, yellow fever virus, or any combination thereof.

[0545] In some embodiments, compositions, systems or methods described herein treats an infection caused by one or more parasites. Non-limiting examples of parasites include helminths, annelids, platyhelminthes, nematodes, and thorny-headed worms. In some embodiments, parasitic pathogens comprise, without limitation, Babesia bovis, Echinococcus granulosus, Eimeria tenella, Leishmania tropica, Mesocestoides corti, Onchocerca volvulus, Plasmodium falciparum, Plasmodium vivax, Schistosoma japonicum, Schistosoma mansoni, Schistosoma spp., Taenia hydatigena, Taenia ovis, Taenia saginata, Theileria parva, Toxoplasma gondii, Toxoplasma spp., Trichinella spiralis, Trichomonas vaginalis, Trypanosoma brucei, Trypanosoma cruzi, Trypanosoma rangeli, Trypanosoma rhodesiense, Balantidium coli, Entamoeba histolytica, Giardia spp., Isospora spp., Trichomonas spp., or any combination thereof.

### EXAMPLES

[0546] The following examples are included for illustrative purposes only and are not intended to limit the scope of the invention.

### Example 1. PAM Screening for Effector Proteins

[0547] Effector proteins and guide RNA combinations described herein are screened by an in vitro enrichment (IVE) assay to determine PAM recognition by each effector protein-guide RNA complex. Briefly, effector proteins are complexed with corresponding guide RNAs for 15 minutes at 37° C. The complexes are added to an IVE reaction mix. PAM screening reactions use 10 μl of RNP in 100 μl reactions with 1,000 ng of a 5′ PAM library in 1× Cutsmart buffer and are carried out for 15 minutes at 25° C., 45 minutes at 37° C., and 15 minutes at 45° C. Reactions are terminated with 1 μl of proteinase K and 5 μl of 500 mM EDTA for 30 minutes at 37° C. Next generation sequencing is performed on cut sequences to identify enriched PAMs.

### Example 2. Effector Proteins Edit Genomic DNA in Mammalian Cells

[0548] Effector proteins are tested for their ability to produce indels in a mammalian cell line (e.g., HEK293T cells). Briefly, a plasmid encoding the effector proteins and a guide RNA are delivered by lipofection to the mammalian cells. This is performed with a variety of guide RNAs targeting several loci adjacent to biochemically determined PAM sequences. Indels in the loci are detected by next generation sequencing of PCR amplicons at the targeted loci and indel percentage is calculated as the fraction of sequencing reads containing insertions or deletions relative to an unedited reference sequence. “No plasmid” and Cas9 are included as negative and positive controls, respectively.

### Example 3. Base Editing

[0549] A nucleic acid vector encoding a fusion protein is constructed for base editing. The fusion protein comprises a catalytically inactive variant of an effector protein fused to a deaminase. The fusion protein and at least one guide nucleic acid is tested for its ability to edit a target sequence in eukaryotic cells. Cells are transfected with the nucleic acid vector and guide nucleic acid. After sufficient incubation, DNA is extracted from the transfected cells. Target sequences are PCR amplified and sequenced by NGS and MiSeq. The presence of base modifications are analyzed from sequencing data. Results are recorded as a change in % base call relative to the negative control.

### Example 4. Activation of Gene Expression with Cas Effector Fusion Polypeptide

[0550] A single stranded reporter nucleic acid encoding a fluorescent protein (e.g., enhanced green fluorescent protein (EGFP)) and a eukaryotic promoter is generated with a target sequence that is known to be recognized by complexes of effector proteins disclosed herein and corresponding guide nucleic acids. A nucleic acid vector encoding the Cas effector fused to a transcriptional activator; a guide nucleic acid; and the single stranded reporter nucleic acid encoding EGFP are introduced to eukaryotic cells via lipofection and EGFP expression is quantified by flow cytometry. Relative amounts of RNA, indicative of relative gene expression, are quantified with RT-qPCR.

### Example 5. Reduction of Gene Expression with with Cas Effector Fusion Polypeptide

[0551] A single stranded reporter nucleic acid encoding a fluorescent protein (e.g., enhanced green fluorescent protein (EGFP)) and a pSV40 promoter that drives constitutive expression of EGFP is generated with a target sequence that is known to be recognized by complexes of effector proteins disclosed herein and corresponding guide nucleic acids. A nucleic acid vector encoding the Cas effector fused to a transcriptional repressor; a guide nucleic acid; and the single stranded reporter nucleic acid encoding EGFP are introduced to eukaryotic cells via lipofection and EGFP expression is quantified by flow cytometry. Relative amounts of RNA, indicative of relative gene expression, are quantified with RT-qPCR.

### Example 6. Generating a Catalytically Inactive Variant of a CRISPR Cas Effector Protein

[0552] Extensive work has been done to evaluate the overall domain structure of the CRISPR Cas enzymes in the last decade. These data can be an effective reference when trying to identify a catalytic residue of a Cas nuclease. By selecting the residue of a Cas nuclease of interest that aligns at the same relative location as the catalytic residue of a known nuclease when the Cas nuclease and known nuclease are aligned for maximal sequence identity, one can identify the catalytic residue of the Cas nuclease.

[0553] Sequence or structural analogs of a Cas nuclease provide an additional or supplemental way to predict the catalytic residues of the novel Cas nuclease relative to the previous description in this Example. Catalytic residues are usually highly conserved and can be identified in this manner.

[0554] Alternatively, or additionally to the description already provided in this Example, computational software may be used to predict the structure of a Cas nuclease.

What is claimed is:

1. A composition comprising an effector protein and a guide nucleic acid, wherein the effector protein comprises an amino acid sequence that is at least 75%, at least 80%, at least 85%, at least 90%, at least 95%, at least 98%, at least 99% or 100% identical to any one of SEQ ID NOS: 1-10,484 or 15,022-24,165.

2. A composition comprising an effector protein and a guide nucleic acid, wherein the amino acid sequence of the effector protein is at least 75%, at least 80%, at least 85%, at least 90%, at least 95%, at least 98%, at least 99% or 100% identical to any one of SEQ ID NOS: 1-10,484 or 15,022-24,165.

3. A composition comprising an effector protein and a guide nucleic acid, wherein the effector protein comprises about 100, about 120, about 140, about 160, about 180, about 200, about 220, about 240, about 260, about 280, about 300, about 320, about 340, about 360, about 380, about 400, about 420, about 440, about 460, about 480, about 500, about 520, about 540, about 560, about 580, about 600, about 620, about 640, about 660, about 680, about 700, about 720, about 740, about 760, about 780, about 800, about 820, about 840, about 860, about 880, about 900, about 920, about 940, about 960, about 980, about 1000, about 1020, about 1040, about 1060, about 1080, about 1100, about 1120, about 1140, about 1160, about 1180, about 1200, about 1220, about 1240, about 1260, about 1280, about 1300, about 1320, about 1340, about 1360, about 1380, about 1400, about 1420, about 1440, about 1460, about 1480, about 1490, about 1500, about 1520, about 1540, about 1560, about 1580, about 1600, about 1620, about 1640, about 1660, about 1680, about 1700, about 1720, about 1740, about 1760, about 1780, about 1800, about 1820, about 1840, about 1860, about 1880, about 1900, or about 1920 contiguous amino acids of a sequence selected from SEQ ID NOS: 1-10,484 or 15,022-24,165.

4. A composition comprising an effector protein and a guide nucleic acid, wherein the effector protein comprises the amino acid sequence located at positions 1-100, 150-250, 101-200, 250-350, 201-300, 350-450, 301-400, 350-450, 401-500, 450-550, 501-600, 550-650, 601-700, 650-750, 701-800, 750-850, 801-900, 850-950, 901-1000, 950-1050, 1001-1100, 1050-1150, 1101-1200, 1150-1250, 1201-1300, 1250-1350, 1301-1400, 1350-1450, 1401-1500, 1450-1550, 1501-1600, 1550-1650, 1601-1700, 1650-1750, 1701-1800, 1850-1950, 1801-1900, or 1850-1950 of a sequence selected from SEQ ID NOS: 1-10,484 or 15,022-24,165.

5. A composition comprising an effector protein and a guide nucleic acid, wherein the effector protein comprises an amino acid sequence that is at least 90%, at least 95%, or 100% identical to a portion of a sequence selected from SEQ ID NOS: 1-10,484 or 15,022-24,165, and wherein the length of the portion is at least about 100, at least about 200, at least about 300, at least about 400, at least about 500, or at least about 600 linked amino acids in length.

6. The composition of claim 5, wherein the portion of the sequence is about 30%, about 40%, about 50%, about 60%, about 70%, about 80%, or about 90% of a sequence selected from SEQ ID NOS: 1-10,484 or 15,022-24,165.

7. A composition comprising an effector protein, and a guide nucleic acid, wherein
a) the amino acid sequence of the effector protein is at least 50%, at least 55%, at least 60%, at least 65%, at least 70%, at least 75%, at least 80%, at least 85%, at least 90%, at least 95%, at least 97%, at least 98%, at least 99% or 100% identical to a sequence selected from Column A1 of TABLE 1; and
b) at least a portion of the engineered guide nucleic acid comprises a nucleobase sequence that is:
i) at least 50%, at least 55%, at least 60%, at least 65%, at least 70%, at least 75%, at least 80%, at least 85%, at least 90%, at least 95%, or 100% identical to a sequence selected from Column B1 of TABLE 1, wherein the sequence from Column A1 and the sequence from Column B1 are in the same row of TABLE 1, or
ii) at least 50%, at least 55%, at least 60%, at least 65%, at least 70%, at least 75%, at least 80%, at least 85%, at least 90%, at least 95%, or 100% reverse complementary to a sequence selected from Column B1 of TABLE 1, wherein the sequence from Column A1 and the sequence from Column B1 are in the same row of TABLE 1.

8. A composition comprising an effector protein, and an engineered guide nucleic acid, wherein
a) the amino acid sequence of the effector protein is at least 50%, at least 55%, at least 60%, at least 65%, at least 70%, at least 75%, at least 80%, at least 85%, at least 90%, at least 95%, at least 97%, at least 98%, at least 99% or 100% identical to a sequence selected from Column A2 of TABLE 1; and
b) at least a portion of the engineered guide nucleic acid comprises a nucleobase sequence that is:
i) at least 50%, at least 55%, at least 60%, at least 65%, at least 70%, at least 75%, at least 80%, at least 85%, at least 90%, at least 95%, or 100% identical to a sequence selected from Column B2 of TABLE 1, wherein the sequence from Column A2 and the sequence from Column B2 are in the same row of TABLE 1, or
ii) at least 50%, at least 55%, at least 60%, at least 65%, at least 70%, at least 75%, at least 80%, at least 85%, at least 90%, at least 95%, or 100% reverse complementary to a sequence selected from Column B2 of TABLE 1, wherein the sequence from Column A2 and the sequence from Column B2 are in the same row of TABLE 1.

9. A composition comprising an effector protein, and an engineered guide nucleic acid, wherein
a) the amino acid sequence of the effector protein is at least 50%, at least 55%, at least 60%, at least 65%, at least 70%, at least 75%, at least 80%, at least 85%, at least 90%, at least 95%, at least 97%, at least 98%, at least 99% or 100% identical to a sequence selected from Column A3 of TABLE 1; and
b) at least a portion of the engineered guide nucleic acid comprises a nucleobase sequence that is:
i) at least 50%, at least 55%, at least 60%, at least 65%, at least 70%, at least 75%, at least 80%, at least 85%, at least 90%, at least 95%, or 100% identical to a sequence selected from Column B3 of TABLE 1, wherein the sequence from Column A3 and the sequence from Column B3 are in the same row of TABLE 1, or
ii) at least 50%, at least 55%, at least 60%, at least 65%, at least 70%, at least 75%, at least 80%, at least 85%, at least 90%, at least 95%, or 100% reverse complementary to a sequence selected from Column B3 of TABLE 1, wherein the sequence from Column A3 and the sequence from Column B3 are in the same row of TABLE 1.

10. A composition comprising an effector protein, and an engineered guide nucleic acid, wherein the amino acid sequence of the effector protein is at least 50% identical to a sequence selected from Column A1 of TABLE 1, and wherein at least a portion of the engineered guide nucleic acid comprises a nucleobase sequence that is at least 50% identical or at least 50% reverse complementary to a sequence selected from Column B1 of TABLE 1, wherein the sequence from Column A1 and the sequence from Column B1 are in the same row of TABLE 1.

11. A composition comprising an effector protein, and an engineered guide nucleic acid, wherein the amino acid sequence of the effector protein is at least 60% identical to a sequence selected from Column A1 of TABLE 1, and wherein at least a portion of the engineered guide nucleic acid comprises a nucleobase sequence that is at least 60% identical or at least 60% reverse complementary to a sequence selected from Column B1 of TABLE 1, wherein the sequence from Column A1 and the sequence from Column B1 are in the same row of TABLE 1.

12. A composition comprising an effector protein, and an engineered guide nucleic acid, wherein the amino acid sequence of the effector protein is at least 70% identical to a sequence selected from Column A1 of TABLE 1, and wherein at least a portion of the engineered guide nucleic acid comprises a nucleobase sequence that is at least 70% identical or at least 70% reverse complementary to a sequence selected from Column B1 of TABLE 1, wherein the sequence from Column A1 and the sequence from Column B1 are in the same row of TABLE 1.

13. A composition comprising an effector protein, and an engineered guide nucleic acid, wherein the amino acid sequence of the effector protein is at least 80% identical to a sequence selected from Column A1 of TABLE 1, and wherein at least a portion of the engineered guide nucleic acid comprises a nucleobase sequence that is at least 80% identical or at least 80% reverse complementary to a sequence selected from Column B1 of TABLE 1, wherein the sequence from Column A1 and the sequence from Column B1 are in the same row of TABLE 1.

14. A composition comprising an effector protein, and an engineered guide nucleic acid, wherein the amino acid sequence of the effector protein is at least 90% identical to a sequence selected from Column A1 of TABLE 1, and wherein at least a portion of the engineered guide nucleic acid comprises a nucleobase sequence that is at least 90% identical or at least 90% reverse complementary to a sequence selected from Column B1 of TABLE 1, wherein the sequence from Column A1 and the sequence from Column B1 are in the same row of TABLE 1.

15. A composition comprising an effector protein, and an engineered guide nucleic acid, wherein the amino acid sequence of the effector protein is at least 95% identical to a sequence selected from Column A1 of TABLE 1, and wherein at least a portion of the engineered guide nucleic acid comprises a nucleobase sequence that is at least 95% identical or at least 95% reverse complementary to a sequence selected from Column B1 of TABLE 1, wherein the sequence from Column A1 and the sequence from Column B1 are in the same row of TABLE 1.

16. A composition comprising an effector protein, and an engineered guide nucleic acid, wherein the amino acid sequence of the effector protein is 100% identical to a sequence selected from Column A1 of TABLE 1, and wherein at least a portion of the engineered guide nucleic acid comprises a nucleobase sequence that is 100% identical or 100% reverse complementary to a sequence selected from Column B1 of TABLE 1, wherein the sequence from Column A1 and the sequence from Column B1 are in the same row of TABLE 1.

17. A composition comprising an effector protein, and an engineered guide nucleic acid, wherein the amino acid sequence of the effector protein is at least 50% identical to a sequence selected from Column A2 of TABLE 1, and wherein at least a portion of the engineered guide nucleic acid comprises a nucleobase sequence that is at least 50% identical or at least 50% reverse complementary to a sequence selected from Column B2 of TABLE 1, wherein the sequence from Column A2 and the sequence from Column B2 are in the same row of TABLE 1.

18. A composition comprising an effector protein, and an engineered guide nucleic acid, wherein the amino acid sequence of the effector protein is at least 60% identical to a sequence selected from Column A2 of TABLE 1, and wherein at least a portion of the engineered guide nucleic acid comprises a nucleobase sequence that is at least 60% identical or at least 60% reverse complementary to a sequence selected from Column B2 of TABLE 1, wherein the sequence from Column A2 and the sequence from Column B2 are in the same row of TABLE 1.

19. A composition comprising an effector protein, and an engineered guide nucleic acid, wherein the amino acid sequence of the effector protein is at least 70% identical to a sequence selected from Column A2 of TABLE 1, and wherein at least a portion of the engineered guide nucleic acid comprises a nucleobase sequence that is at least 70% identical or at least 70% reverse complementary to a sequence selected from Column B2 of TABLE 1, wherein the sequence from Column A2 and the sequence from Column B2 are in the same row of TABLE 1.

20. A composition comprising an effector protein, and an engineered guide nucleic acid, wherein the amino acid sequence of the effector protein is at least 80% identical to a sequence selected from Column A2 of TABLE 1, and wherein at least a portion of the engineered guide nucleic acid comprises a nucleobase sequence that is at least 80% identical or at least 80% reverse complementary to a sequence selected from Column B2 of TABLE 1, wherein the sequence from Column A2 and the sequence from Column B2 are in the same row of TABLE 1.

21. A composition comprising an effector protein, and an engineered guide nucleic acid, wherein the amino acid sequence of the effector protein is at least 90% identical to a sequence selected from Column A2 of TABLE 1, and wherein at least a portion of the engineered guide nucleic acid comprises a nucleobase sequence that is at least 90% identical or at least 90% reverse complementary to a sequence selected from Column B2 of TABLE 1, wherein the sequence from Column A2 and the sequence from Column B2 are in the same row of TABLE 1.

22. A composition comprising an effector protein, and an engineered guide nucleic acid, wherein the amino acid sequence of the effector protein is at least 95% identical to a sequence selected from Column A2 of TABLE 1, and wherein at least a portion of the engineered guide nucleic acid comprises a nucleobase sequence that is at least 95% identical or at least 95% reverse complementary to a sequence selected from Column B2 of TABLE 1, wherein the sequence from Column A2 and the sequence from Column B2 are in the same row of TABLE 1.

23. A composition comprising an effector protein, and an engineered guide nucleic acid, wherein the amino acid sequence of the effector protein is 100% identical to a sequence selected from Column A2 of TABLE 1, and wherein at least a portion of the engineered guide nucleic acid comprises a nucleobase sequence that is 100% identical or 100% reverse complementary to a sequence selected from Column B2 of TABLE 1, wherein the sequence from Column A2 and the sequence from Column B2 are in the same row of TABLE 1.

24. A composition comprising an effector protein, and an engineered guide nucleic acid, wherein the amino acid sequence of the effector protein is at least 50% identical to a sequence selected from Column A3 of TABLE 1, and wherein at least a portion of the engineered guide nucleic acid comprises a nucleobase sequence that is at least 50% identical or at least 50% reverse complementary to a sequence selected from Column B3 of TABLE 1, wherein the sequence from Column A3 and the sequence from Column B3 are in the same row of TABLE 1.

25. A composition comprising an effector protein, and an engineered guide nucleic acid, wherein the amino acid sequence of the effector protein is at least 60% identical to a sequence selected from Column A3 of TABLE 1, and wherein at least a portion of the engineered guide nucleic acid comprises a nucleobase sequence that is at least 60% identical or at least 60% reverse complementary to a sequence selected from Column B3 of TABLE 1, wherein the sequence from Column A3 and the sequence from Column B3 are in the same row of TABLE 1.

26. A composition comprising an effector protein, and an engineered guide nucleic acid, wherein the amino acid sequence of the effector protein is at least 70% identical to a sequence selected from Column A3 of TABLE 1, and wherein at least a portion of the engineered guide nucleic acid comprises a nucleobase sequence that is at least 70% identical or at least 70% reverse complementary to a sequence selected from Column B3 of TABLE 1, wherein the sequence from Column A3 and the sequence from Column B3 are in the same row of TABLE 1.

27. A composition comprising an effector protein, and an engineered guide nucleic acid, wherein the amino acid sequence of the effector protein is at least 80% identical to a sequence selected from Column A3 of TABLE 1, and wherein at least a portion of the engineered guide nucleic acid comprises a nucleobase sequence that is at least 80% identical or at least 80% reverse complementary to a sequence selected from Column B3 of TABLE 1, wherein the sequence from Column A3 and the sequence from Column B3 are in the same row of TABLE 1.

28. A composition comprising an effector protein, and an engineered guide nucleic acid, wherein the amino acid sequence of the effector protein is at least 90% identical to a sequence selected from Column A3 of TABLE 1, and wherein at least a portion of the engineered guide nucleic acid comprises a nucleobase sequence that is at least 90% identical or at least 90% reverse complementary to a sequence selected from Column B3 of TABLE 1, wherein the sequence from Column A3 and the sequence from Column B3 are in the same row of TABLE 1.

29. A composition comprising an effector protein, and an engineered guide nucleic acid, wherein the amino acid sequence of the effector protein is at least 95% identical to a sequence selected from Column A3 of TABLE 1, and wherein at least a portion of the engineered guide nucleic acid comprises a nucleobase sequence that is at least 95% identical or at least 95% reverse complementary to a sequence selected from Column B3 of TABLE 1, wherein the sequence from Column A3 and the sequence from Column B3 are in the same row of TABLE 1.

30. A composition comprising an effector protein, and an engineered guide nucleic acid, wherein the amino acid sequence of the effector protein is 100% identical to a sequence selected from Column A3 of TABLE 1, and wherein at least a portion of the engineered guide nucleic acid comprises a nucleobase sequence that is 100% identical or 100% reverse complementary to a sequence selected from Column B3 of TABLE 1, wherein the sequence from Column A3 and the sequence from Column B3 are in the same row of TABLE 1.

31. A composition comprising an effector protein, and an engineered guide nucleic acid, wherein the amino acid sequence of the effector protein is at least 50% identical to a sequence selected from Column D1 of TABLE 2, and wherein at least a portion of the engineered guide nucleic acid comprises a nucleobase sequence that is at least 50% identical or at least 50% reverse complementary to a sequence selected from Column C1 of TABLE 2, wherein the sequence from Column D1 and the sequence from Column C1 are in the same row of TABLE 2.

32. A composition comprising an effector protein, and an engineered guide nucleic acid, wherein the amino acid sequence of the effector protein is at least 60% identical to a sequence selected from Column D1 of TABLE 2, and wherein at least a portion of the engineered guide nucleic acid comprises a nucleobase sequence that is at least 60% identical or at least 60% reverse complementary to a sequence selected from Column C1 of TABLE 2, wherein the sequence from Column D1 and the sequence from Column C1 are in the same row of TABLE 2.

33. A composition comprising an effector protein, and an engineered guide nucleic acid, wherein the amino acid sequence of the effector protein is at least 70% identical to a sequence selected from Column D1 of TABLE 2, and wherein at least a portion of the engineered guide nucleic acid comprises a nucleobase sequence that is at least 70% identical or at least 70% reverse complementary to a sequence selected from Column C1 of TABLE 2, wherein the sequence from Column D1 and the sequence from Column C1 are in the same row of TABLE 2.

34. A composition comprising an effector protein, and an engineered guide nucleic acid, wherein the amino acid sequence of the effector protein is at least 80% identical to a sequence selected from Column D1 of TABLE 2, and wherein at least a portion of the engineered guide nucleic acid comprises a nucleobase sequence that is at least 80% identical or at least 80% reverse complementary to a sequence selected from Column C1 of TABLE 2, wherein the sequence from Column D1 and the sequence from Column C1 are in the same row of TABLE 2.

35. A composition comprising an effector protein, and an engineered guide nucleic acid, wherein the amino acid sequence of the effector protein is at least 90% identical to a sequence selected from Column D1 of TABLE 2, and wherein at least a portion of the engineered guide nucleic acid comprises a nucleobase sequence that is at least 90% identical or at least 90% reverse complementary to a sequence selected from Column C1 of TABLE 2, wherein the sequence from Column D1 and the sequence from Column C1 are in the same row of TABLE 2.

36. A composition comprising an effector protein, and an engineered guide nucleic acid, wherein the amino acid sequence of the effector protein is at least 95% identical to a sequence selected from Column D1 of TABLE 2, and wherein at least a portion of the engineered guide nucleic acid comprises a nucleobase sequence that is at least 95% identical or at least 95% reverse complementary to a sequence selected from Column C1 of TABLE 2, wherein the sequence from Column D1 and the sequence from Column C1 are in the same row of TABLE 2.

37. A composition comprising an effector protein, and an engineered guide nucleic acid, wherein the amino acid sequence of the effector protein is 100% identical to a sequence selected from Column D1 of TABLE 2, and wherein at least a portion of the engineered guide nucleic acid comprises a nucleobase sequence that is 100% identical or 100% reverse complementary to a sequence selected from Column C1 of TABLE 2, wherein the sequence from Column D1 and the sequence from Column C1 are in the same row of TABLE 2.

38. A composition comprising an effector protein, and an engineered guide nucleic acid, wherein the amino acid sequence of the effector protein is at least 50% identical to a sequence selected from Column D2 of TABLE 2, and wherein at least a portion of the engineered guide nucleic acid comprises a nucleobase sequence that is at least 50% identical or at least 50% reverse complementary to a sequence selected from Column C2 of TABLE 2, wherein the sequence from Column D2 and the sequence from Column C2 are in the same row of TABLE 2.

39. A composition comprising an effector protein, and an engineered guide nucleic acid, wherein the amino acid sequence of the effector protein is at least 60% identical to a sequence selected from Column D2 of TABLE 2, and wherein at least a portion of the engineered guide nucleic acid comprises a nucleobase sequence that is at least 60% identical or at least 60% reverse complementary to a sequence selected from Column C2 of TABLE 2, wherein the sequence from Column D2 and the sequence from Column C2 are in the same row of TABLE 2.

40. A composition comprising an effector protein, and an engineered guide nucleic acid, wherein the amino acid sequence of the effector protein is at least 70% identical to a sequence selected from Column D2 of TABLE 2, and wherein at least a portion of the engineered guide nucleic acid comprises a nucleobase sequence that is at least 70% identical or at least 70% reverse complementary to a sequence selected from Column C2 of TABLE 2, wherein the sequence from Column D2 and the sequence from Column C2 are in the same row of TABLE 2.

41. A composition comprising an effector protein, and an engineered guide nucleic acid, wherein the amino acid sequence of the effector protein is at least 80% identical to a sequence selected from Column D2 of TABLE 2, and wherein at least a portion of the engineered guide nucleic acid comprises a nucleobase sequence that is at least 80% identical or at least 80% reverse complementary to a sequence selected from Column C2 of TABLE 2, wherein the sequence from Column D2 and the sequence from Column C2 are in the same row of TABLE 2.

42. A composition comprising an effector protein, and an engineered guide nucleic acid, wherein the amino acid sequence of the effector protein is at least 90% identical to a sequence selected from Column D2 of TABLE 2, and wherein at least a portion of the engineered guide nucleic acid comprises a nucleobase sequence that is at least 90% identical or at least 90% reverse complementary to a sequence selected from Column C2 of TABLE 2, wherein the sequence from Column D2 and the sequence from Column C2 are in the same row of TABLE 2.

43. A composition comprising an effector protein, and an engineered guide nucleic acid, wherein the amino acid sequence of the effector protein is at least 95% identical to a sequence selected from Column D2 of TABLE 2, and wherein at least a portion of the engineered guide nucleic acid comprises a nucleobase sequence that is at least 95% identical or at least 95% reverse complementary to a sequence selected from Column C2 of TABLE 2, wherein the sequence from Column D2 and the sequence from Column C2 are in the same row of TABLE 2.

44. A composition comprising an effector protein, and an engineered guide nucleic acid, wherein the amino acid sequence of the effector protein is 100% identical to a sequence selected from Column D2 of TABLE 2, and wherein at least a portion of the engineered guide nucleic acid comprises a nucleobase sequence that is 100% identical or 100% reverse complementary to a sequence selected from Column C2 of TABLE 2, wherein the sequence from Column D2 and the sequence from Column C2 are in the same row of TABLE 2.

45. A composition comprising an effector protein, and an engineered guide nucleic acid, wherein the amino acid sequence of the effector protein is at least 50% identical to a sequence selected from Column D3 of TABLE 2, and wherein at least a portion of the engineered guide nucleic acid comprises a nucleobase sequence that is at least 50% identical or at least 50% reverse complementary to a sequence selected from Column C3 of TABLE 2, wherein the sequence from Column D3 and the sequence from Column C3 are in the same row of TABLE 2.

46. A composition comprising an effector protein, and an engineered guide nucleic acid, wherein the amino acid sequence of the effector protein is at least 60% identical to a sequence selected from Column D3 of TABLE 2, and wherein at least a portion of the engineered guide nucleic acid comprises a nucleobase sequence that is at least 60% identical or at least 60% reverse complementary to a sequence selected from Column C3 of TABLE 2, wherein the sequence from Column D3 and the sequence from Column C3 are in the same row of TABLE 2.

47. A composition comprising an effector protein, and an engineered guide nucleic acid, wherein the amino acid sequence of the effector protein is at least 70% identical to a sequence selected from Column D3 of TABLE 2, and wherein at least a portion of the engineered guide nucleic acid comprises a nucleobase sequence that is at least 70% identical or at least 70% reverse complementary to a sequence selected from Column C3 of TABLE 2, wherein the sequence from Column D3 and the sequence from Column C3 are in the same row of TABLE 2.

48. A composition comprising an effector protein, and an engineered guide nucleic acid, wherein the amino acid sequence of the effector protein is at least 80% identical to a sequence selected from Column D3 of TABLE 2, and wherein at least a portion of the engineered guide nucleic acid comprises a nucleobase sequence that is at least 80% identical or at least 80% reverse complementary to a sequence selected from Column C3 of TABLE 2, wherein the sequence from Column D3 and the sequence from Column C3 are in the same row of TABLE 2.

49. A composition comprising an effector protein, and an engineered guide nucleic acid, wherein the amino acid sequence of the effector protein is at least 90% identical to a sequence selected from Column D3 of TABLE 2, and wherein at least a portion of the engineered guide nucleic acid comprises a nucleobase sequence that is at least 90% identical or at least 90% reverse complementary to a sequence selected from Column C3 of TABLE 2, wherein the sequence from Column D3 and the sequence from Column C3 are in the same row of TABLE 2.

50. A composition comprising an effector protein, and an engineered guide nucleic acid, wherein the amino acid sequence of the effector protein is at least 95% identical to a sequence selected from Column D3 of TABLE 2, and wherein at least a portion of the engineered guide nucleic acid comprises a nucleobase sequence that is at least 95% identical or at least 95% reverse complementary to a sequence selected from Column C3 of TABLE 2, wherein the sequence from Column D3 and the sequence from Column C3 are in the same row of TABLE 2.

51. A composition comprising an effector protein, and an engineered guide nucleic acid, wherein the amino acid sequence of the effector protein is 100% identical to a sequence selected from Column D3 of TABLE 2, and wherein at least a portion of the engineered guide nucleic acid comprises a nucleobase sequence that is 100% identical or 100% reverse complementary to a sequence selected from Column C3 of TABLE 2, wherein the sequence from Column D3 and the sequence from Column C3 are in the same row of TABLE 2.

52. A composition comprising an effector protein, and an engineered guide nucleic acid, wherein the amino acid sequence of the effector protein is at least 50% identical to a sequence selected from Column D4 of TABLE 2, and wherein at least a portion of the engineered guide nucleic acid comprises a nucleobase sequence that is at least 50% identical or at least 50% reverse complementary to a sequence selected from Column C4 of TABLE 2, wherein the sequence from Column D4 and the sequence from Column C4 are in the same row of TABLE 2.

53. A composition comprising an effector protein, and an engineered guide nucleic acid, wherein the amino acid sequence of the effector protein is at least 60% identical to a sequence selected from Column D4 of TABLE 2, and wherein at least a portion of the engineered guide nucleic acid comprises a nucleobase sequence that is at least 60% identical or at least 60% reverse complementary to a sequence selected from Column C4 of TABLE 2, wherein the sequence from Column D4 and the sequence from Column C4 are in the same row of TABLE 2.

54. A composition comprising an effector protein, and an engineered guide nucleic acid, wherein the amino acid sequence of the effector protein is at least 70% identical to a sequence selected from Column D4 of TABLE 2, and wherein at least a portion of the engineered guide nucleic acid comprises a nucleobase sequence that is at least 70% identical or at least 70% reverse complementary to a sequence selected from Column C4 of TABLE 2, wherein the sequence from Column D4 and the sequence from Column C4 are in the same row of TABLE 2.

55. A composition comprising an effector protein, and an engineered guide nucleic acid, wherein the amino acid sequence of the effector protein is at least 80% identical to a sequence selected from Column D4 of TABLE 2, and wherein at least a portion of the engineered guide nucleic acid comprises a nucleobase sequence that is at least 80% identical or at least 80% reverse complementary to a sequence selected from Column C4 of TABLE 2, wherein the sequence from Column D4 and the sequence from Column C4 are in the same row of TABLE 2.

56. A composition comprising an effector protein, and an engineered guide nucleic acid, wherein the amino acid sequence of the effector protein is at least 90% identical to a sequence selected from Column D4 of TABLE 2, and wherein at least a portion of the engineered guide nucleic acid comprises a nucleobase sequence that is at least 90% identical or at least 90% reverse complementary to a sequence selected from Column C4 of TABLE 2, wherein the sequence from Column D4 and the sequence from Column C4 are in the same row of TABLE 2.

57. A composition comprising an effector protein, and an engineered guide nucleic acid, wherein the amino acid sequence of the effector protein is at least 95% identical to a sequence selected from Column D4 of TABLE 2, and wherein at least a portion of the engineered guide nucleic acid comprises a nucleobase sequence that is at least 95% identical or at least 95% reverse complementary to a sequence selected from Column C4 of TABLE 2, wherein the sequence from Column D4 and the sequence from Column C4 are in the same row of TABLE 2.

58. A composition comprising an effector protein, and an engineered guide nucleic acid, wherein the amino acid sequence of the effector protein is 100% identical to a sequence selected from Column D4 of TABLE 2, and wherein at least a portion of the engineered guide nucleic acid comprises a nucleobase sequence that is 100% identical or 100% reverse complementary to a sequence selected from Column C4 of TABLE 2, wherein the sequence from Column D4 and the sequence from Column C4 are in the same row of TABLE 2.

59. The composition of any one of claims 1-58, wherein at least a portion of the guide nucleic acid binds the effector protein.

60. The composition of any one of claims 1-59, wherein the guide nucleic acid comprises a crRNA.

61. The composition of any one of claims 1-60, wherein the guide nucleic acid comprises a tracrRNA.

62. The composition of any one of claims 1-60, wherein the composition does not comprise a tracrRNA.

63. The composition of any one of claims 1-61, wherein the guide nucleic acid comprises a crRNA covalently linked to a tracrRNA.

64. The composition of any one of claims 1-63, wherein the guide nucleic acid comprises a first sequence and a second sequence, wherein the first sequence is heterologous with the second sequence.

65. The composition of claim 64, wherein the first sequence comprises at least five amino acids and the second sequence comprises at least five amino acids.

66. The composition of any one of claims 1-65, wherein at least one of the effector protein, the guide nucleic acid, and the combination thereof, are not naturally occurring.

67. The composition of any one of claims 1-66, wherein at least one of the effector protein and the guide nucleic acid is recombinant or engineered.

68. The composition of any one of claims 1-67, wherein the guide nucleic acid comprises a nucleotide sequence that is at least 80%, at least 85%, at least 90%, at least 95%, at least 98% or 100% identical to a nucleotide sequence selected from SEQ ID NOS: 10,485-15,015 or 24,166-31,319.

69. The composition of any one of claims 1-68, wherein the guide nucleic acid comprises at least 8, at least 9, at least 10, at least 11, at least 12, at least 13, at least 14, at least 15, at least 16, at least 17, at least 18, at least 19, or at least 20 contiguous nucleotides of a nucleotide sequence selected from SEQ ID NOS: 10,485-15,015 or 24,166-31,319.

70. The composition of any one of claims 1-69, wherein the guide nucleic acid comprises at least 20, at least 30, at least 40, at least 50, at least 60, at least 70, at least 80, at least 90, at least 100, at least 110, at least 120, at least 130, at least 140, at least 150, at least 160, at least 170, at least 180, at least 190, at least 200, or at least 220 contiguous nucleotides of a nucleotide sequence selected from SEQ ID NOS: 10,485-15,015 or 24,166-33,309.

71. The composition of any one of claims 1-70, wherein the guide nucleic acid comprises a sequence that hybridizes to a target sequence of a target nucleic acid, and wherein the target nucleic acid comprises a protospacer adjacent motif (PAM).

72. The composition of claim 71, wherein the PAM is located within 1, 5, 10, 15, 20, 40, 60, 80 or 100 nucleotides of the 5′ end of the target sequence.

73. The composition of any one of claims 1-72, wherein the effector protein comprises a nuclear localization signal.

74. The composition of any one of claims 1-73, comprising a donor nucleic acid.

75. The composition of any one of claims 1-74, comprising a fusion partner protein linked to the effector protein.

76. The composition of claim 75, wherein the fusion partner protein is directly fused to the N terminus or C terminus of the effector protein via an amide bond.

77. The composition of claim 75, wherein the fusion partner protein is directly fused to the N terminus or C terminus of the effector protein via a peptide linker.

78. The composition of any one of claims 75-77, wherein the fusion partner protein comprises a polypeptide selected from a deaminase, a transcriptional activator, a transcriptional repressor, or a functional domain thereof.

79. The composition of any one of claims 1-78, wherein the effector protein comprises at least one mutation that reduces its nuclease activity relative to the effector protein without the mutation as measured in a cleavage assay, optionally wherein the effector protein is a catalytically inactive nuclease.

80. A composition comprising a nucleic acid expression vector, wherein the nucleic acid vector encodes at least one of the effector protein and the guide nucleic acid of the composition of any one of claims 1-79.

81. The composition of claim 80, comprising a donor nucleic acid, optionally wherein the donor nucleic acid is encoded by the nucleic acid expression vector or an additional nucleic acid expression vector.

82. The composition of claim 80 or 81, wherein the nucleic acid expression vector is a viral vector.

83. The composition of claim 82, wherein the viral vector is an adeno associated viral (AAV) vector.

84. A composition comprising a virus, wherein the virus comprises the composition of any one of claims 80-83.

85. A pharmaceutical composition, comprising the composition of any one of claims 1-84, and a pharmaceutically acceptable excipient.

86. A system comprising the composition of any one of claims 1-84, and at least one detection reagent for detecting a target nucleic acid.

87. The system of claim 86, wherein the at least one detection reagent is selected from a reporter nucleic acid, a detection moiety, an additional effector protein, or a combination thereof, optionally wherein the reporter nucleic acid comprises a fluorophore, a quencher, or a combination thereof.

88. The system of claim 86 or 87, comprising at least one amplification reagent for amplifying a target nucleic acid.

89. The system of claim 88, wherein the at least one amplification reagent is selected from the group consisting of a primer, a polymerase, a deoxynucleoside triphosphate (dNTP), a ribonucleoside triphosphate (rNTP), and combinations thereof.

90. The system of any one of claims 86-89, wherein the system comprises a device with a chamber or solid support for containing the composition, target nucleic acid, detection reagent or combination thereof.

91. A method of detecting a target nucleic acid in a sample, comprising the steps of:
(a) contacting the sample with:
(i) the composition of any one of claims 1-84 or the system of any one of claims 86-89; and
(ii) a reporter nucleic acid comprising a detectable moiety that produces a detectable signal in the presence of the target nucleic acid and the composition or system, and
(b) detecting the detectable signal.

92. The method of claim 91, wherein the reporter nucleic acid comprises a fluorophore, a quencher, or a combination thereof, and wherein the detecting comprises detecting a fluorescent signal.

93. The method of claim 91 or 92, comprising reverse transcribing the target nucleic acid, amplifying the target nucleic acid, in vitro transcribing the target nucleic acid, or any combination thereof.

94. The method of any one of claims 91-93, comprising reverse transcribing the target nucleic acid and/or amplifying the target nucleic acid before contacting the sample with the composition.

95. The method of any one of claims 91-93, comprising reverse transcribing the target nucleic acid and/or amplifying the target nucleic acid after contacting the sample with the composition.

96. The method of any one of claims 93-95, wherein amplifying comprises isothermal amplification.

97. The method of any one of claims 91-96, wherein the target nucleic acid is from a pathogen.

98. The method of claim 97, wherein the pathogen is a virus.

99. The method of any one of claims 91-98, wherein the target nucleic acid comprises RNA.

100. The method of any one of claims 91-99, wherein the target nucleic acid comprises DNA.

101. A method of modifying a target nucleic acid, the method comprising contacting the target nucleic acid with the composition of any one of claims 1-84, or the system of any one of claims 86-90, thereby modifying the target nucleic acid.

102. The method of claim 101, wherein modifying the target nucleic acid comprises cleaving the target nucleic acid, deleting a nucleotide of the target nucleic acid, inserting a nucleotide into the target nucleic acid, substituting a nucleotide of the target nucleic acid with an alternative nucleotide or an additional nucleotide, or any combination thereof.

103. The method of claim 101 or 102, comprising contacting the target nucleic acid with a donor nucleic acid.

104. The method of any one of claims 101-103, wherein the target nucleic acid comprises a mutation associated with a disease.

105. The method of claim 104, wherein the disease is selected from an autoimmune disease, a cancer, an inherited disorder, an ophthalmological disorder, a metabolic disorder, or a combination thereof.

106. The method of claim 104, wherein the disease is cystic fibrosis, thalassemia, Duchenne muscular dystrophy, myotonic dystrophy Type 1, or sickle cell anemia.

107. The method of any one of claims 101-106, wherein contacting the target nucleic acid comprises contacting a cell, wherein the target nucleic acid is located in the cell.

108. The method of claim 107, wherein the contacting occurs in vitro.

109. The method of claim 107, wherein the contacting occurs in vivo.

110. The method of claim 107, wherein the contacting occurs ex vivo.

111. A cell comprising the composition of any one of claims 1-84.

112. A cell modified by the composition of any one of claims 1-84.

113. A cell modified by the system of any one of claims 86-90.

114. A cell comprising a modified target nucleic acid, wherein the modified target nucleic acid is a target nucleic acid modified according to any one of the methods of claims 101-110.

115. The cell of any one of claims 111-114, wherein the cell is a eukaryotic cell.

116. The cell of any one of claims 111-114, wherein the cell is a mammalian cell.

117. The cell of any one of claims 111-114, wherein the cell is a prokaryotic cell.

118. The cell of any one of claims 111-114, wherein the cell is a plant cell.

119. The cell of any one of claims 111-114, wherein the cell is an animal cell.

120. The cell of claim 119, wherein the cell is a T cell, optionally wherein the T cell is a natural killer T cell (NKT).

121. The cell of claim 115, wherein the cell is a chimeric antigen receptor T cell (CAR T-cell).

122. The cell of claim 115, wherein the cell is an induced pluripotent stem cell (iPSC).

123. A population of cells according to any one of claims 111-122.

124. A method of producing a protein, the method comprising,
(i) contacting a cell comprising a target nucleic acid with the composition of any one of claims 1-84, thereby editing the target nucleic acid to produce a modified cell comprising a modified target nucleic acid; and
(ii) producing a protein from the cell that is encoded, transcriptionally affected, or translationally affected by the modified nucleic acid.

125. A method of treating a disease comprising administering to a subject in need thereof a composition according to any one of claims 1-84, or a cell according to any one of claims 111-122.

The application's sequence listing, which the Patent Office published only in electronic form, follows.

SEQUENCE LISTING (31319 sequences)

SEQ ID NO: 1 - protein, 1108 aa, unidentified
  REGION 1..1108: note = Description of Unknown: Cas Enzyme sequence
LTAKTNIRYRVGADVGLNSLGFSAIQLDANGNPITLLKTLSYIHDGGVDPTQNKSGTTRKAMAGIARRTRNMRKRRRHRLNQLDRQLYQLGYPVDEVPESEHGLYEYWNVRSALATAYVPDKDKRDRMMVMAIRHIARHRGWRNSYSRVETLFEDVEPSDQYKDLKQRVETRLGMKLDEDMTPAQLVALTLNERDKNFMRVRTSTKYGEGILPNRLMQSDNARELRRIFTVQQVPEDVWKPILRTVFHCASPKGSAEKHVGTDPLDQTQKRALKASIAFQKYRILNVITNLRIRRKGEASRPLTVNEKQDVYELLTTAKEDLEWLDVCAVLDIERNELKGVGTLTHDGEERIGNKPPVLDTVIRLHGIKNTKLRKMMDAWWNTATEDERAAMIRLLSNTVDLDKVRDLIEYASPIEFIDGLDEDLLTPLDSISLPVGRAAYSEKTLTRLSKRMLETEDDLHYAIRHEFNVPADWKPPVPQFQEPTGNPAVDRVLKAFNRFLSQCEQQYGIPESVSIETTKESFSSIAFGRTLDYERRQRRDKDNQTRAAIREDMRKQLSNGGSFKVHDYDIRRWEIVQSQNNTCLYCGATSPRFSFDKSELDHIVPRRGVGSDSKRTNMAAVCPECNANKSNIPFAVWVHSDYAREHGITMNDVIARVNQLMFPPSMNRKQVGQVKKTIISRLKQTEQDEPLDNRSIESVGWMADELHRRLDGRYANKTVKVSTFPGSITYEARRASGIDGQIHFIGAQWKTRLDRRHHAVDASVIAMMNQSVALRLAERHYLRESQRLCGTPFGQADWKQYPNENTPGYDQYQQWSGQMKNLLHLLNKGLDEDTIPVVRSRRLRLGNSTAHDATVKPLQYVRLGDAMPTSLIDHALTPQVWKALTGLSDYDPQNGLPANPKRVITALGEVCHAKDEIGFLPGNNAQLFVNGGAADIGGTIHHARIYRCEQVLKNGKRKTFYGMVRVFQCDLMKRRKNTDLFRTPLHPADVSIRYADGKVRDAIRQGHATCVARLTINDEIKLTPEMMRDMCPEYANMFHTDSGVERRFIVAGFPSPIQFRLVPSVIAGEGLSKMVEQGLEVPPKVEKMFKLHTFVPVVNKIGHVLEQ

SEQ ID NO: 2 - protein, 389 aa, unidentified
  REGION 1..389: note = Description of Unknown: Cas Enzyme sequence
MKAHTAVRFRAYPTEEQARRINRTIGCVRFVYNLMLETRIAHYQTTWESCYPTPALYKDTYPFLREVDGFALCNAQLALEKAYKRFFEDRKTGFPKYKSKRRGRKTYTTNLSHGNIRLDDKARRLKLPKLGWLAVRQHKHIPDDWKLKSVTVEHCPSGRYTATILFEYETQIPEKVKPVKTVGLDYASHGLYVSSDGEHAEYPGYYRKMQDKLAREQRKLSHMVKGSANWRKQCKRVGRLYEKTSNQRRDYQHKKANRIVASYDMVGVETLNMKSMMKKPKPKPDYEHPGHYLPNGRKARKGLAKSTSDNGYGMFCTMLEYKLARQGKQLVHVDKWYPSSQLCHDCGCKNPLVKDLSIREWACPSCGVLHDRDVNAARNIRDEAMRIIE

SEQ ID NO: 3 - protein, 1078 aa, unidentified
  REGION 1..1078: note = Description of Unknown: Cas Enzyme sequence
MNYRLGLDIGITSVGWAVLEHDSSEEPFRIADLGVRIFDRAEHPKDGSALALPRREARSSRRRIRRHRHRLERIKALLESQGIITIEKLQEVYHGSKELTDIYELRCLGLDNLLTQEEWARVLIHLAQRRGFKSNRKKEIKENKKEKNEDGKLLAAVRDNQALMQEKNYRTIGEMFYRDDKFSLNKRNKSELYSHTVGREQILDEIAQLFTAQRRLGNSYAGEKVEQLYTDIVSRQRSFDEGPGTPSPYAGNLIERMRGKCTFEKEEPRAAKACYSFELFNLLQKINSLRIDDKNSASRPLNKEERQLLIQSAHEKADIKYTDLRKKLQLSPEQRFNTLSYGRDDVEEIEKKNKFNYLKAYHDIRIALDKVSKGRIKQLPVEHIDMIGEILTLYKNEDRITSKLRKTGLTEYDIEELLSLSYSGFGRLSLKAIKNILPYLQEGHIYSEASTLAGYNFRGHDNVVKQMYLPANNEQLQDITNPVVRRAVSQTIKVINAVIRKYGSPQLICIELSREMGKNFFDRKRIEKQIKENTDLNDAVRNKIIEYGHLNPTGLDIVKMKLWQEQDGRCAYSGEPISIQDLFDAGIADVDHIIPYSVSFDDSYANKVLVKSSENRQKGNLLPLEYMKNNPNKQEKFIVWVNTNVRNFRKQQRLLKKTITEEDRNKWKERQLNDTKYISRFMLNYIRDYLEFAPAENIGKRKVISVNGNITAYMRKRWGLKKDRLAGDLHHAQDAVVVACVTEGMIQKITRYSQYCEAKNNRSHFVDYETGEVIDTLRNRFGADFVEPWDNFKIEMVSRLSDDPALRIDAYKLDNYLDLKDIKPIFISRMPNRKNKGAAHQETIRSSRLTGEGLVVSKINITKLKLDADGEIANYYNPKSDMRLYNALKNRLQQFNGNGEAAFKEPVYKPAAPGKTISPVKKVKVIDKSNLNVAVGKGVAANGDMLRIDVFKKGDGYYWVPIYVADTVKETLPNKACVHSKPYELWKEMDDNDFIFSLYPNDLIRFIPNNGEEAFMYYIKAGISTASITVESHDRSQSIPSLGVKTLKILEKWNVDVLGNRTLVKNEKRQYYPGQTTR

SEQ ID NO: 4 - protein, 1096 aa, unidentified
  REGION 1..1096: note = Description of Unknown: Cas Enzyme sequence
MHNNSKQKYRLGLDLGTNSIGWAMLALNQENQPYKILDAGVRIFSDGRNPKDGTPLAVARREARGMRRRRDRFLARKSKLINCLIRFGLMPKDEVERKKLELLSPYQIRLKALDETLNPFELGRAIFHLNQRRGFKSNRKEQVAEDKKLSETKQNQEGLAKKIIETNSRTLGEFFYKERILKELTTRAKPDELGIYPTRAMYENEFDEIKKSQFSKQKLSEENWQEIRKIIFDQRPLAPQEKGVCQFINKFNSLPNWATAVFENYKKSSEKNKNSKGLPRSYLALPSYQKFRILSEINNLKIIKNNREEILLDGAQKRKLAEYLHEKKTANFSSLRRQIGFSADEFKFNFEGGKRDKFDGNTTEIFLKDKKHFGVNWHNFSLELQDEIVEFLLDSEDEDVIYEKAVNAWQLSEEQALEIKKITPNNFKSGIGNLSKDLLQKLVAEIAEKNCRYDKACENLGFNHSQKDQQTIQNQLDYYGKAIPASTVPVKSGSEEEIAYGKIANPTIHVALNQLRKVVNAVIKENGNPSEIIIELARDLKISQYEKREIENVQKKNQKENEDLKNELEKLGQRNGYENRLKLKLFKELEKANNGVACCPYSGKPINITNLFSFDVEIEHILPFAKTYDDSIANKTIAYKSANHIKGNRSPFEAFGDATFARIQNLPNNKKWRFYENAMEKFKDENGFQDRQLNDTRYLSKIAKQYLVQICDSNKIKVANGKLTALLRHHWGLNSILNKQEEENFDPETGEVLAKKPVKKTRDDHRHHAVDALVIAMTETRLLQQISRDNSRDHNLDRLVINLPSHWNRFREDAVEAIEKIIVSHKPDHGKNTKLHDETYYGILEKPFDLDDGKKSKEAYNLVASCSVLALKKAEAKFIRDKKLREELIKLADQAASDKEFQTKFLPEFSKKTGVKNVRFYDKNQSIIKISHPQKNPRFSKAIKTNGNHHISVWKMPDGKIKTDVVSNFKMNCSFEIKQNEKGENFINKDKKFLPKQDFEKLKPHPAAKLLIRLFKDDLVKLEENEEEKTVRIAVIGSTAQCYYFDHKNASSDTNSKKSFYLNEKGLLTKKIRKIFVTPSGKVFDSGPILKPTQEN

SEQ ID NO: 5 - protein, 1068 aa, unidentified
  REGION 1..1068: note = Description of Unknown: Cas Enzyme sequence
VIQGACQGGIRVKQSCCANTLLGLDLGANSLGWAVLSSSNGKPDNILEAGVRIFEAGVEGTIESGKDVSKAAKRREARLRRRMLDRRRRRLKKLAGLLQAAGLLPAGNIDEGEDRHKFFLDLDRSLLSKHFPAPKANGSRELHVFPYWLRARALDEKLEPYELGRALYHLAQRRGFLSNRKAPQDDKDNKKGPVKEGIGELAKSMAESGARTLGEYFSQLDPVDPAQRRIRDRWTARQMFVDEFDKIWSVQATFYPDILTEDFGKKVHRAIFFQRPLKIKKSLIGNCELERGRKCAPMALLVFQRFRLLQKVNDLKIITPEGEERALTQNEREKLVDALDIQGDLKFKEIRKLLNCTRRYLLNLEEGGEESLIGNRTAAKLASVFGEQWKDFTPEKRKRIVEDIRSIQKTDALKNRGIKAWCLDEEAAKKFSAITFEPGHCRLSRQALKRILPLMEQGIPFATARKELYGEVPPPEPVDILPPVDSADMPELRNPAVHRALTELRRVVNAVVRKHGKPGIIRIELARDLKNPRKVREKIWKRNQQNRRAREKAADTLLKEGMKRHPTRRDIEKWLLAQECSFHCPYTNEEMNFANLFDSPQFHIEHIIPWSRCLDDSFLNKTLCYHEENQRKGGCTPREAYGRDQKTWSEILTRVRNFKGSARYAKLHRFQVKDLESIDDFAASQLNDTRHSSRMAVRYLGLLYGADARGVGIDGKRRIQAGRGQITHYLRDEWCLNEILGDGGLKNRSDYRHHAVDAVVIALTDASTVKSLSDAARRARSERRRRFGSIKQPWPGFLKAVRKAILENVIVSHCASRKINGRFHEDMFYSKIRRDENGEEYVSIRKQLGGESKHLSRPQVKDIVDPIVRSRVREKLRELHTDDPRAVFSDSKNHPYLKTRDGHTVPIHKVRIRTSNTTVPLDKGMNQRRVMTGSNHHIEILEVKDKKGQTKWESVVVSRYEAIRRLRAHEPIVQRDHGDGKKFVFSLVGGDTISLEQDGVNALYIVRTISKTKKGRVTVEYVHINDGRKKTDIKSAKAWKTGDMEPLRKMKCRKVSVTPLGEVRWAND

SEQ ID NO: 6 - protein, 1101 aa, unidentified
  REGION 1..1101: note = Description of Unknown: Cas Enzyme sequence
MTKINDDLRYRVGIDVGLKSIGFCAVEVDENDQPLRLLNSMVFIHDAGVDPNENDLAKSRKLTAGVARRTQRRVRQNRRRLAELDRVLSEELRWPLPNLEDFEDPYEPWHTRAELAEHYIKDESERLEALSIAVRHMARHRGWRNPYIKVDSLLTPVEPSEFLRGLNERVGEALGREFPEETTPGQLISEYMSDPKYRESNGIRGDDGILQGKLHQYDNTAEIRKICEIQRLDHDVFKLLVRKVFFAKSPRGSAAGLVGHDQLPGQGKFIRAEKAHPDFQLFRIVSVLTNLRVREGRAERCLTPQELQGLIEFIIRVQLKQQVTWADLADNLGIERSDLRGTARASFDGSPALRFPPTDVTTEKIMASKVKWLKEWWKSADSERRGFMVDALSNSGGSTGDNDIDDEVAELLEAATEDEQAELEKIQLPQGRAAYSLDSLRRLTKRMLEEGVDLHTARKEEFNVDDDWRPEPEPIEAPVGNPAVDRVLKQVSRWLRMATDRWGEPAVINIEHTRDGLGSEKVARELLREGQRRQDLNQKNLVEIAQQLGIPVKDKRSALIKYAAIQRQNSMCLYCGAEIGFTTAEMDHIVPRALSGSTNDRSNLAAVCRACNHQKGAVPFAVWATSGEAHAGVSLEDAIKRVGMWQKGPGMSPKQHKAFQREVIARLKSRTPDEEFDGRSMESVAWMAIELRTRIDGFYRKLKAESVPSIGIYRGQLTAEARKASGFENRVNLIGGKGKTRFDRRHHAMDALVIAMMNQSVSQTLALRVNMRESQRITGQEETWRNFYGKPGQASERFEQWREGMLRAVELFNVALVENKIPFHENVRLRVGSSKAHGDRIRKFIHAKLGEPLSVAMIDRAETPALWTALTRLPDFDFKEGLPEDDSRVIYLHGRKITANERLNFFGTSAACIKVRSGYANLKTSLHHARIYRITGQKTRYAMVRVFEADLLRMTHEDVFTAPLKESAISVRTAGSTIRKALREGTATQIGWLVRGDELLIENLRLEKGEAAVLCAKYPQATSWSVDGFEDNRRLKLRPLLLSTEGIPVDEDPVIVGTIKDSWRASLDQLLSHANVTIVRRNALGEIRTRGSSLPTTTRLS

SEQ ID NO: 7 - protein, 1101 aa, unidentified
  REGION 1..1101: note = Description of Unknown: Cas Enzyme sequence
MTKIKDDLRYRVGIDVGLKSIGFCAVEVDENDQPLRLLNSMVFIHDAGVDPNENKAKKTRKLTAGVARRNQRGTVQKKRRLAELDRVLSEELHWPLPNLEDFEDPYEPWHTRAELVEHYIKDDAERAEALAIAIRHIARHRGWRNPYLSVDSLLTPQEPSEFLRGLNERVTQALGREFPADTTPGQLICAYIDSPKYAGTQGIRGDDGILNGRLHQFDNVSEIRKICEVQRLDHDVFKLLVRHVFFAKSPRGSAAGLVGHDQIPGQGKYIRAEKAHPDFQLFRMVAVLTNLRIREGKAERCLTPDELRGLVDYILEVQLKQQVTWADLADNLGIERADLRGTARASFDGSPALRFPPTDVTSEKIMASKVKWLKEWWDKADSERRGFMVDALSNSGGSTGDNDIDDEVAELLEAATEDEQAELEKIQLPQGRAAYSLDSLRRLTKRMLEEGVDLHTARKEEFNVDDDWRPEPEPIEAPVGNPAVDRVLKQVSRWLRMATDRWGEPAVINIEHTRDGLGSEKVARELLREGQRRQDLNQKNLVEIAQQLGIPVKDKRSALIKYAAIQRQNSMCLYCGAEIGFTTAEMDHIVPRALSGSTNDRSNLAAVCRTCNHQKGAVPFAVWATSGQAHAGVSLEEAIKRVRLWQRGPGMSPKQHKAFQSEVISRLKSRKPDEEFDDRSMESVAWMAVELRTRIDGYYRKVNSDSVPKIGIYRGQLTAEARKASGFENRVNLIGGKGKTRFDRRHHAMDALVIAMMNQSVSQTLALRVNMRESQRITGQEETWKNFYGKPGQANERFEKWREGMLRAVELFNIELAKNAIPFHENVRLCVGSSKAHGDKIRKFIHAKLGEALSVALIDRAETPALWTALTRLPDFDPKDGLPEDPSREIYIHGRKITADEQLNFFGTSSACIAVRNGYAMLETALHHVRIYRIEGKKTSYAMVRVFAADLYRMTHQDVFTLPLKESAISVRTSSSTIRKALREGNATQIGWLVRGDELQIENAEFKKGDIAVFSAKYPQVTAWTVDGFEDTTRINLRPLMLSGEGIADDEEPEVVKIIEKSWRVSLDLLLSGSNVSVIRRNALGEVRMKGSSLPVSMRLK

SEQ ID NO: 8 - protein, 1103 aa, unidentified
  REGION 1..1103: note = Description of Unknown: Cas Enzyme sequence
MTKINDDLRYRVGIDVGLKSIGFCAVEIDENDQPLRLLNSMVFVHDAGVDPNENKAAKSRKLTAGVARRTQRRTAQNKRRLAELDRVLTEKLHWPLPNLEDFEDPYEPWRTRAELVEHYIKDDAERAEALAIAIRHIARHRGWRNPYLSVDSLLTPQEPSEFLRGLNERVGQALGREFPADATPGQLICAYIDSPNYADTQGIRGDDGILSGKLHQFDNVGEIRKICEVQRLDHDVFKLLVRHVFFAKSPRGSAAGLVGRDQIPGQGKYIRAEKAHPDFQLFRMVAVLTNLRIREGRAERCLTPDELRGLVDYILEVQLKQQVTWADLADNLGIERADLRGTARASFDGSPALRFPPTDVTAEKIMASKVKWLKDWWNSADSERRGFMVDALSNSGGSTGDNDIDDEVAELLEAATEDEQAELEKIQLPQGRAAYSLDSLRRLTKRMLEEGVDLHTARKEEFNVDDDWRPEPEPIEAPVGNPAVDRVLKQVSRWLRMATDRWGEPAVINIEHTRDGLGSEKVARELLREGQRRQDLNQKNLVEIAQQLGIPVKDKRSALLKYAAIQRQNSMCLYCGAEIGFTTAEMDHIVPRALSGSTNDRSNLAAVCRACNHQKGAVPFAVWATSGEAHAGVSLEDAIKRVRLWQKGPGMSPKQHKAFQSEVISRLKSRKPDEEFDGRSMESVAWMAVELRTRIDGYYRKVNSDSVPKIGIYRGQLTAEARKASGFENRVNLIGGKGKTRFDRRHHAMDALVIAMMNQSVSQTLALRVNMRESQRITGQEETWKNFYGKPGQASERFEKWREGMLRAVELFNIELAKNAIPFHENVRLRVGSSKVHDDTVRKFIHAKLGEALPVAMIDRAETPALWTALTRLPDFDPKDGLPEDPSREIYIHGRKITADEQLNFFNSPSACLKVRGGYVEIGSSIHHARVYRINGKKTAYAMVRVFATDLVKMTHEDVFTTPLKASTISMRTADPKIRKALADGTATQIGWLVEGDELQIETDKYSTAAVGELLAEYPQISSWRVAGFMDVTRLRLKPYLLSREGIPADFPENFSKLIDSPGWLPSINVLLTLGVVKVVRRNSLGEPRYSRGKSLPATFILR

SEQ ID NO: 9 - protein, 1103 aa, unidentified
  REGION 1..1103: note = Description of Unknown: Cas Enzyme sequence
MTKIKDDLRYRVGIDVGLKSIGFCAVEVDENDQPLRLLNSMVFVHDAGVDPNENKAAKSRKLTAGVARRTQRRTAQNKRRLAELDRVLTEKLHWPLPNLEDFEDPYEPWRTRAELVEHYIKDDAERAEALAIAIRHIARHRGWRNPYLSVDFLLTPQEPSEFLRGLNERVTQALGREFPADATPGQLICAYIDSPKYTETQGIRGDAGILSGKLHQFENVGEIRKICEVQRLDHDVFKLLVRKVFFAKSPRGSAAGLVGHDQIPGQGKYIRAEKAHPDFQLFRMVAVLTNLRIREGRAERCLTPYELQGLIEFIIRVQMKQQVTWADLADNLGIERADLRGTARASFDGSPALRFPPTDVTSEKIMASKVKWLKDWWNSADSERRGFMVDALSNSGGSTGDNDIDDEVAELLEAATEDEQAELEKIQLPQGRAAYSLDSLRRLTKRMLEEGVDLHTARKEEFNVDDDWRPEPEPIEAPVGNPAVDRVLKQVSRWLRMATDRWGEPAVINIEHTRDGLGSEKVARELLREGQRRQDLNQKNLVEIAQQLGIPVKDKRSALLKYAAIQRQNSMCLYCGAEIGFTTAEMDHIVPRALSGSTNDRSNLAAVCRTCNHQKGAVPFAVWATSGEAHAGVSLEDAIKRVRLWQKGPGMSPKQHKAFQSEVISRLKSRKPDEEFDGRSMESVAWMAVELRTRIDGYYRKVNSDSVPKIGIYRGQLTAEARKASGFENRVNLIGGKGKTRFDRRHHAMDALVIAMMNQSVSQTLALRVNMRESQRITGQEETWKNFYGKPGQASERFEKWREGMLRAVELFNVALAKNAIPFHENVRLRVGSSKVHDDTVRKFIHAKLGEALSVAMIDRAETPALWTALTRLPDFDPKDGLPEDPSREIYIHGRKITADEQLNFFNSPSACLKVRGGYVEIGSSIHHARVYRINGKKTTYSMVRVFATDLVKMTHADVFTTPLKPSTISMRTADPKIRKALADGTATQIGWLVEGDELQLQTDRYSGGFIGDVLAEYPQLTSWRVCGFMTIDKLRLKPYLLSKEGFPENVDEALQKTVDRPGWLPALNMLLATGSVSVVRRNCLGEPRYSSVNSLPVSQLLR

SEQ ID NO: 10 - protein, 1094 aa, unidentified
  REGION 1..1094: note = Description of Unknown: Cas Enzyme sequence
  MOD_RES 723..726: note = Any amino acid
MKYRLGLDLGVGSIGSAVIELDNENNAKDIIDAGVRIFEISEGAEERRLKRTARKNLVRTKKRLELLAKKLFENGLWPNENPEGTDKLKSKSPYKIRTDALNEKLASPYYVGRAILHIAKHRGAGFVSASEETEEEILEEGEKSKAKKSSYDMMLHHLKETNSRTIGEFFYNKIISGKGNDKTVRQKKYAIEKNIVDYAIPRYLVKDEFNKIWDKQTEFYPQMKKENLKKEIYDILFYERPAAPYATGKCIYFREEDRLLKAHPLSEMRRIYEEVNNIRILNDMNKRKLTLEERDSIVNKLLLKGQNAGKQAIKKLLNLSAQHKISLVDDRVIKAYLYSRPEFANNEHLRNMNENELSSFIEFLAEPKMSKDKNARLYNEDALIEYLKPILKIDDEKEIGNLLTKLPKGRGMLGISATKIILEKLKEDVVTHREITDKLAETDKRFMAEEEIARQNQGKCFQLPYYGEILQTDTAPLPPLMINNNKSLNPDEVKWGKIANPAVHMILNQIRLVVNEIIKIYGKPYDINIELGRDVGMSTKKKKEFENRQKQNEKLNEEAKNYLKEHKIAINNKNILKYKLAKEQGWKDAYNPTQNISSVFTGMEIEHIIPQAKGGTDTYNNLCLVNCNDNLNKSDRYAYEYFEETKTQEEIREILKNARSRTPEKSWRFEADAREKYEESGDKEESTRYLTDTRYVAKMAQRYLRAIVDCSDCDEVMQTRILXXXXNKEWQPKPRIDHRHHAMDAITVACANRGLIQKMAEENDINKIHYPLPLTSVKSVADFRRKVISCLKDVKVSHKPNHSKAGQFHKETGRTVLCQNPDDPNSLITVYSRKILQVVKSAKDLTKLLIPETIKNEWHEDIAEHKAKQAKLVQDFELYMNTAEQILIAENEQGVADGKKEIKITEGRILLKAFRIIQDKGLWKGDKFRCYSNSSSMINIPKHGVAYEAQNNHCVDFYQKNGKIGWEVIKRFDVNQTDFEPQWKKESGKIIWSVQQGDILELDTPDEWKQYTDKERCLAKVKKFSDGKIAIDLITDARMTSPKNKELKYMFVNTISDKGLTYLINHKTRKVELTPFGKIKKKHKVLWNGTKTAA

SEQ ID NO: 11 - protein, 1437 aa, unidentified
  REGION 1..1437: note = Description of Unknown: Cas Enzyme sequence
MKYIKYILGLDIGSNSIGWALIQLDLLQKTKRIIAAGSRIIPMDQKVLSDFGKGITISPTAQRTSYRNARHCRERHLLRRERLHRVLHILGFLPTHYDKQIDFSKRYGKFVDNTEPKIAYNEGKFLFMDSFQEMLSDFKSHQPDLFYTKKNGEESKIPYDWTIYYLRKKALSQKISKEELAWIILNFNQKRGYYQLREEEGNKENDFEIISSKIISVIKKDKDKKYNKYWYDIILENGLVYQAAFYNDFVYNWINQDREFIIERTSLKNGAEKVKLSYLPTFDEIDKMDKKEQDKYYKKIKIKTENSIGNKTVGCYIYDHILQNPNEKIKGKLVRTIERKYYKEELKAILEKQIALQPELFTDQLLADCIRELYSKNEAQQRNLAARDFVHLFVEDIIFYQRPLRSQKSTIANCSLESRFYIDKDSHTRKEAPLKVCPKSNPYYQEFRVLQWLQNLKIYEIDTDQEVTHEFIKTLEDKQQLFDFLMDQKEIDCEELLKYFLNQTYPNAKEKALKSELKKWKDTYRWNYVYDIGEKSSKKYPMNETRYELKRYLEKVANLPDDFLSSEVEYLLWHLIYSVTDKVAYEKGLKKFAQRHHLDEDSFVENFKKFKPYPSEYGSFSEKAIRKLLPLMRFGSYWDFNHIDKNTQKRIEDLITGVENEEIRTILREKAEKYQLEKETDFQGLPLWLAQYIVYNRHAEATSLEKWTSVNDLETYLNEFKQHSLRNPIVEQVVTETLRVVRDIWQQYGQGQADFFDEIHIELGRELKKTAKEREKLSKQNQKNEDTNLSIKEKLKELEKYNTRAYSITHQEKYKLWLEQKHISPYTGQIISLENLFTDNYEIEHIIPQSRFFDDSLSNKVVCESIVNKAPYKDRQLGLEFIKNQGGRIVKELSKENKTIKIFTEEQYRTFIKEHYSNNPEKTKKLLLEEIPEKMVARQMNDTCYISKFISEILSKIVRSDEQDEGVHSKNVILCTGKITSILRQDWGLNDIWDNLILPRFERMNNLLQKEKFTIYSIEKQKKIPVVPINDQFKSFQKKRIDHRHHALDAIIIACVTGEHINYINNQHALEKGKDKKEKQKEHDKLREKLCIKKYNKGSEENYSWIFKKPWDTFTQEVRAVLEGIVVSFKQNLRVINKATNYYERWVEENGKYIKKMVKQEGTNWAIRKPLHEETISGKIYLDREKITKNDILTATRKTVDSSFDEKRIKKITDTGIQKILLNYLKFKKSLEIAFSPEGLEELNKNISLYNDGKPHKPIRKVRIFEQGSKFPLGEVGNKATKYVEAAKGTNLYFGIYQGKDKRSFATILLNEVIERQKQGLSSVPEYNEKGDPLLFSLSPNDLVYVPIEGEIIEDINFQNLSKEQKERIYKAASFTRNECFFVKSSIASLIKNYDAKTKIGELGSQNKLEVTICKGIRIKEVCIKLKVDRLGNISKA

SEQ ID NO: 12 - protein, 1510 aa, unidentified
  REGION 1..1510: note = Description of Unknown: Cas Enzyme sequence
MFSQRNNPYCELLSNSATKVSIIFFISKFFLTFFVFISFLLSLPHQNVKRMKRILGLDLGSNSIGWAFVQQDFENKQGKIIAAGSRIIPMDQKMLSNFEEGTTVSQTAERTTYRSMRRLRERHLLRRERLHRVLHILGFLPPHYDSQIDFSKRYGKFIDDAEPKIAYNNRNFIFMDSFNEMIEDFRKHQPQLFYKKSNGEESKIPYDWTIYYLRKKALSQKITQQELAWLILHFNQKRGYYQLRGEEETEGNDMEIISSKVLSVIKKDKDKKYDKYWYDITLENGLVYKAAFYNDLVYSWIDQKREFVVKRALLKNGDEKIELSYLPTFDEIAKMDKKQQDKFYQKIKVKTESNIGNKTVGAYIYDHLLQNPNQKIKGKLVRTIERKYYKDELKAILAKQIALQPEFFTENLLADCIRELYRKNQTQQQKLLSKDFLHLFLEDIIFYQRPLRSKKSTIANCPLEKRSYIDKETNERKDVPIKVCAKSNPYYQEFRVLQWLQNLRIYEIETDREVTAEFIGTAQYYEALFNFLMSQKEIDNESLLKYFLLTKNPQIKDKAAKSELKKWLTTYRWNYVYDAADNSSKKYPMNETGYELQRYLQKIEGLPVNFLTFDITYRLWHLLYSVKDKVEFEKALKKFAQKYQLEEASFVDSFKDFKPYPNEYGSFSEKAIKKMLPLMRFGKHWNFKNIDVHTQKRIDDLINGVANEDIRTIIREKAEKYQLNSETCFQGLPLWLAQYIVYNRYAEATNIEKWTSVSDLETYLEDFKQHSLRNPIVEQVVTETLRVVRDIWQQYGGGQANFFDEIHIELGRELKNTSKERERLSKQNQENENTNLRIKKLLAELKEDANIQNVRPYSLVQQELLKIYEEGVFSSTDDIEEDIQKIRKKAEPTNLEIQRYKLWLEQKYKSPYTGEVISLTKLFTEEYEIEHIIPQSRYYDDSLSNKVICESAVNKLKTNQLGLEFIQNHHGEKVRIAGNKEVTIFTEEQYKEFVKKYYANNLAKQQKLLLNDIPEKMVARQLNDTRYISKYISEILSKIVRSDEKDEGVNSKNIIPCTGKITTALKQDWGLNDIWNELILPRFERMNQLTQTQLFTSYNDRLQKNLPTVPIKYSQGFQKKRIDHRHHAMDALVIACATREHINYMNNQHALDKSKDKKEKQQSRIVLRTILCEKKNNNWQFKKPWSTFTQEAKEALEHIVVSFKQNLRVINKATNYYEKWEEKDGILVKKKVKQEGTNWAIRKPLHKETVSGKIVLDKKIGKDKILTATRKTVDITFTEKVISSITDTGIQKILLNYLKYKGSPEVAFSAEGLEELNKNIAQYNDGKKHQPIYKVRIFEEGSKFPLGETGAKVTKYVEAAKGTNLFFGVYQGKEKRTYATIPLNEVIERQKQGLPSVPERNEKGEPLLFSLSPNDLVYVPMEGEAPEAIDFSNLSKEQKERIYKTVSFTGKECHFVKSTIASLIKSYDAKSKIGELGSLNKLEVTISGDSRIKEVCIKLKVDRLGNITKA

SEQ ID NO: 13 - protein, 1332 aa, unidentified
  REGION 1..1332: note = Description of Unknown: Cas Enzyme sequence
LHYEDKTFKTGSLLFENDSKFYNQFPTIYHLRKHLLESNSKEDIRLIYLALAHMIKYRGNFLYDGLTFNIKDDSKAIEYLNSSIESLNLITGEKIDFGNCKETLDKIILIFKNDFTISQKKDDLAELLNKNKNATIKNYIQLLAGGTIAVEKIISDDSIEFEEVKNIYFDDENFAQNIQTISDVYGDLSEKNKAIISALICLKDLYDFLLLKKLLNDSMYISDAMVKEYDNHQKQLKELKDYIKKNLRDKYNEVFRIYNPKIANYTSYVGSTIANKKLRVKHCDRDEFYKYIKGILGINKVINPDTITDPYLKKVYLSISDGSYLSRQNSSSSRLYPFQLNLDEMKIILKKQAEFYPSLKEEDNRYKIENNISLFDAINFTNSDKIISLLTFKIPYFVGPLNQNPNSKNTWVIFKGEKKEKIYPWNFDTMIDKDKCGEQFIQRMLNKCTYLHDQYCLPKNSILFSTYVVLNEINKLNINGKPISYDDKMGLINEVYHRFNKPSIKQIKDYLISRHNGEGEIIITTANDKELDNLTGNIKSYIDFKNIFKDKFSESNLDMYEDIIQDITIFEDKSMLEHVLTKKYKLTKEGVNKIKGLSYSGFSRLSKKLLSGFTVDAFDDNGEMIPTDSIINILRNTNLNLMEILNKDEYGFSIAIQIYNQNELDEYKGTSGIMNYIDDLYVSSAIKRTLIQSYKIIEEVERIIKAPLDEYYIECNRTNMAKKGKNNSRKYKILSMYKEAEEVAKNLGVKERLDAFTTKAKLLEEDKFKSDAIYLYFTQLGRDIYTGKDIELESLNDYDIDHIFPQSLVKDDSLNNRVLTLGKINSEKQDIYPIPYSKIAGNFDHVSFHKLLNKLGLISDVKFDRLTRSYELTDDEIYNFVSRQLIYTSQTEKALKDLILAFKKDRNNKTPLVVMSKAENVHDFREEFDIIKCREANDFHHAHDAYLNIMVGRTLNTYFGTKIEKIKYMHENGFTTNPLRVFMNNKEKTKKNILDKDGNLVWDYNNSIGIIKKNIFENHNIYVTTRTYIGNTLFAKITIKPHGEINDFAWPIKTNGNKAFLNTKVYGGYTDLSFGYYSLFESLDKNKEKIYTLCAIPTIIKDEKNIINYVSTRYKLNNPVKVLDKLKINTVLKCGGSKFCITGKTNMQYLVKNLTQSFFTYDDQAIIKKVVKLNKFVIGNNGLDTKTGLLKDEFVVKYNIDKNANEFVISKSKAGDGIRLMQNELDTLYSKILSHFNNNIFSFYSCYSMLNLFLNNDDEINKIHNLNMFSFSYLIGQLINLLECRRLTGDFEMIGGSPSTGTLLCPAKLPKGIKIVYESITGFYSKIVWENK

SEQ ID NO: 14 - protein, 1135 aa, unidentified
  REGION 1..1135: note = Description of Unknown: Cas Enzyme sequence
MSTDMKNYRIGVDVGDRSVGLAAIEFDDAGFPIQKLALVTFRHDGGLDPTENKSPKSRKETRGVARRTMRMNRRRKQRLRDLDKVLENLGYAVPEGPEPETYEAWTSRALLASIKLASADELNEHLVRAVRHMARHRGWANPWWSLDQLEKASQEPSETFEIILARARELFGEKVPANPTLGMLGALAANNEVLMRPRRNYNAKEANNPKKAGKYLADYGTQPLMAAKVRQEDQLAELRRICEVQGIEDQYEALREAVFTHVRPYVPKDRVGKDPLNPSEIRASRASLEFQEFRILDAVANLRVRTDSRAKRELSEGEYDAAVDFLMSYTGKEQPSWADVAEEIGVPGNRLIAPVLEDVQQKTAPFDRSSAAFEKAMKAKTEARKWWESNDDDQLRSLFIMFLADATDDTAEAAVEAGLYELFESWPEEEREALSNIAFEAGRAGYSATTLSKLSEYMHEHRVGLHEARKAVFGVDDTWRPPLAKLEEQTGQPTVDRVLTILRRFVLDCERQWGRPQAITVEHARTGLMGPAQRQDILREQKKNREENERIRNELRESGVENPKREDVRRHLVIQEQECQCLYCGTMITTTTSELDHIVPRAGGGSSRRENLAAVCRYCNAMKSNTPFYRWASPEKLKETIDRVRQLKAFKDPKKAKMLKNQIRRLKQTEADDPIDERSLASTSYAAVAVRERLEQHFNEGLAPDDKSRVALDVYAGAVTRESRRAGGIDERILLRGEHDKNRFDVRHHAVDAAVMTLLNRSVALTLEQRHQLKREFNETKRENGWRDFTGLYPASQEKFLEWRKAATVLGDLLAEAIEDDSIAVVSPLRLRPQNGAVHKDTIAAVKKQTLGSAWSADAVKHIVDPEIYLAMKDTLGKLKELPEDSARSFELSDGRYIEADDEVLFFPKNAASILTPRGVAEIGESIHHARLYGWLTKKGELKVGMLRVYGAEFPWLMRESGSRNVLSMPIHPGSQSFRGMQDGVRKVVESGEAVEFAWITQNDELEFDPADYIAHGGKDGLRQFLEFMPESRWRVDGLTTNYQLLLRPAMLSREQLPSDLQEKMVAKTLTEDETLLLKALERGLSIAVNSVLPLESLKVIRRNNLGFPRWRGNGNLPTSFEVRSSALRALGVEG

SEQ ID NO: 15 - protein, 1108 aa, unidentified
  REGION 1..1108: note = Description of Unknown: Cas Enzyme sequence
MTHYTLGLDLGCNSVGWAMIAGDGETFDNGSAILAGVRVFPEGLDTRKDKVGTPPGQHRRLKRSERRSHFRRSQRRRQLLKLLVGAGLLPASSDERRELFNRNPYPLRAKGVTEQLTPHEFGRVLYHLIQRRGFQSNKRIRKSDDEAKKDKDAEKEANSLKATLDKERITLGQYLARFVPKDKDPTAHKDASGRKEWVRNRLRNDAWYHRQSFRHMYKAEFDVLWGTQTKPWGDTTKTCQPSLNAELRKAVYEAIFNQRPVWWPLDSIGRCDLTGEERCPKGHWWAQEFRMQSEINNLTVFNEDTGEVRELTSEERTTLADKLRMRKSMLFKEMHDHLVLKPEESFRSFEADARRKGLGGNAVEAALLCGGLRSWYETHGSLREEVYGTLVEIERDEARNRAYGLDEASLRQKGKTWGLSESQADELCNLMQELPEGYLQYSLSAIRKLIPLLRQGLTADKAVAAAGFKPKATPVHDRLPPLDQVAPYLTNPRVRRALSEARKVVNLLISLYGKPEEIVVELAREMKQSRKHREELLKRNKELEALNKEAEEEMRKLGQPVNEENRLRYRLWKEMMAANNACCPSPYSLPDSQRRITLTNLFTPEVQIDHIHPRSRTFCNAFSNKVLCFADENSLKGNQIPYQWLHHDQGHMDAVLRRVRGLPKEKKRRFSLQSLDGLQAFIDRQLDDARFTARQAVSYLKVLGRPVHCVQGYTTAPLRRCWGFKKDRFDNRHHAVDAIVIALTTAKHLHALSNLWADRNGSFAPPWSTFRHEVQTVMDELQRGEKNAVSRRPNRSLSGALHDEAGYGPVRDRQGKLRQGVSGLYVYATRKKVQDLTPDMINEDDTIGDATIRNIIRAECVARKLAREPTDKKDKVWLHEGKPYTIKAKPGRKLADPPPLLPARPRKPGQPITFTPIKRVRIHLNSGTAELVRKVGGRPAKYVLPEGNHHIEIYRTREGNWVGHQVSYFEGHRRWRKQVALSKKTRVPQDLVVNRAGSAGETFVTFLCEDDMVWLNNLKTGARDLYYVVSKSVDDKTKGPDICFYHHTLAKLPDKKEAARDDRVRMLRDSLRQEGRAVRVRNWPELMEKRRMEKVSVDPVGRVFPCHD

SEQ ID NO: 16 - protein, 1068 aa, unidentified
  REGION 1..1068: note = Description of Unknown: Cas Enzyme sequence
MNSNNKPYTLGLDIGNASVGAALLNDERIIALHVRTFDRAETAKEGESLNKIRRESKLTRRRLRRRTHRLQRLCQRFKRQGLIGDANPAAFVSTTSPWLLRAEGLDRQLSNKEWAATIYHIIKHRGFQSTRKSEAKEDEKAGQMLSGVTQNQRLLDESDYRTVGELAARHGAFAQAKRNKGGSYSHTFARAELENELLLLFKSQRKYGNPHASATFEESVYELLMARRPALSGDKLLEMIGRCTFEQDEYRAPKASYSAERFVWLTKLNNLRLSGLGHTRALNEAERAIALEMPFRRAKLAYKQLRTALSLPDHERFIGLRYPAAGESKDPENGILFEAKGYHSLRKKVYEDNGLKLEWARDSQNPQRLDDLAYAMTVFKEDNEARAWLLEQGIEPFIVEAALELSFSTFVRLSLKALHKILPHMEAGLRYDEAVVAAGYHHHSQIKAGVKLRYLPRPSRDQISNPVVYRALNQARKLLNAIVREYGSPQAVHIELARNLSKPLDERRKIEKEQESYRKTKQADIEQFEQTFRFTPKGLDLVKWRLFREQDDKCVYSLKPIDIERLFEAGYAEIDHALPYSRSFNDGMNNKVLVLTAENRNKGNQTPYEYLDGASESEAWRSFAAFVGANKKYREAKRRNLLRKDFGEEAASEFRERHLTDTRYICREFKRMIEQHLQLNNAEDRACVVVAGQLTSYLRARWGLIKVRENGDLHHALDAAVVAACNRAMIKRLSDHSRRGELKQMRGNYADPETGEVINLMALRQIEERFPLPWPHFRKELEARLSPDPAHNLMAIVSYPQTMAEQATAVRVSRAPTRRGTGAAHQETIRSAKWMEQGKSAVKTPLEKLKLKDLPNIVGYDDPRNSKLIAAIEQRLKEHGNDGKKAFKEPLYKPSAPGKQSPQIRTVRLLATQKSGLPVRKGIANNGDMVRADIFTDGKRFYAVPLYVADAVRAELPNRAVVAVKSESDWTLMGEGYHFLFSLYPNDWVSVKVKANEPAKEGYYAGLDRATGAISLWTHDRNRSIGKDGLIRGIGIKMAKSVEKYHVDLLGRLHRVYQETRKPLKAKG

SEQ ID NO: 17 - protein, 1167 aa, unidentified
  REGION 1..1167: note = Description of Unknown: Cas Enzyme sequence
MLHRVLLREGPGNFLKRTQMCVRCDTMCPMTTSSENIPSIRYRVGIDVGLKSIGFCAVEVDRNDQPVKLLNSMVFIHDAGVDPNENKAAKSRKLTAGVARRTRRLYRTRHQRLVNLDRVLSKEFGWPLPDLTAFKDPREPWHVRSKLLEGYIADDDKRKAALSIALRHMARHRGWRNPYAKVESLLQPAEPSDFLQGLNERISESLGRTFPDDATPGQLVDAYLAHPNYVKKPGAPKLRGPEGIVKGKLHQSDNAEEIRRICEVQQIDPADRDRLIRAVFQAKSPKGSAKERGLVGHDELPGQGKHVRAEKAHPAFQKFRIVSVLANLRIREGREERPLTAEQMSGLLDFIRDVSLKQEITWQDLADNLGIERSDLRGTAKASFDGSPVLRNPPTDVTTEKIMACKVKWLKEWWKDADDEQRGYFVDAFSNSGGSEDSGDVNDEVAELLEQATEDDQLEFEKISLPQGRAAYSLDSLRRLTDRMLRDGVDLHTARRLEFNVGDDWKPAVEPIGAPTGNPAVDRVLKQVSRWLHTATERWGEPMVINIEHARDGLGSERVARELMRENDRRRSANAAAVAEMAAQLKLSGRVRRSDQIRYFALQRQNNECLYCGTEITFTTAEMDHIVPRADGSSTNDRSNLAAVCRTCNHKKGAIPFAAWASSDQANAGVSLKGALERVKFWVRDNGMSPKQFKQLQREVSARLESRKPDEEFDGRSMESVAWMAVELRTRIEGFYRMRDEESVPSVGVYRGQLTAEARKASGFESRVNLIGGRGKTRFDRRHHAMDALVIALMNPSVSRTLALRVNMRDAQRLAGLEETWKNFYGKPGEASQRFESWRESMLRGVELFNIALSDNAIPFVENIRLRVGSSVIHDATVHSFCPPKTPDGEQLITKGYGEQHRLGDALPVELIDRAETPALWTALTRCPDFDPKKGLPENPNRTISVNGTRVGPTELLNFFGSSAACLKVRGGYVELGSSIHHARIYRIDGKKTAYAMVRVFQVDLLRLKDRDLFTTPLKPSTISMRTAEPKIRQALADGTATQIGWLVEGDELQIDTSKYSGGFIGEVLERYPEATSWRVAGMPSSSKLRIKPLLLSKEGFVDEKQAERLGVEATSEAVRKTVDTPGWWPAVNVIFGAGTVRVVRRNCLGEERWQSLGSLPVTMMLE

SEQ ID NO: 18 - protein, 1131 aa, unidentified
  REGION 1..1131: note = Description of Unknown: Cas Enzyme sequence
MCPMTTSSENIPSIRYRVGIDVGLKSIGFCAVEVDRNDQPVKLLNSMVFIHDAGVDPNENKAAKSRKLTAGVARRTRRLYRTRHQRLVNLDRVLSKEFGWPLPDLTAFKDPREPWHVRSRLLEGYIADDNERKAALSIALRHMARHRGWRNPYAKVESLLQPAEPSDFLKGLKKRISESLGRSFPADATPGQLVDAYLAHPDYVKKAGTPKLRGPKGILAGKLHQSDNAEEIRRICEVQQIDPADCDRLIRAVFQAKSPKGSAKERGLVGHDELPGQGKHVRAEKAHPAFQKFRIVSVLANLRIREGREERPLTAEQMSGLLDFIQDVSLKQEITWQDLADNLGIERSDLRGTAKASFDGSPVLRNPPTDVTTEKIMACKVKWLKEWWKDADDEQRGYFVDAFSNSGGSEDSNDVNDEVAELLEQATEDDQLEFEKISLPQGRAAYSLDSLRRLTERMLRDGVDLHTARRLEFNVGDDWKPAVEPIAAPTGNPAVDRVLKQVSRWLHTATERWGEPTVINIEHARDALGSEYVARLLMKENDRRRSANAAAVADMAAKLKLSGRVRRSDQIRYFALQRQNNECLYCGTGITFTTAEMDHIVPRADGSSTNDRSNLAAVCRTCNHKKGAIPFAAWASSDQANAGVSLKGALERVKFWVRDNGMSPKQFKQLQREVSARLKSRKPDEEFDGRSMESVAWMAVELRTRIEGFYRTRGEESVPSVGVYRGQLTAEARKASGFESRVNLIGGRGKTRFDRRHHAMDALVIALMNPSVSRTLALRVNMRDAQRIAGLEETWKNFYGKPGEASNRFESWRESMLRGVELFNIALSDNAIPFVENIRLRVGSSVIHDATVHSFCPPKTPDGEQIITKGYGEQHRLGDALPVELIDRAETPALWTALTRCPDFDPKKGLPENPNRTISVNGTRVGPMELLNFFGSSAACLKVRGGYVELGSSIHHARIYRIDGKKTAYAMVRVFQVDLLRLKDQDLFTTPLKPSTISMRTAEPKIRQALADGTATQIGWLVEGDELQIDTSKYSGGFIGEVLERYPEVTSWRVAGFPHPAKLRLRPYLLSAEGLDKEASKDMTDLLDGQGWRPAVNVVFSPGTVQITRRNALGELRSSEFSSLPITRVMR

SEQ ID NO: 19 - protein, 1089 aa, unidentified
  REGION 1..1089: note = Description of Unknown: Cas Enzyme sequence
MSTYAIGLDIGIASVGWAALALDSAEKPCGILDMGSRIFDAAEQPKTGASLAAPRREARSSRRRLRRHRHRNERIRRLFLTQRLLSAEELDGLFSGVLEDIYALRARALDEPISPGDFARILLHLSQRRGFRSNRRSAADKEEGRILEAVAENLHRMEAGGYRTVGEMLCRDPAFQAHKRNKGGDYTATITRSLVEAEAKAIFTAQRGFGNSFASEVLEDAYLSILLSQRSFDEGPGGDSPYGGSQIERMVGRCTFFPDEPRAARACYSFERFNLLQKINHIRLLEAGDTRCLTAAERKALEELAHKSPDLDYARIRKELKLPDSVFFNTVRYGKDDPAAAEKKEKFNYLKAYHVMRTAIDRNGKGRFALLSVEQRDSIGTILTLYKSEERLQKELFSVGLEPCDIDSLLSIGGFSKTGHISLKACRLLLPHLEHGLNYNEACAAAGLDFRAHGGGERSLLLHPAEEDLAEITSPVVRRAVSQTVKVLNAIIRRYGESPTFINIELAREMAKDFSERKAIDREHRQNQAENERLLERIRTEYGKRNATGLDLVKLRLYEEQGGVCAYSQKQLSMERLFEPNYAEVDHIIPYSISFDDSRRNKVLVLTEENRNKGNRLPLQYLTGKRREDFIVWVNTCVRDSRKRQKLLKETFSEEEKKQFRERNLQDTKTISRFLMNFIQDNLLFAPSACGRRKRVTAVNGAVTSYMRKRWGIGKNRADGDLHHAVDALVIACTTDAMIQQISRYAEYRECRYMPTESGSLALDTATGEVLREFPYPWPMFRKELEARLSSNPAKLIQEWKIPFYLESGRPLPGPLFVSRMPRRKITGAAHKDTVKSPRILSDEGRVLVRRPLTDLKLKDGEIENYYAPDSDRLLYEALKARLTAFGGNAAKAFAEPFYKPKSDGSPGPLVRKVKLSEPATLTVPIHSGAGVADNDSMVRIDVFFIPGDGYYYVPIYVADTLKPALPNLACVAFKPQTEWREMQDKDFLFSLYPNDLIRITHKRGLKLSVTGKESSLPPVVEVKESLLYYVSANISVASISCRNHDNSYEVKSLGVKTLEQLEKYTVDVLGEAHPVGRERRLPFTQKRS

SEQ ID NO: 20 - protein, 1352 aa, unidentified
  REGION 1..1352: note = Description of Unknown: Cas Enzyme sequence
MNKKYYLGLDIGTNSVGWAVTDENYNLYKYAGKRMWGIRLFEAADTAAERRMKRSNRRRLSRKKQRIDLLQELFSEEIVKKDLTFFIRLNESRLHFEDKSTGEKYPLFVDKEYTDIDYHKQYPTMYHLRKELIENPEPHDIRLVYLACHHILKNRGHFLINGSISDVKNLSFVCGEMIKEFNSVSEYEISLTDIRELERILSDKKTAKSVKAKQVAQLFECTPAEDKEQQKCAKIIITNLSKLIVGLKGDISKMFHQPLEEISTKSFKFTEAKYEDEIMPAIEENYPDYASVIDRIKGVYDWSVLVEILDGEDYLSFAKVKAYEKHGKNLHILKNVMKKYCKDEVYQAFFNGINEKNGYGNYIGAIRKNGHTYKMDRCKSEEDFYKGLQKTLSMIVPDQEDEELLEKLKTEVENQTLLPLARSKENGTIPNQVHLQELMKILDNAKGYLDFLKKEDEYGTIAEKIISIAKFRIPYYVGPLSRRHKGEGSNSWMIRKEEGRIYPWNFGDKVDVEQSNKEFIERMTNKCTYLIGEDVLPKNSLLYSKYMVLNELNNLKIRGNKISVELKQRIYKDLFCTMAKVTGKRILEYLKMEDPEIVQEDISGFDIDFKSALTSYLDFKKQVVGNEIEKDHYKEIIEEIIKWKTIYDDDSKMMRRMIEREYPEVFDKEQIKKICQLKYSGWGNFSDRFLNGVRGADKETGESYTIIEALWKTNYNLMQLLSKQFSFKEEIDQINAEKAGDVGKINYKNTVKDLIVSPSNKRAIWQTIQIAEEIKKVMKCEPERIFIEMARGGEKEKKRTVSRKTRLQELYAGCKDDTRNWMKEIGDREEREFNSRKLYLYYTQMGKCMYTGDEIDVDALMKGNSNWDIDHIYPQSRIKDDSLDNMVLVRKDVNNKKRNKILSPKIREDMKQYWKMLYQKELISKKKYDRLTRTTDFTDEELSGFIERQLVETRQSSKAVAELLQRLYKDSEVVYVKAGLVSDFRHDNDLLKSRRVNDYHHAKDAFLNIVVGNVYHARFTSNPRKWIKDNRDSNYSIRRVFNYDVKQGDKIVWHGSENGGHSIDHIKKTMSRNDILYTEYTYCEKGQLFNETLAKKGNEKAIALKKNLDPVKYGGYTTPKTSAFAFIEFDGKKKERKNHIVGIPVYVVNIAKREPDAVKKYLEERKGYSNVVIKKYPIKKNSLIKMDGYLARLRGANETDIILKNAVQLILNKDLYEIVRKIEKYLEYNSQYQADAKFEGFTMKDLNMIYEELYLKLKESIFQKRPAQQMKTLEKGKEAFISIDNLGEKAKVINEIITMFRCDATTVANLKAINGSQNAGSMKVKKNTLTSKSLKVVHQSITGLFETEEELV

SEQ ID NO: 21 - protein, 1214 aa, unidentified
  REGION 1..1214: note = Description of Unknown: Cas Enzyme sequence
MQNNKYVLGLDLGVGSVGWSCVLFDNDNQPYRILDLNSYIFDPSGSSVEDRRLARGARRMSRRKKSRIKRIRNLFVKYGYLSNEEIISFINVKNKEKIDIYKTRLKGKKEELTMEELCSILIHYSKGRGFKSNRKFLEENIEETKSGNEERKLLAAKQQTEKKIAEKRNYDDEYTITNLLLEIRGDKNRIRNTSGVYQVGITRAMIQDEVSMILDFQISKKVITESFKSECMEIIFAQRLFSEGPEEPSPYNNPLQKMIGVCRFTKEPRVAKSTLSYELFVLVQKLHDIRYYEENSRSIKSLEVSELTDLTKLALGGKDVTFALVEKVIGRKVNFKGLYLTKSKYFEVANSMKDKTVDEKKTLFDKEKKKKSISKLVHYKRLKNELKKILGKGYVVTTEQYDLIGDCLTQCKSDTEIENYLNGNRAAMRDVVLQQELIEAVKNIDDKHFTGYGKVSLKFLHEVLPLMMNEGFDYSRACIELGYNHTTYCDKDNDFDKMPIINEVLEDLDKTITNKSVSKTLVMARKIVNAVINKYGKPMAIHVEMARELTKSDAEKKEIENEQYENQTKNIAQKHQIYSKHSDKFRSVNSISRNDIIQHRLFIEQDGICPYTLLRTGSEQKSKIHESELFTGALEVDHIIPYSLCFDDRFVNKVLVKKQENQEKGNQTPLQCFKGEGGESKYRAWINNNHHIGLDKQSRLLADKVDVQLLNDYRARTINDTRYAAKAFKEILSYSFSSVKIRSFTGQITANLRNVYRLNSKTHSIESQEYKKIKSAGEELEKLYNELSKLIEIGVERQSKEYYQLLQKIRKTEKEDNKKNRDNHLHHALDATIIAIATDSLRRRVETHEMALRQRKFNELKIMVRVFDNETGEVSELIEKIYSKEEYKSLIFGEASLEKAIFPEPYKDFCKELLLRTYEQDKNRLRNSLSALPQYKGVDLNTIQPLFISHHYSSRISGRLHKATYYGLKEKDNQKKLTSRIPINSEKFDEKKLEKMYDKEETQKYIYEATKEWLKGCKNGSIAFKEHGGQFPKNRNGNNIKKIKLDVGVVKEEFSLKDNMNQYVEKENVVQVWVYSRKDDDKLYFVGMDRFRIMNIKKRKDLHLLLWYGQGKKHLEISVSELSKSGFCEKPTVLHKGQVLFIEKDDGSCGLAKLVGCASGMLEVNSILGDGLDLVASGLFEKKRTQYQLTVSTISSIKPISVSVLGKIESNYGI

SEQ ID NO: 22 - protein, 1088 aa, unidentified
  REGION 1..1088: note = Description of Unknown: Cas Enzyme sequence
MWRLSLDLGTNSIGWSAFRLKSAQKPQIQNIIDMGVRIFPDGREPQKGTPLNEDRRNARQMRRQRDRKIRRKRATLNFLVHNGLMPKEREEQQDIARLDPYDLRAAALERKLKPFELGRIMMQFSVRRGFKSGRKEQAEESEEKKGMLGGIKHLEPELQKQKLTLGQWLCKRREVGDSVRFIAQAEKTKIIYDFYPSREMYEAEFTAIREKQEKHFKEINWDRLHWLIFFQRPLKRPERGRCQFYTDEDRGYRAFPSAHRFRILQEINNLRYYNEENREEAIPSELKLKLFEALNSQKSLSFDRIRKLLGENYTGSFNLEDNKRDKLKGNETSFDFRKPELFGPAWDELPIQKQDEIIEKLMIEDDEKEIRDFLKPFGLTEEQIQKISGYNLPVGTTMLSSRFMIDCSKVMLKDWLPYSEAVKQMGLHHSKKGEQGIKHSLPYYGKILVGQVSGAKGESYNGNEEEQFGRIANPTVHIALNQLRKLVNALIRRYGNPSQIIMEVNRELKLSKARKDEIFREQTKNQKDNERIRKELTDLGLLQISSEDIKKFKLWEELAAEGIARLCPYCGKTISVKQLISGNVEIEHILPYSRTLLNSRDNLTVAHRECNQAKKNLSPFEAFGNSPKGFDWNRIMELAAKLPFSKRRKFFPDAMDRFHEEEGGFLDRQITDTAYLSKASKEYLSVICNSNAIWVTPGRLTSLLRGFWGFNTLLNRGHDTWYKNRNDHRHHALDALVIGLCDRGLLAEAAKLNSGRGYREIDAPPCTIERRDIEERLKSIIVSYKQDHGKEGKLYAETAMAKHSYLEQINPDELKENEIHRIVPKAIQNDIADLVQKEGFRKAKTAIQGKYKYLRVFRDKWVTRAPLENLSKQEILNIADPLIRKQIQKYVESHPLKAGQKLQDILNKFSDKTGIYSIRYFYKDQVPVQIQSCNNKAYMPGDFYRVDIWKIPQQKGKYKFEGVFISRPEAMRQKLHGEDTASLRKPHPAAKLIVSLCKNDVVKLSNETVQEFCRITGFSATDNRIDIRPLYASDTIAEWKKDTNINLTSAFWPSDINGHYYKTINVLFSEYEIKLVKITVDGRTIYRS

SEQ ID NO: 23 - protein, 1086 aa, unidentified
  REGION 1..1086: note = Description of Unknown: Cas Enzyme sequence
MWRLALDLGTNSIGWTALELDNEAKPKPIKILDMGVRIFSDGREAKTGTPLNEARRNARQMRRQRDRKIRRKNAMLNFLVNNKLMPKEREEQHSIAQMDPYILRAAALERKLKPFELGRIMMQFSVRRGFKSGRKAQQTENNAEKEGMLGGIEALKTKSKGLTLGQWLCKHREAGNSVRFKATTEKTKIIYTIYPSREMYEDEFAAIRKKQETYYKDINWDRLHWLIFFQRPLKRPERGRCQFYTDEDRGYKAFPSAHRFRILQDITNLRYYNDENIEEQIHSELKIKLFNILNTQKSITFNEIRKKFGESYTGSFNLEDNKRDKLKGNETSVEFRKPEYFGKLWDEQDIKKQDEIIEKLMIEDDESVIYDFLKPFGLTDEQVQKISGCNIPVGTTMLSSRFMIDCSEVMLKEWMQYSEAVKHMGLHHSKKEQKELRRSLPYYGEVLVGQVNGARGESFKGNDEKQFGYIPNPTVHIALNQLRKLVNALIRRYGNPNQIIMEVSRDLKLSKTRKDELFREQTKNQKDNERIKKELTDLGLIKVGSEDIKKYKLWEELAVEGIARLCPYCGKTISAKQIISGNVEIDHILPYSRTLLNSRDNLTVAHRQCNQIKKNQSPFEAFGNNPKGYDWNRIMELAAKLPFNKRRKFYPDAMKKFNEEEGGFLDRQITDTAYLSKASKEYLSVICNNKNIWVTPGRLTALLRGFWGLNTLLNRGHDTWYKNRSDHRHHALDALVIGLCDRNLLSEAAGINSGRGYREIDAPSCPIKRNEIEERLKLIIVSYKLDHGKEGKLYAETALSKHSYIEQISSDELKENEICRIVPKTVQNDISQMVQKEGFRKAKIIFQKKYKYLRVFQDKWVTRAPLESLSERDIPNIANVLLREKIQKYITSNPVKTGQKLQDVLNKFSNKTGVFSIRYFPKDQVPVSINSCDNKAYMPGDYYQVDVWKIPQSKGKCKYEGVFISRPEAMRQQLLGEKKAKRHDHPAAKFIMRLCKNDIILLSNDVDQVFCRIAGFSTTRNLIDIRPLYASDTIASWKKNTNINLTTAFWSPDIESQNFKSINVLFNEYEIKLVKITVDGKIFNRS

SEQ ID NO: 24 - protein, 1212 aa, unidentified
  REGION 1..1212: note = Description of Unknown: Cas Enzyme sequence
MNEYILRQPDLKLQSEEWLKHEFYRSAVVLGIDIGLEGIGLYLRRGPSEIFARSVILELPQTEALADRRAKRAWRHCRKNRKRRLHRLKMLFEKHGLPWLSAERMSRSNPFKERLRAVTTGVASPEALSICLRSCVAHRGFDYGGTEEGQYPWGGSSKLSDASQWLHSAVITNELKDIIECKVDELEADKNPEERRTMFRELLRERLEISLQHDMETILRDHTKGGHDNLRPRARGVNFPRKQVWEHIEKIVRHPRHKAFLSDPEAFLKELSVDPNKTRGVTPKERITNAARARRKAIFFYNRKTRPEMECHWAKKVKDCSYAQRIDPNLAGKKIICGEKGEVSIRKWSALEFCAARRVEVENITGKGKDKRSRRSLYSLSALAVKQMLGTIEQHDRALQSGDRAAAPSWDDVTAIIEKDLPVADNTKVKIATRKKGEWNETFLEQLHNLVLPSLANRKQRASLSVLAAETLFARATNDGSDINPSLFAPRLKAIGFYEWRREATLDFNPYRQVELLLGRRIKHGKKRGQLAESCQGLLRRIFIEHREALGGISAPDYCVIEVIGDAPRTRQQAKEIQAAQNERGQKRRELFAEHNLEDSGVVSKRRRITLWHQQKGICPYTGKELPKNPLDPSLEIEHIFPEALGGLSVEDNLVLTWRTVNGDKGKQTPLQFADKLGVLFEQMVAYTKEMRWNARKREIFTWGTVRENKDTQQSHYNLNGSLRVPDFGNTTRTAQLARQLRAEIMRWMQVEDKPDEATKRIGTPSGWLAAQARKSWLPPDEYQKVRSNLTHHLIDAAVLAHIPPSEGMNSIRCSGIFYVEHEPVRNQVTGETFYRLLTKTLPELSPLPRLKHWLPTNGEYAICPVQKLRRESKTQSLGDSTFWRQVSRDQPTLAQRTVLDGNALTKLKIVDGGALSAHLQRMGINADKIPSRDVLQKWINAATAAGDKDRSLPPLTLIDGTPVKNLWKFDSKGSLSSAIGWSGKCNADGTLRELRSISLKYDRLELWLGYDHTKAERACMAKLPDWQQAGWIYQKRLIPDAIALRHTKQMGFSFARDKHKLAPVFMQNNPDKPETHVSLRDLVLGKRLLPFSHKVGAFRKGDEFQLHLLPDGSIRKRTLAGQPEPKATLSSFYVVTALKYGKGNPIVELTCQLFKDKEGTPLERFTGDVLGRTVSSPDDLAFLLGMPLAVIVAKERGWRIPVAPPIVEKTK

SEQ ID NO: 25 - protein, 1469 aa, unidentified
  REGION 1..1469: note = Description of Unknown: Cas Enzyme sequence
MSSMQNSKDYFIKPTAWNPAVEWASHEFYQSSVVLGLDIGIEGIGVWLRKGPKPLFYRTLKVTLPDAAPLEGRRGKRTGRRTRQSRKHRDYLLRQWCQKWGLINEKDLQRLFVAPKKGDKPETHKPFDLRLRAITEGKKLGGPQALVICLRHIVRHRGFDYHLTNDGTYPWGDELTPTKVADWATRSVCSPSFKQEILQMFLTQGWLEKGKKNDSLSDEKREELEDENRKRVEEKLDAAIAKYLDDPIRHAIEENLREQRNTNLRTAIRGEENEHPRELVKKHIKAICDRHTDFFGGEEKMKAALAELIGADFGKEGKENHDFDENCIIDYHRKNEGERRKHAQHKTGKCSFAKRLFDGKQIVCDFNYHPDVRRFKLQLFLAERQFVAEKEGKVYATVEMRDWLFKEFLEPDIEATRFLWDEKFSKDAERQPRPPTLRKKSFEEKSGLNLMSFGPVAKRTHNGNFFDQLTDLLRQDYAVLKKRAKLCGDSAKALFKITTNEGKVFDAGTVRKNLSNYYQWRRDMERDFFGVYPQVEFLMGHRKQYNDDGQPVDKTKDGQPQYHGILRRLFAGQLRLDDGDLKKELGDATMPDYVVIETVGDIPRNEKERQEYQAEQKRKSEYKKGLFAGKHLTDDQKKQVILFEQQNGLCPYTGRELKDPLSNDLQIDHIFPKSKGGISELRNLVLTHKTTNHGKGERLPFEAANAPDNPFRDESGKTRTWKEIVADLPKMEGWRRGGQEGVWEKRDIFLLEDSSEVPDWGNTTRVAQLARQLREEVIRWLGIRNLFEHIADPKEKDNQIANKIAEKIGTPTGFMTACCRDSWLEENNLPRGFKLLEVEEDGKRKKRIIKDRDDMRHHMIDAAIISHIPPGKGMNYAPTGIFRHKPNSKEGDISMEALPGLGPNLASFEAAHKHECLVTESRRTKSKAKRFEETIYGLPDKDGNMTARVKLSDLVKRLMKSKKDASPEKIFVIFEKAGITGKIPLGKVCKKQGKPDKAEKEGLAFDAVKKWWGNWVKEFFTVEQVTAFLREKEISEETLPDAVIKDWKWKYKNPKQRVTLDSLRWFLSSNIKSWLSDFQKQTMTLPQLREFLRTKELNGEPLTDEAIEKWWDGKPERKIGAKDLSKLFRSTGVSLCPLPDERLLELFDGAMPGDNKLLLPDGTPVESIPELANNEAVTTLMPHYNREKKIIGYKQARESYVRCEIWSVERRNQIGEAIKDANDKPVLDYYKRLIPHPRGVAALRKRELKSGRKLNWHLNLTDDELKELGLWGIATAIRNQNIAEDTAAFSAKQKDYEKRLKAFNKAAKTAKGQDGLFDGEKPPEPPMQPPEREHKLSLRKIISGELPPHAEYVGSLAKGDLLRVPVKRLTESSKGHGEMCGRGEPINDDWYHWYRVTVIGGDTLNRNGRMQNGQIKFELAEHKKPSDKELKAKKEWHHRIFRKQPSEPEVLAWLLELNAGHDQPPYPAK

SEQ ID NO: 26 - protein, 1196 aa, unidentified
  REGION 1..1196: note = Description of Unknown: Cas Enzyme sequence
VKEKYILGIDLGVGSVGWSCMAVNNENEPIRIIDLGSRVFSAENGSMEDRRNARGLRRLLRRRKARIQKTKNLFISSNYFTKDEMNLFFEKEACKYDNPYLLKVKGLNNKLTIEELLICLVHYSKYRGFKSNRKVKDEHSANSTASASEDQKLLYSIQTTENELINNQWTISEYIVNDPKFKDKIKNTSGEYKIGITREMIVQEAELLLNKQIEMNVISDQFKNDYLTILTKQLSFSEGPEWGPYHNPLSKMIGICKFDKQDRAPITSYSYELFIMIQKLRNITYYEEGCRIKNRLNNEQIQKLLEEAVSGKEIKYKNIQKVIGHQVNFPGLLLTKNDFMKIVSKSKEEKNKDKTLEELKNEAKNNISVYEMKNTKILKSQLKKLGYENVEVKVLDALANLLSRYKSDDEIRKGIEEDELLKNQDQLFKAAILKLDEGSFKEFGKLSFNMLYQLLPLMINEGMDYAQAMAALNLDHSQAHKNDTDYEELPPLKEVFEELDKTVTNRSVIATLQQTKMVINAIFARYGKPVAIHVEVARELTKNDTERKQLMDMQLSNQVTNTSLKMQIFNKYSDQFTSMAKISHDDLVKYKLFIEQGGIDPYTLALTNDEMAARINEKTLFTREYEIDHIMPYSISFNDTFANKTLVRKERNLEKANNLPYEVFGRDSGYAKYEAWVRRTINDPKKQEIYLLKEIPDDLQEEFSARALNDTRYATKVICEILKYCFPSIKVKSFTGQITDKLKGVWGLKNLTHSYQNPSYILHDEFDEELKKKYDLLSIYITEEKNNKEIKKLKEEVVKLEKQRDQKNRKNHLHHALDAAIIACATDSLRRRVEIHEQNLRQNSSTMRKFKVSVVDPATGEISTQIINRTVADYGQLYDLTKNSDPRHFPMPYDSFRDEIKLRLYERDEATMKRGLMCLANYNAAQVNQCKPVIISHQYTKKVNGRLHKATIYGVAPKPKTENTVVLTNRMAVTDKKFDYKQLDKIYDKEGTQKAVYEAVKSWLSGYANGEEAYNSHKELPKNSNGNPIKKVKLDYDSPKEEILLHEEKKQYVEKENVIQTHVFRREDSDKLYFIGMDRYRVMNFKNDPVVLIWWGRSKNNRKIKYSELAREDYIPYVKLYKNQIILLELRNGAKGLCKVNGFSAGMFEITSILGDDYDILASGLQTKSKSRLIITVSTIKSIQPINVDILGKVHL

SEQ ID NO: 27 - protein, 1034 aa, unidentified
  REGION 1..1034: note = Description of Unknown: Cas Enzyme sequence
METAENNSVLLGLDIGPNSIGWSLLQPDNGTSPDVNLISGVHIFEGGLDDLETDGKGKSRNLDRRNARAVRRLLWRRAHRLQKLAVSLQGAGLLPDNSDLENPQQRNALFDKLDKEFKSPYQLRARSLDSKLEPYELGRALYHLGQRRGFLSNRKTPVKDEKELGVVKGGINDLSKKISEAGARTLGEYFANKVIPEGGRVRGHYTSRQMYEDEFELIWNKQKEYYPDLLNDEFKEKIHHHIFYQRPLKSQKHLIGECSLERGRRRAPWALLIAQRFRYLQRLNDLSYFDRDEMRERKIEGDQRKILIELFETKEKVSFGAIRKALKLRGIKFNLELGGEKNLPGNKTTARIIKAIGKTKWFSLSEREKEALVVDLRCIRKEETLKRRGIKAWGLDEEAAEKFGTIQLEDGYCNYSRQALQKLLPLLEKGVPLQTAIKELYPEQFENTGKPMDSLPPILESGLPELRNPVVMRSLTEIRKLVNAIIKRYGKPDIIRIELARELKQSPKQRQETTKRMRRNEKERNDIREQIRNETGIENPTYTDILKVRLAKECNWECPYTGTHISMQQLIGPHPQFDIEHIIPHYRSLDNSFTNLTLCEARENREVKRNRTPYEAYHDTAKWEDIIRRVERFDGPMRNAKLRRFLLQGEELEKFLDGFTNRQLNDTAWASKWAKKYLGLLYGDIKSKGIDSAGKLRVQAVSGRLTSELRRIWGLNNILGDGNTKSRDDHRHHAIDAIVIALSNPAVVKQLAEASKRAVNIGDKLLKDFPQPWEGFHNDVKRVIDGIIASHRVSKRVRGALHQGSNYGKPRKDKNGNQYVHIRKPIDGISKKEVENIVHPTTRKLVMDKLAELGESDPKKAFKEKDNHPRLMTKSGEFPIHRVTVRMNLSATFPVGKNYRTRYVISDRNHHIEIVEKPDGKWDGYVVSMFEAYQRKKNGEPIVKREFENDEKFLFSLANGEIIELDGPDNKSRALYVIRTIPQSKQLYFVPINDARKSGDIGRTGLTAIPNALKSRNCKKMLVTKLGEVRFAND

SEQ ID NO: 28 - protein, 1031 aa, unidentified
  REGION 1..1031: note = Description of Unknown: Cas Enzyme sequence
MQKKRYRLGIDLGTTSIGTALVELDGPTEHPHPTNILHMGVRIFDDGRDPKTKVPLGVARREAKQARKMLDRYLRRRKRLTDALIKFKIWPEDENKRKTFCLFNPYDVRTRALDEEVSLEELGRAIFHLNQRRGFKSNRKTDGGEDGKIRTAVAKLEQIFQSEGCRTLGEFYQKRLIKGQSIRARLEGAGAKAEYPFYPSRQMIEHEFDNIWDKQVEYYPGILTEEAKKEIRSTLLYQRPLKPAKPGKCFLEPSEDRAPIASPYFQRFRILQTINELRIIDHHGDKRSLTKEERDILLDELSQKKELKFSAAKKLLSLSNSNRFSIQDEGRDKFQGDQIAVLLGNKKYFGKNWKLLPLENQYEIVKALIDEQDTEQLISTLMVFGLSKEAAAQLSEESLPTGYGRLSVVALKKIVPFLEESVITYSEAAAKAGYNHSDNYTGEIFHYLPYYGKVLENRVMRGSGNEADNDEDRYGKVGNPTVHIALNQLRRVVNCVIKHFGAPEQIVIEVARDLKMTQDEIKDYKRHLVENEKRNERIDKELEKLGQSINRDNRERYKLWEELATDPMERCCPYTGMRIGIEKLFSDEVEIEHILPFAKTYDNSLANKTLSMRYANRLKQNRSPYEAFAEHSYKGILSYQEMLDRLPQDKVWESKRWRFEKGALDKYNENGDFQARQLTDTAYASRLALEYLKFVCPKDSVWAIPGRLTSMLRRQWGLNSILGRELPDGTFEKSRDHHGHHAIDGLVVAMTDRALLKKMSDATQTNWENQERVLSHIDPPIVDIFDQAKERLSHLVVSHRKDHGLGGALHNDTAYGIVGEFKEGTVSTVRHKIPITSITGSNINQVENSFIRESIQNLIADFGSGSSLEAAINEYSNKTGIRRVTLTEKLSVVPIKDKTGRVYKAFKPDGNYCYDIWSNGDKWEGEIISRFEANTKGAKKPDNILMRLIVGDTVCRENENKKDYLRLVKMSSGKITFAPVYEAGALKTRDSDPKDSFKYITMSPNLLKKNQIRLVHIDECGFVYDPRFKEK

SEQ ID NO: 29 - protein, 1228 aa, unidentified
  REGION 1..1228: note = Description of Unknown: Cas Enzyme sequence
MKSRLGIDLGTNSAGWAVLEDDKIKCCGVLIFEQGIPSEKGVEASQSPAADRRAFRAARRLKFRRRLRKYHILKLLIENGMCPLTLPELKNWITKGIFPIENRDFITWLNSTKESNPYYFRARAAAEKVPPMELGRAFFHIAIRRGFKSSRKDQSADKKETGELKSKISDLKKILDASGQTLGQFLYEKFKEGVRIRSEIRCGRVEHYIPEFNRICDIQGIPPELRKKIHTALFMQRPLRSQKHLAGKCNLEKNCTRCLAGHPLFERYRMLAFINTIKVTEEGSSVPRFLNDEERLALRSQFLYKAPTFKFERLKKFLIKKFFPKQTPEFNYRNDHTVGSTSLTCQLQKILQCDDLFTWQHTYADRRGGQKVMDAQTLFDGIKYFTQDYDEEGGAFAKFARERVGLGEESAKLLTEIQVPDGYARYSLKAIRKIIPFLEDGFIEPYAVYLAKLPELFGEDFFSANKAKILADFRNCVEDYCWEKKNLSERERARHLPLSERFKQVLEDKWRLSPAEIDQMYVFQEPSNYDSPTAEEEKGIEEGRLPRVKLGMIFNPMVHRSLTVLRHLVNSLRSEGQIGEDTEIHVELAREVNDKNSRMAYLEYQKQNEKERENAVKAFQERGIIPSEEQILRWRLWEEQKHICLYTGRTIGANEIFCPLEHTTVDIEHTVPRSRGGCNGMENLTICTSEYNRKVKIDNLPVDCPNYKAPAAGYEKSIIDNLKLAGFYQNLEAAEKSYADLCSKAKSAPLAARGPARQRMLLQRFKRDYWRDKIRTFEMKQEDIGGFSQRQLAATGVMSRHALQFLKSVYGKVYANSGQVTAFARQAWGLQGQYEGKNRSDHVHHAIDAIVAAALDRNTFARIGAAFHEYERNGSDRSILKIGFPWENFPADVHDATESILVNHLTRHNEMKQTKKNAVRLATPVQLTDGRVLETVPGKGDTVRGALHKLTYYGCIRDSSGSQQFVLRQPFTFKYFPSMSKFDAIVDKGVREAVKAQMQELLDGGNDFKEAMGHEFRMKTRSGKFDGPVIRHVRIFWPKIKNLLKIKKQTCLSKHEYKQHYYAATAEGGNFMVALYRPEDTKPGEKKYHYEMISLWNWAHDHRQKDYIPPERRTDKGSFVGFINPGVLVLFYKDSPEELKKMSPAELQKRLYKITKFESDGRICLRWHREARAEEDAGAAMKSKGSPILPFDTSYPLLRISPGTYQNHMLFSGIDFEMTVAGQIRFKE

SEQ ID NO: 30 - protein, 1024 aa, unidentified
  REGION 1..1024: note = Description of Unknown: Cas Enzyme sequence
MGLTTLGIDLGITSIGWGLITEDAAGIKLNGWGSRIFTPGMDDDIESGKGVSRCAQRRQKRALRIQYRRRRQRKDDLVDLLQRNDLLPTPLTPGFFIDMDKRFLMLFPVAERRVMGHLVPYLYRKKALDTKLEKFELGRTIFHLAQRRGYLSNRKQDLKDEETTGVVKAGIDALKSEMRKVGARTLGEYFCTVDPEKSRIRTRYTDRGMFQEEFRLICSAQRHLISPELEDELYKAIFFQRKLRSAKNLIGRCQIYPEERRCSYAKDEAQRFRIYSTLNHLRVAQKQQIRALTEAERAAAISVLEGFSGHLDRRGKITLAKLAKAVGLGKGEKFTLSDEEKDIHGNVLNAILYHVFGEKASSLTEKERALFFNDLNSIEKTEVLERRLRGFWQLPEDKAAEALKISLPDEYCAYSLRALHEMLPDLEAGIPLSQIRKLSYPTSTGVVYDRLPMLDGDEVDLDLRNPVVHRTLTELRAVVNAVIAKYGKPDRIRVELARDLKSSNKERERRTFEIRKREKARAEIAERIAREAQIEKPSRNDILKVMLADECNFTCPYTGKNFSMKELLYGKDIQIEHIIPYSRSFDDSFRNKTLCFSSANAKKNNRTPFEAFSGAEYEEILQRVGKFKWPFAEDKKDLFKCEKVDSEEFLARNLNDTRYASRLAVKYLGMLYGGVIDAAGKQRVFATTGGATAIVRRAWGANFLLGEGEKVRDDHRHHAIDALTIALTTPDIVKIIAGMPEELRRAKGKTPDDTIIDNAVFKQAKEMLDKAAVSHHIVNKLRGALHRETLYGKNRGGDMRHVRIGVDKLTVKDIPDIVDPVIKKLILERLEIDEDQISTITDKLLKKLVDTENPLFYRNKKGDVVNEIKAVRVKKHVTARTIGAGDGVREVANGANYLLAVFAVQDAQGNESSWEGEIVTLMDAVYRKQHDLPLFERERPGRKFKFTLKKGDIVKWNKDGVEQLCVIRGVSLPQFSCVPVCDARQQKELKNAKCWFTPTLSAAFAGKMTKYRMDILGELRRAND

SEQ ID NO: 31 - protein, 969 aa, unidentified
  REGION 1..969: note = Description of Unknown: Cas Enzyme sequence
LGLDDIKANQLSNVLPKQGYASLSLKAIQKILIFLERGLIFTHATFLANMQEVVGNEVWQNDEKQNEIIKAVVDIIENHGFENKRFFAVNSLLKVCYNNHSTYSVQAEQEYKKNIEKNLKREMGKVLWKQIEDKNGLIEKNLKEFIDLLVSGENDRKQYFAKIKRTDENIFDFLKGENETGEIFCKDDDNLKKLYHPSDVEMYKHAKIGKDGKKYLGSPRTASVKNPVAMKTLHQLRHLVNALIIENIIDQDTKVHIELAREMNDANVRKAIESWQRDNQKKRDKYIEQIITDYKAETGKVIEPSQDEILKYQLWEEQNHICVYTGKTIKMSDFVGADPVFDIEHTIPRSMSYDNSLENKTLCYNRYNREIKKQSIPFDLANYEKKHTFSTSSEKLKCRAILPVIEHWKGKYEALDKQIQTKVKQSRAAQTKEAKDKAIQARHELTFERNYWRNKYRRFTMEEVPSGFKNSQLNDTRIISKFARAFMKTVFDKVYVINGKTTDEFKRIWGLPGKDRGNHIHHAIDAITIASVTKQKNNLLANFYQDEEKYIKPKFDKPWGTFTQDVKNVVNDTLIYHVQEDNAIKPTKKKLRKRGKIQYKTDIQGKFILDKKGKKIPIYLQGDSIRGSLHQDTVYGAIQEKGYIPKQNDKEIPIKYVVRKKLEVSDNGFKTKTDLNKIVDETVKQMILAQIEENGNFKDAINEGVFMLKPMRDNQNKIILNKKNEIEFERNKNGTFKTGHPIKKVRIYTPSVKTPLHIKKHRDLSKHEYKQDIHVVNETNYLIAMYESQTNKEKTIRDYRIVNLLDAAEYFKKSNSSHRENYPIVEDVIYQNEFELKHKFNLKTGMKVIILKNNEQDISFADISWLHSRLYVVRGIDADGIKLYHHQEARQTTDVIKHMNEVINRKNISNNILDKNEKIKISKLTTPKGGDIFDKFKDFPYIKFKVSNFNALIEGVDFIISDLGNIKQV

SEQ ID NO: 32 - protein, 1571 aa, unidentified
  REGION 1..1571: note = Description of Unknown: Cas Enzyme sequence
MAKILGLDLGTNSIGWAVVDDEKNKIIDTGVRIFPEGIVRDKGKEKESKNAERSRDRQTRRQYYRKRLRKIKLLETLIQFEMCPLKIEELKIWSKWDKEKGKEGREFPSSDEFKMWLKQNPYELRKKALNNNLTLYEFGRILYHLIQRRGFLSNRKSNDEGKIYTGKDNMTGIDDTKSQIKDSTLGNFLYSIYPKENEPYKKITDKNGNELRIRARYTLRDMYIDEFHKIWEKQARQLGLDEKKYEKKKIRFIKGNIDNNRNKKKIENLIDKYGKENVIIEDKKITTIENIHLKKFLAGDIEYKNGELKYKSNESVLFWQRPLRSQKGLLAKCSLEGRKFFDKENKKWIEIGPTPAPLSHPDYEEFRAYQFINNIEYGIKQQLHESQKQQILELINSKDSNFKFNEIPKKLKLEYEKFNYEAKHSVPGNYTTKHLKPLFEKKIWEKHKKDIWHCFYFFEDNDKLIDKLKDKFGFDEEKYKDKILGKIGKDGKRGKGIKLKDGYSNISLKAIDNILPYLRKEYKFSDAVILGGVRNSFRKTVEKKQVDRWEYFKDFHKQIEDDVIKILKDKTNKEGEAIEKIKSYLSNPNNNYGFEKNDKSFSKLYHHSQQIEKKQLKNKIDTVENLRNPIVQQGLNELKRLVNILNEKHKKFDKINVELGRDLKNSKVKREEIGYRISKNEKKNNDARALLTDYGLQHSRENIQKVLFYNEIQEKANIVRCPYTNIVINIADLLNPENKIQIEHIIPRSISLDDSFANKTLCEAKFNGLKGNKTPYEFYKLNNDKNLWQANSWEDVEQRAFKLLPYNKAKRFCSKTEFKADSFIERQLNDTRYISKKSAEILSQICEDVMVMPGSLTAELRHLWGLNNILQPAFKVEIPDLELKINKVIPYYIVLDEQNKLIKSQHIYNKKPILENNETTISGKIDNSKFKSTERFVKFETKATDIENGEYWAKIKLSAPKEIIRIFKDKPETTENEIVLRGKIENKKFKNDGISAVSTLISENGSYWAKFLIINKKFEEPQKDKQPKKTGKQILLFGNVKEGVFSSYIYQCETNLTNGKYWAILDLDFENVEFDKTMNDKPNIKNNQILIQGVTNDENIFVSDIDKEHSFNMQKSAGKYWVVFDITSEIKEFIKIKNDAPELEEKQTLIEGNIWVDKYTGEIKFDPKKNREDHRHHAIDALAIALTKQKYFQKLSTRNANLDEKKRYNKFEKEQLNFPEPWNNFYKDAKIAADKMIISHKQNKKVLTEVVKKINKNGKTHTSKGMAVRGRLHKEFVYGKHPKPIIKDGKFVFEGKKIELETDKNGDIKYYYHIRKSVKDLKTETQLNKIVDINVRSIIINAKKEETKINKEIEEIEKQLKKSQTKLEETTLQLKIKELKLSINNLYTLNNKNGEPVPIKKVRIREEIRNAEKLKDINQWVNPRNNHHIAIYENENGVLFEKVVTLWEAVERKKQGLPVIDKNPTDGSKFVQSLGKNEMFILGLSNEEFEDNKNNNKFLSKCLFKVQKIAGGDYFLEICFRHHLDSRKAKYAEKDYRYIKGFGTGKTGWQTFNPIKVKISPTGKITKIKKQ

SEQ ID NO: 33 - protein, 1315 aa, unidentified
  REGION 1..1315: note = Description of Unknown: Cas Enzyme sequence
MAKILGLDLGTNSIGWAVIDDEQKEILGVGSRIFSEGVNIDSKNQSETSKNKVRRGARGARRLNYRFKLRRKKLKTILKEIGLFPDNKFYTNKKGNKKEHTIELYKLRKDALEKEIRKENLGRIFLQINNHRGFLSNKKEEGEAILNDEKNENLGTVIKAIKGLQGKIDLAYNKNKIKHPYIGSYYYYLIEQNKDSFNPNEPIERIRGEKHYTLREMFEKEFDAIWEFQSQYHSELTPENKKRIKDETIFYQRDLRSQKHLRNKCIYKYKTYYKKDKEKNYIKDKNGDFIEVKKYLDCAPKSSFEFQEFRIWEQLNKLQYKIKGNNYYEELKDNQKNILANKLDTLIQIKLSGKIEEKDKLYLNQLIIELGINKQARFNQNRLIGNVTKAKLIEALGKDFWNKLYPKEGSADNEPIKYSNEQRTLWHNIYFSSNFIKHIDWLKGEQKSNGPVLRKNRKKQIQNTTWQKTVKKIGLNDEQLEKYSRIAFEPDICSYSTKALKELLSYMKQGYNPTKAATELGYESASDIRNNNSQLEYKIPPLKNNELRNAVVQRGVTEAIKIINTIIEEKDDRGQLKYGKPDEIRIELSRELRKSKDVRQKMHQRNEDKRKEREKYAEILSEIKGIQIDPSSDLIRKFELYLELDFSKQSIDDIKQFIDIKVFNTFCKNIDIRDHEKYKLWKECKRVDPYENRPISLSQLLSSVIEIEHIVPFSKSHDNSFLNKTLAFRDFNAKKLNKTPLEYFETLGKEEGKFLKQIKKFSKEKRKRFLLKSDEIEGFKNNQLNNNAYIATELKKHLWNSFPSNKVNVTNGVSTSIVRRLLGFNSILNPSFIVRQELENGKYWVRIDDSDNIIEYKKIKKEDKTPSSEKNIKIIEGYISYNEQKQTRYFYPKKSRDDHRHHTVDAITIALINTKINQIIANNSIIADADIKRIEKLSGKAKEDEYQKLNKFNEYGQFKKEVIEKIRDEIYKELRGFYNLRGNAVNFVKNTLVSHRFDQRITASSKKKVYKNGKPLNKNDKQVYSGGDVAQGSLHEAYFYGKTKDCSDGEFVRRIKVEDLSSNQIELIVDEKIKNIIKDGIKKYDDFKKAIKEGFFLKNEGKRKKRLNEYDENIPRKPVPIRKVRIKYKSKMIPLRPSENPKLFAIPGDNYLMAIYQQDTDKPNSKRDFELVNFFDAVAISKKSSEKKYGKLDLYTPISQKNNFPLYQVIKKGDMVLLYESSAEEEIKWDDNEDLFMRLYQITGLNISPNNYGRIYLMKHNDARKSSDLGTPITGAFKFGDNKIKRMLYHTQFNALIEGKDFKISTTGKITKIGK

SEQ ID NO: 34 - protein, 1537 aa, unidentified
  REGION 1..1537: note = Description of Unknown: Cas Enzyme sequence
MAKILGLDLGTNSIGWAVVDDEKEEILGIGSRIFPEGVKADTIGKGDKEESKNASRRNSRQQRRQFYRKRLRKIKLLRTLIGLNMCPLSNDELDVWAKWDKTKGKAGRKAPNSKVYEDWHRMNPYLLREKGLQNDLTLFEMGRVLYHLIQRRGFLSNRKGKDDGKIYKGKEGMTGISETQNQIAGKTLGSFLNSIYPKEGEPFKLITDENGNELRVRARYTLRDMYVDEFYQIWNRQEKGLGLNALTASKTKMRILNGNLKNKRNHNKIEKLINKFGDENVKIEEIKTEEKGKQFKVTTTEKVLLKLYLGGQIDKDDEGNLKYKSNESVLFWQRPLRSQKGLLAKCRFEPDVKNKEGKFLQKGKTPCHLSHPIYEEFRAYQFINNIEYGRKQKLEENQRLQVLELINSKDSNFNFSDIPKKLKMEYEKWNYDKNSKVPGNHTTKHLAPLFSEEIWETKKEEIWHCFHFFEDNDKLIEKLRKGFLLKENDTEKIEKVNLKEGYSNVSLKAIRNILPYLQKGLQMSDATILGGVRNAFGERWDYFKEFHNQIENDVIKILKDKTNKEGEAIEKIKNYLASSNNNLGFSKNDKNFIKLYHHSQEIEEKTLKEKLDTVENLRNPIVQQGVNETRRLVNQLIKDYGKFDRIQVELGRDIKNSKKGRQEQTKRIYDNTAKNDAARKLLTEYGLKHNRDNIQKVLLYKEMQDKGVVTVCPYTNKSININDVLGRENKIQIEHIIPKSVSLDDSFANKTLCDSKFNALKGNLTPYQFYLKNNDSNLWGGVNSWENIEQRVYRILPYHKAKRFTSKIKAQDEEVKSSFIERQLNDMRYISKKTKEIMSQVCEDVRVLPGGLTSELRHLWGLNNILQPIMAVDIKNLDIEEGKVIPHYIVIDESNSPISTIPIYNKKPKLEPNETTIAGKVEKGIFRTIEEYVKLTIETPDLPNGEYWLKLKLSSPKEIVRIFKEKTDSTENEIVLRGKIEKEKFKNDGIGLVNAKGFENGTYWAKFTISNKKFELAQKDKQVKKTGKQVLLFGEIKDGFFKSFIYECETNEIDGKYWILLDIDVENTLFEKAINERPLISDTKIIIEGSVNDEGIFVSEIDAEHQFKTNENQGKYWVVFDIVNELTEFSAIENQRPALEEKQTLVEGNIWVDKYTGEIKFDPKKNRDDHRHHAIDALAIALSKQSYFQQLSVYNAQRDAKKKGLSFDKEQLNFPEPWQSFHADAKKEAEKLLISHKQNRKVLTEVRKKITKNGKTYTSVGNAVRGQLHKENVYGKRQAPYETTEGYHIRKKVADLKDNQLEKIVDLEIKKIIIDARKEEAIIKKQIEALEKQKKKVRTDEEENNINNQINELRNNIQLLYTLKNNKGGERVPIKKVRIREEMSNAQALKEKLHWVNPRNNHHVIIYKNEKGELKESVVSFWEVVERQKQGEDTYQLPKEDGREIVTTLQENDMFVLDMTDDEFEDNKSNLSYLTKYLYRVQKLSKKQKSFEFFFRYHLASTLNNQIEGVSVQSFKKWVELNPIKVKISSTGVITKI

SEQ ID NO: 35 - protein, 1206 aa, unidentified
  REGION 1..1206: note = Description of Unknown: Cas Enzyme sequence
SQADPRENPSPQGFDPAIYYAHKLPEVNMKSQAIQSPAEYAAVRRAILERWQSHEFYRSAVVLGLDVGIEGIGVWLRKGSECLFRGTFVTSLPTAAPLAGRRLLRAGRHARQSRRRRDRMLKEWVVGYGLLDRARADALWANPRAFERAYEHRWRAISEEKALASPEALVVCIRHCVRHRGYDHHILFRDENATYPWGDELKLDLIREWGKRGVLPEEYGNELKLLVEDVGDFSGEKLVEALRVIDEAIARYKGDPIRRLLDEHLRERQHVNLRTAARGHNFPRELVKAHLRQICERHRQFFPADCFEEALRQLIGPLENGVEKYDSKSESIMDWHRRTPAEAKRLWERREGQCLLAPHLIAAGLLPQGTYRRASAGADAVRRWKVIQFLAERRVELASGARAHGTDGIIRDALAFVEADNTARRERRRRPRAPNMVKAIEKALGKLAPKKDSRLNADFFDQLGDLLKPALSKLGGKAPLSAETAEALFRLATDNGSNFEPEAIRARLNDAGYYDWRKQPGAERAFYHQVDYLLGDPRQYDPETGEPRDRRDGQPRHHGILRRLFAGQLRLDTGETVDLRDRLEGRTVPDYVVVESVRDMPRNTDQRREFQKEQKARREERRQLAERYGLDFDRLTDNQVRRLFLFNEQANRDGEAFCPYTGESLGRNPLAADLEIEHVYPQRRGGLSIMENLVITRRATNDQKGNRTPVEWLGFEKAAALAARMRWSERKKQVFLWREDGCPEWENLTRTAQLARELRRRVVEWLGIERRHAHIADPTERALARQAEERRRVAAPAGALTAACREAWKDALPSDYFLPGERQGRTILIKNRGNLRHHLWDAGVLAHIPPGDGLNHILYGGIFETAGAGDAPRITPLPELAPNIADIEKADPLSCRVFRLRPRHRRESRTTQQPVSLPDAEGRSWQRVTIGKMINPKDTVVKSVEPENLLAAVRKAGLGPERISDAEIERWKNDPRPIETHPLRLRDGTPVYSLRLPIVQQKNEYGQHPHLTDAATAPNAPAYRTRDGRRESRLIGVKGATDTYDRMEIWRGPDLDRKGQPRLDVEGRPKWKYFSFPVPTARNLAAYRRMWGKPPAIRRPEGATERVGVIRKGDLLLAPFGPCAEGDVQLVADGAEAFARLWLRVTSIKESGEVTLTLAEHEDFSTTALKFVLKPDKATWRPASPQVLARLLREKVAVFERISKIM

SEQ ID NO: 36 - protein, 1562 aa, unidentified
  REGION 1..1562: note = Description of Unknown: Cas Enzyme sequence
MSKILGLDLGTNSIGWAVVEKNKINNNEYKTTLKDKGVVIFSEGVKIEKGQESSKAAERTDFRSARRIKFRKKLRKYETLLVLVKEKMCPLLENEVKAWRKSGFKKYPNNPNFTSWLQTDNFGEKNNPEHKKIRKTQEDNPYFFRDKFSRQKYDWVNDKTLKEELGRAFYHIAQRRGFLSNRLEQSDDSIIEEHKEKIEEILDMINDSIELLGKINQLFEPFEFEGKNEKDLDATEKKLNRTRKYALLVIKDKVKGKNFSTISEKREEIRKYINKPENIGPVKGYIKTLSNEIEEANCKTLGQYFWNLYKSDRNKPENKIRTNYTAREEHYLHEFEIICKTQRLEGINENEKSPDKKYYGLVKELYNAIFFQRPLKSQKGLVGNCSFEKNKPRCPVSHPLFEEFRMCSFINNIKIKTPDDEKLRALTKEEKEKITPKFYRKSKPHFDFEDIIKELKTKDRTHAFYKDREAKKSDYLFNFKDNTTVSGCPTSANLKSIFGDNWKNVSYNYETINKEKKIINRKVNYHDLWHILTTFTSEDKLKDFALEKLKLDKNDADKFSKISLKKDYASLSLAAINKILPYLKQGLIYSHAVFMANAEKVVDENIWKNEQKRNDLQNEIKLIIENNTLDNQIKQVINGLIKNCKKSNNNFTYNEQSKESYKNDVENALNSFYGKNSWKELENNDRILETSCKTFFEQLKEKGGTGDFIKPKRTDEKVIDLLLGKNETGEIYCSDESRIKKLYHPSDIEKFKPIIIKDKNDNKFIGLGNPATPSVRNPMAMRSLFQLRKLINTLTLEEKIDQNTKINIELARELNDANKRNAIERWQREKKELHDIYAKKIKELYLAEQGKEIEPSYSDILKFQMALEQREDGKIISKEDILKYQLWEEQKHICLYTGNTIGLTDFLNENPKYDIEHTIPRSISEDNSQMNKTLCDNKFNRDIKKQQIPFELSNYDKILPRIEHWKKKYEELDNKIAQAIRATRTATTKEKKDRQIRERHYLAFHREYWKGKYERFTMKDVPQSFKNSQKVDIGIISKYAREYLSSVFKNKYGNSNVSSIKGEMTAEFRKAWGLQESYYNEFGKKNYKPKDRSNHIHHCIDAITIACIDKNKYDTLAQVWSLEDKGELNKAREELEKSKPWKSFTQDVKTIIDEVVIVHNKPDNVKKQSKKALRKRGKKQYVIEYEKDSRGKRVPKRDRNDKIIYKPDKEGNKIPIIQQGDTVRGSLHQDTFYGAIKQPELENVKMKFDENGRKILKKNKKTGKEEIKYVVKRILSNLEDKDIKNIVDERIKMIVLQGRKKEKELKNEIEKLSKDIKQAADFEKSEIEKQITTLKNKIEKKLYVIPPKNGKNIYTPIRKVRCIANDVKTPLKIKEQRTKSKKEYKQHFNVKNEENYCMAIYEIKDENGKIKRSCKLVNMLEAGQYYKLSNKKHRKLYPIVPEKNIENEYSLKYILTKGLMVLLYEKHPEKIWEISDKERLTRLYEITQLDTEQSCIKLLYHQEAREKNKITKYMGLKSGMKGGKNIGKFKEFPWIKIGPNDFDALVEGFDFNITPTGKIKKI

SEQ ID NO: 37 - protein, 1111 aa, unidentified
  REGION 1..1111: note = Description of Unknown: Cas Enzyme sequence
MSRILGLDLGANSIGWSVLDTEHKQILRSGVRIFPAGLNDFDTNKEQPKNAARRDARQIRRQIYRRKMRKQLLLKLLIEYDMVPLSKRDLLTWKQNDVFPTSADFRKWIALNPYTLRSMSLHQVLSLHELGRVFYHLIQRRGFLSNRKSKGEEDGKIFSGNPTDGRIGITETRDRLVEHGTLGAFLASLDPAKERLRNRYTERQMYIDEFDAIWEHQSKHNSLLTDDQRIRIGGRVKSKDSIDGVLFHQRPLRSQKGILGKCTFEPDKPRCIKDSLLFEEFRILQTANHLEINGEKLNEEDRQKVIELFLIKDKPKFKEVRKLLKLMGPGYHSNWQDEDILPGARITASLRSVFGEKWRYLSEKEREDIWHILYTADDDDWLKDYAAQKWILDDTAINKLLKIHIKPEYGSLSRKAILNILPFLRDGYLYNQSVLLGGIRNAMGADAWDALPDKETIIDTVLSFTFRSGDGTIKDQLSDFCKLHLKMTDKQTAKLYHHSITSNEIVIQDSLGEPPIARNPLVMTVLFDLRRVVNSLIQEFGKFDRIHVELARDLKKTSDERSKIKSDIAKREKEHIEIDKELAKYDIRITHESRRKYKLFKELKQKCCPYTGKGIQIGYGGSGLNLFSGQVQIEHIVPWSRSLNGSFFNLTLSDADINRAKGKLTPFEYFHDQMGEEVWNKAKARAKDILPYDKFKAFTKKDVDDDFTSRQLNDTRYASRLAKDFLKQVCSFVYVFPGGATAELRHMWGLNSLISDDNRKDRRDHRHHAIDAITIAALNANHLHQLARWNRYQKSFEMTPVDDPWEEFRDQAQRSIDEILVSYRQTDRVVTRRKGTFKRNGRVFQSDGYAARGFLHKETIYGKRTPPGSNEQRYIVRKPVDGLTKSAQIEKIIDPVVRRVITNRLIDLGVDITARKYDVPKGAFFHTSEDGTKTPLLYMPSKSGKRIPIRKVRMEENLGNAVAVTQDQTQWVNPRNNHHIAIYQHNDGKLEEVVVTFWDAVQRKMHSGHVFQRQLDNGAQLVTTMQMNDLFLLGLPHEAVLEVLDIQTIWKCLYRVQKLSSSYYVFRLHAESTISRDEKGYFVSIQSMKAWVEHNPIKVHLDPSGKLTLAI

SEQ ID NO: 38 - protein, 1534 aa, unidentified
  REGION 1..1534: note = Description of Unknown: Cas Enzyme sequence
MAQILGLDLGTNSVGWAIVDDKKNKILGMGSRIFPEGVIAKTIGTGEREESKNAARRDSRQQRRQYYRKRLRKIKLLRVLTDFKMCPVTHKELDAWAKWDKAKGKTSRKAPTSSEYKNWLYKDPYILRDKALKEDLTDYELGRVFYHIIQRRGFLSNRKGKDDGAIFKGKEGMSGINDTQNQIGESTLGSYLSSITPKKGEPYKKIVDENGNELRVRARYTLRDMYIEEFSQIWERQAKVLKLDDKTAIKTRMQFLKGSLENKRNKQKIEKLFTKYGKDNIDIEEIVSDKNETILFKVVSNEKVPLKIFLGGEIYHDEEGILKHKSQESVLFWQRPLRSQKASLAKCRFEPDVKTKDGKYIQKGKTPCHISHPLFEEFRAWQFINNIEYGKRQSLDQNQKESVLDLINSKDKSFNFSDIPARLKMTYETWNYANDFKVVGNYTTKHILNLFSTEMFEKNKEELWHCFHFYEDSDALIAKLNKDFGLLEKDEAKIDKIKLKEDYSNVSLKAISQITHFLKKGHKMSDATILGGVKNAFGKYWDYFKESHELIEKDVLMINRDKSNKEGEAIEKIKLYLSENEFGFEENDKRFIKLYHHSQEIEEKPIKENIGAVDNLRNPIVQQGVNETRRLVNQLIKEYGSFDRIQVELGRDVKNSKEGRQRQSYRINENRTKNDEARKLLSDYGLKHTRENIQKVLLYKEMQDKGVLTICPYTNKAINISDVLGRENLIQIEHIIPKSISLDDSFANKTLCDAKFNTLKGNLTPYQFYLKNSDAKLWGGASTWEAIEKRAFNVLPYSKAKRFVSRIKTQDIKVQSSFIERQLNDTRYISIKTKEMMLEVCKDVRVLPGSLTSELRHLWGLNNILQPVLNIDLPTIDIEENKVYPHYVVLDSENNKALLTSPIYAEKPALKANECTIVGLIEKGVFKANEKHISLKLNTPSLNNGEYWLKIKLSEPKKQIQIFKDKPEATEENIVIKGKIEKGKFKNDGLGQLVASGYDNGSFWAQLAILNKVLIPPKKDEQPKKSSKQILLFGEVKENVFKSFIYECATNEPDGKYWLLIDIDTETAEFSKAIHDKPNVSNQEIIIEGTVNSTGLFVSELDVDHQIQTDLKQGKYWFVFDQLGELNDFSPVLEDIPTLKANQTLLEGAIWVDKYSGEIKFDPKKNRDDHRHHAIDALVIALSKQSYFQQLSIYNGVKEAKRKGHKFDKEQHKFPMPWESFHSEVKQEAEQILIAHKQKTEVLTLVKKHLTKNGKRFLSVGNAVRGQLHKENVYGKRQAPVETKPGYHIRKAVSELKDNQINKIVDPVIREIIREAKKEETLIKAKIATLEKSKKKTKTEEEDRLINKQIEILKEDIQVLYTLKNTKGGERVPIKKVRIREEMSNAQILKDKNQWVNPRNNHHILIYKTSNGELREEIISFWEVVERMKQGEDIYQLPKAEADAEILFTLQENDMFLLGLNPEEYEDNKDDVNILSKYLYRVQKISSKDYSFRHHLASTLNNKEQEIRIHSIKRLNEFNLLKVKIDLNGNIGLI

SEQ ID NO: 39 - protein, 1485 aa, unidentified
  REGION 1..1485: note = Description of Unknown: Cas Enzyme sequence
MTKILGLDLGTNSIGWAIVEKDNDEFSLIDKGVRIFSEGVKSEKGIESSRAAERTSFRSARKIKFRRKLRKYETLKVLVKNKMCPLTIEEVEKWRKSGFKEYPLNPEFLKWLRTDDEENINPYFFRDKASKQKTPLFDLGRSFYHIAQRRGFLSNRLDQSADGIIEQHKPNIEDRIEEAQNSVELQNELKDYFEGVDILDDTVKGGFKKDLDEGEKKLKTLYNSFLKIIKDNVIDFKKTKVELGERLNRKEDQGVVKQKISEISEAMKDGNFKTLGQYFYSVYNIGKIRNQYTAREEHYLAEFEIICKAQGIEGINDKELLPEKKYSGLAKDLYRSIFFQRPLRSQKGLIGKCSLEKSKSRCAISHPNFEEYRMWTFINTIKIKTPEDESLRFLTAVERQKLAPKFLRKKDNFNFEDLAKVLLPKGATFDFYKSRNANTVNYLFNYKKNASVAGCPVSASFKNVFGENWKDKEFTFKTKNKKGETVTRKVDYKDLWHLISVSTSDIYLQEYAKEKLGLDEKRAKSFSKIKFKKDFASLSLNAITKILPYVRAGLLYSHAVFMANVENIVDEKIWNDEKQRKYIQNYIANIIEKHNYQNGLLEVVNGLINYCKKEGNYYSKEAESSYKEDVKKRLILFFKINKIEEANKEKILNELFPVFIEQLKKYEYITIKRLDEKVLEFLDGKNEDGEVFCSDEKQLKKLYHPSDIDVFKKIIIKDDNGNEQIVLGSPLTSSIKNPMAMRALHQLRKVLNTLILEGQIDEKTRIHIEMARELNDANKRKGIQDFQNENKKFREEAIKDIRKLYFEETKKEIEPTIDDLLRYQLWIEQNKQEIYEPTINDGVSKNIGISQIIGANPDYDIEHTIPRSISQDNSLMNKTLCSQKFNRNVKKKQMPVELNSYKLLLPFIEHWKIEADKLTNEIDNIVKTTKNAATKEAKDKKIRRRHFLTLKRNYLQGKYDRFIWQEPKVGFKNSQIPDIGIITKYSQAYLKSYFNRVESVKGGMVAEFRKMWGIQESYIKDGKKYFTEKDRSKHTHHAIDAITMACMTKDKYDVLATAWTLEDKEQLGDARKLLANSKPWKTFKEDLKKLEGEILISHHTPDNVKKQSKKIVRIRGKKQYVAEIERDINGKSTPKKDANGKIIYKLDEKGDKIPRLQQGDTIRGSLHQDSIYGAIKQPETDEITKKPKHTANGSFIIKKDGKGDDEIRYVIRKDLESIKATDVESIVDEVVKEKVKEAIANKVLLISSNAQQKNKFADNLKVWMNEAKQIPINKVRLYANSVKNPLEIKEHAPLSKSRHEHKQKVYAQNDENYAMAIYELEGKKDFELINNFNLASLIKQGVGIYPLYKEKEVKGKNLQIPIAKSNGRDVVLKQGQQVIFYDKEIENPKDITEINDFNGRIYIIEGLSIQRIRSGNSEFEYGVIMLKSNNEARKSDDIKKDNFKPDGIFKLGENKPTRKMNQNQFTAFVEDIDFQVLSSGIFEKI

SEQ ID NO: 40 - protein, 1363 aa, unidentified
  REGION 1..1363: note = Description of Unknown: Cas Enzyme sequence
LFKNIRNMGKILGLDLGTNSIGWAIRNPEKEGNQIIKKGAVIFPKGVGENQTGEYSKASERTKHRGTRRLYQRRKKRKTKLLKILIDNDMCPLSREGWEKWAVYKKGRKFEYPQEEQFKNWIRLDFNNDGKREYKNPYEIRKDAVQKKLSPEHIGRALYHICQRRGFKSNRLDETSDNEETKIHTGSSETKTTGHNEVKEMIENSELGTLGAAFAELNPHKQRIRNTYTLREDYLNEFEKICNIQQLDSKLAKKIKNAIFYQRPLKSQKGNIGPCSFEFHWYYDKKNSRWRKSYARRCPKSHPVFEQFRMLSFINSIKVKRKEDKEADYRFLTDRQKDKIYSLFYRVSALRFNFEDIAKKLDPGRNRYSFNYKDYHSIAGCPTISKVKNIIGNKWNELKAENRKNHKDKSPLRAGKGEVSQEDIWHVLFSFEDQEKLKEWPMKPKHKNLSLSKKEAEKFSEINLKQGYAQLSLRALRKILPFLREGMIYSHAVFAANISEIIGKKTWNENKDVILKDIKNIIDDHNRINRLNYIINDLISDYLDNPPYGITINEWLESHFEEGSDVSDQNGETLRYIKRTFKEQIRVEKHSNKFIQIERLDEKIKDYLADNFDVNDRDLAKLYHPSDIDIYPEAREKEDGKRYLGSPETGSFKNPMALKTLYELKHLINYMIEHDVINENDKIIIEMARELNSANKRRAIERWNREREQENQEFKAAIKDLFSGDKIVTDEEIKKYRLWKEQDGIDVYTGRSICMTDLFNGTEFEIEHTLPRSQSFDNSLENLTVCDKNYNRNIKQAKLPAQLPNYDKDVTIDGTSYTAIKPRLRDWEEKVEDLDKQLSKYKYPWGNETKEQKDRRIRQRHYWRMKRDYWSEKLYRFKTEKIKSGFKNSQLIDTQIVTKYARAYLKTVFGKVYSVNGSVVAEFRKLWGLQDEFAQKERLSHIHHTIDAAVISCLTKDKYDRLAQYYHNQEMYAQGEQKNKPFFNLPWKTFVSDIQSFENDTLIVHKSKDTTLKQTKRKLRKNGKIQYKTDNQGNPILDEEGNKIPIYEQGMGIRGQLHLDTFYGAIKQLERDKEGNVKTDEEGNAKKTIKYVLRRPLEYGEQGFKTKKQLESIVDPVVRQKVLDHVESDDFKSFKDALDHTVWMNKEKGIPIKRVRCYARDVKNPLKIKKQSHTSEGKRRKHKEFYYAKNESNYAVAIYQKEKDGKFKRSNLPINKFEVSEALQDDSINNLYPTEYKGKPFYCELKRGDLVLFYESHPDEINYNNYLELSKRLYKVIAIATGGRIRFKLHSDSRNNDRLREDFKKHYGKDYDKTLVTGKSKFELNRCFPKLNISPTNLNIIPINGSKIELSTLGEISLVDDIS

SEQ ID NO: 41 - protein, 1129 aa, unidentified
  REGION 1..1129: note = Description of Unknown: Cas Enzyme sequence
MSKILGLDLGTNSIGWAYIDELNNKILGTGVRIFPMGVENLGQGDKEMSKNASRTSARGTRRQFFRRSMRKKLLLKALAEQKMCPLNPSDIKVWNFKEFEKDEIFSSWIRQNPYELRHKAISEKVTLLELGRIFYHLIQRRGFQSNSRSASKDAGKIFEGIPKDGKIGILETAEKIQNTTLGSYLNSLYPAESQSYTHIDERIRNRYTSRNMYETEFEEIWNNQVKYHSELTSKLKTIIGGRKKDGYSEDGILFFQRPLRSQKFLVGKCAFEPKKTKCPKSAIPFEYFRIYQWVNTVECNGSKLNAEDRNKLVKILLKKENPAFKELRKELKLTDSIYQFNYKDDDKISGSHTIRSLSSKKFFGEEWFDFSEKYQEEIWHDLIFYKDKDKLKQRAIEKWGFNEEKATAISKFNLVDGYANLSRKAINNILPFLKMGFTYNIAVALGGIKNAFGDSWETLDSEDKTLITDNIFDVLKTEKEGGYIQRLRNFLVQEFNLTETQLEKLYHHSANISAKELLDKLPVGKDADAEIRSIRNPIVIQALFELRKVSNDLIDRFGKPDKIHIELARDLKASKKKRHKIKQEQDRLKKENDRVKKELERLGRHISNDNILKYKLWEECNNICPYTGRKISVVQLFSGEVQIEHIMPWSRSLNDSFMNKTLCFADENRAKGNRTPYEFYFKEQGEAKWEQVKEQALTCFKTKINYPNAYAKFKQFIKKELDDDFVTRQLNDTRFISREAKAYLSKICDKIIVAPGQMTSNLRHKWGLNSILNDDDNKTRDDHRHHAVDALVMACSKVSYLQELSRWNRYERSYDLENFPMPWDSFRKDAEKSILSILVSHRKSNRVLNSRKYKVKKKGEVYVNTGVAARGQLHKEYVYGKRQSPNSEQGFHKRSPIESLKTEKQVNKVVDPFIRDLIHARVATLGGYVNGNIPEGTFFTSDENGNKIPMIYLPNKNGDKVPVKKIRIREVIGGAERLKEENQYVNPRNNHHVLIYEDMQGNLKEDVVTFWTVVERVKQKQPLFQLPFDGKRIIETLEINDMFLLGLHREEIDWENPDYTKLSNHLFRVQKFTSGDYYFRKHIESSLDGELGHAFQYIKGFGTGKTGWLTFNPIKIKLTESGKLSEISN

SEQ ID NO: 42 - protein, 1132 aa, unidentified
  REGION 1..1132: note = Description of Unknown: Cas Enzyme sequence
MKTLAFDLGTSSIGWAYVDEDKSAIIGMGVRIFPEGVVDLGKGDRELSKNAQRRMARQVRRQHYRKVMRKQRLLKALMRYDMTPFTIEDITLWDLQKEIPQRHELNEWFKLNPYELRAKALLEELSLMELGRVFYHLNQRRGYISNSRNAGSEKEDGVLQEGDSKTGKTGMNETRDAMNSGTLGTYLNSIHPKVGESFTSGLPRIRNRYTDRNMYTDEFDAIYTSQQKFHPVVLDEKLRQVLGGRLKEGSSIEGVLFFQRPLRSQKGLIGKCTFEPSKPKAHISCLEFQEARVLQFVNTIECNGEKLNESEKNQVTEFLICKVKVKFSEIKKLLKKVSSSENFNYEDDHQVVGSEVIKTLSSKNYFGKKWFDFNDKEKEDIWHVLYFFDDKTKLQQHAIVKWGLSEENALILSKYRLPSNYASLSRKALRNILPFLRLGLTYDLAVVLGGVKNAFGSKWDDLSEDKLQFIIDTTIDIARSGSKGGFIDLLKSFLTDEFKLTDKELTKLYHHSQTKTTGDILDKLPVGKEADKEIMSIRNPVVVQALFELRKVYNSVTGDFGKPDMVKVELARDLKSSRDQRYKIRRENQAIESMHDRIKDELRANNIQINHESILKYRLWEECQHTCPYTGKQIGLTQLYSGEVQIEHIFPWSRSLDDSFNNKTLCFAKFNLEKGNKTPFEYYSSLDEQSWIEVKNRALKLFHTSKEFPKRYNKFKRFVQESFDDDLASRHLNDTRYISLEAKSLLEKVAPKVMVAPGTLTAKLRHMWGLNNVLSDDNLKNREDHRHHAIDALVLACFKPQQLNVISRHNRYRASEEDTPQFKEPWKNFHTETTQAVNGILVSHKKSKKTITRRLNKAKKDSQVYANLGIAARGQLHKETIFGKRTNPNGEVAYHVRVPLESITSKNHIDKIVDQGIRRLIEERIEQLGGYEGSKFDKVPNSAFFTYDSDKNERIPMIWLNNSNGDKVPVYKVRKSESISNAVPLKEGKNQYVNPRNNHHVLLYKNAKGEIEEDVISFWTAVERKRKGEQLYQVPENTSLVSSLETNETFLLGLQDEKALAMSQHALLPHLFRVQKISSFDYNFRHVNESTILNNDESAMRRIRSLGEGKGGWLTHNPIKVKISASGKIEFL

SEQ ID NO: 43 - protein, 1471 aa, unidentified
  REGION 1..1471: note = Description of Unknown: Cas Enzyme sequence
MAKILGLDLGTNSIGWAVVEKDGTEFSLLDKGVRIFSEGVKSEKGIESSRAAERTGFRSARKIKFRRKLRKYETLKVLAENNMCPLTIDEVVAWRKSGFKKYPLNDEFLKWLRTDDDQNINPYYFRDKASRGKANLYELGRAFYHIAQRRGFLSNRLDQSAEGIFEEHCPKIEDVILEALTVQDLKTEITDYFDGLDIFDTTEKSGYKKDLDEGEKKLKSLFIVLGKIIKANENNFEKAKEEVVARLNRKEDLGVVKQKISEISQAIKDGNFATLGQYFYSLYNKEVEKENITTKEKEKFNRAKIRNQYTAREEHYLAEFEVICKAQKIDYINENELLPEKKYSGLAKELYKAIFFQRPLKSQKGLIGKCSFEKTKSRCSVSHPDYEEYRMWAYINTIKIKTPEDNALRFLTAEERQKIVPKFYRKKDNFNFEDLAKELIPKGASFDFYKSFNAKSVHYLFNYKPKNSVSGCVVSASLKNLFGEDWKTKTFTYQAKNGKGENVNRNVNYKDLWHLLSVATTDIYLQEYAKEKLGLDEKKAKSFSKIKLKKDFASLSLNAINKITPYLKEGLLYSHAVFMANIENIVDDKIWNDQTQRKYIQDNIAKIIETNTYENGLLEVLNGLIKEYKKDSVYYSKEAETSFKNDLQKKLISFYKYHKIEENQDQILNDLFPVLIEQIKKQEYITIKRLDEKVLEFLSGENEDGEIFCTNEKQLKKLYHPSDIEVFKKKIVKDANGNEKVVLGSPLTPSIKNPMAMRALHQLRKVLNVLILEGHIDEKTIIHIEMARELNDANKRKGIQDFQNDNKKFREDAVKEIKKLYYEESKKEIEPTEDDLLRYQLWIEQDKKEIYEDGKSISICQIIGTSPEYDIEHTVPRSRSQDNSLMNKTLCSQRYNREVKKTKMPVELANHEEILLRVDHWRKEAEKLTWEIDQIVKSTKAMATKEAKDRKIRRRHYLTLKRDYIKGKYDRFVWEEPKVGFKNSQIPDIGIITKYSQAYLKSYFKRVLSVKGGMVAEFRKIWGVQKSYQENGKKYFEIKDRSKHTHHTIDAITIACMTKDKYDVLASAWTLEDKEQAGNARKLLAESKPWKTFTEDLVKIEEEILVSHYTPDNVKKQSKKIIRVRGKKQYVAKIEKDKNGKTILKKDANGKLIYQLDEKGKKIPRLQQGDTIRGSLHQDSVYGAIKNPLNTEELRYVIRKDLESIKVTDIENIVDEAVKEKVRMAKENGILIIPSNAQQKNKLNGTVWMNEEKGVPINKVRIYANSVKNPLEIKEHSIISKSRQEHKQKVYAQNDENYCMVIYDDGKNKDFELINNFNLAQLQKLEHGDYPLYKEKISKGKTIQVPIVKRNNRDLVLKRGQQVICYDKSVENPKDINEITDFSGRIYIIEGLSIQRIVRPSGKVDEYGVIMMRYFKEARKSDEIKKDNFKPDGIFKLGDNKPTRKMNHNQFNAFIEGIDFKLLPSGKMIKI

SEQ ID NO: 44 - protein, 1126 aa, unidentified
  REGION 1..1126: note = Description of Unknown: Cas Enzyme sequence
MTKILGLDLGTNSIGWAIVDDTQNKILGIGSRIFPMGVENLGDGEGREISKNASRTGARGVRRQLFRRRLRKKILLKALSNAKMCPLQPEDFEEWKNTDQFPESKLKSWFAINPYELRNKSLNEEISLEEIGRIFYHLIQRRGFLSNSRSAGKDDGAIYKGKPKEGKIGIDETRESIKGKTLGSYLFEIYPKENEPFSNDTERIRNRYTTRQMYVDEFELIWEKQVQYHSELSPELKTIFGGRKSDGYNEDGIIFHQRPLRSQKHLVGNCSFEPTKTKCPISAIPFELFRIYQWVNTVEYNGNKLNEIERIKMIDVLLQREKPSFKDLRKAIGKISAEFKFNYKDDDKILGTYTISNLSSKKFFGNKWFDFTEKEKEDIWHVLYFFDSKDKVKEYAINNWSFNEEQAIAISKFNLKDGYSNLSRKAINNIFPFLKTGFVYDIAVVLGGVKNIFGEDWEQLEKNNKDFIIDNIPAIVRTKITGGFIETIKEVLKKEYNFTDTQLKKLYHHSATIETKTILKSLPVDNNADKSIQSIKNPIVITALFEVRKLVNELIEQYGKLDEIKVEMARDLKASKSQRNNVRNEQKRLERENDRVKARIEEEGQRVTHESLLKYKLWEECKKTCPYTGAAIPLHKLFTGEIQIEHIHPWSRSLNDSFANKTLCYADENRLKGDKTPFEFYGNDEANWSAIKERALKLFSDTKEYPKSYQKFKRFVQQKFDDDFSSRQLNDTRFISKEAKNYLSQICEKVTVAPGQMTANLRQKWGLNFILNEDDGEKTREDHRHHAVDALVMACSKTSYLQELSKWNRYNRNYELKNFPMPWEGFNSDAENMIHKILVSHKKVSNTITLRNHTTKKNGEIYKNIGVAARGQLHKEFVYGQRIAPFGAEAFHIRKPIDTLVTEKQVNKVVDEAIKNLILKQVNALGGYVKGNVPDNVFFVADENGIKQPQIFLPNKNGKPVPVLKVRIKENIGGAEQLKDNTNQWVNPRNNHHVLIYKDIKDDLNEEVVTFWTAVERKRQKQEVYQLPINGKEIVTALHINDMFLLGLNDDEIDWENLNYSVLKEHLYRVQKFTSGDYYFRINKTSSIKNSSEKQQINSFGLGKNGWLTHNPIKVKISVSGKIKKV

SEQ ID NO: 45 - protein, 1459 aa, unidentified
  REGION 1..1459: note = Description of Unknown: Cas Enzyme sequence
MSKILGLDLGTNSIGWAVVEKDENQISLVDKGVRIFSEGVKTEKGIESSRASERTGFRSARRIKFRRKLRKYETLKVLVNNNMCPLSVDEVINWRKTGFKEYPLNPEFIKWLRTEDNLNINPYFFRDKASKEKVSKFELGRALYHIAQRRGFLSNRLDQTAEGIFEEHAPRIEETIEYLQTIDELKVEILDYFTEKTDIIDKSEKSGFKSDLDEGEKKLKSLYNSLNAIIKKNENDFEKARTELIERLNKPEDLGTVKRKIHDISEAMKIGNFATLGQYFYSLYNKGKIRNQYTAREEHYLNEFEIICKTQNIESINENEKLPEKRYSGLAKDLYKAIFFQRPLKSQKGLIGKCSFEKSKTRCSISHPDFEEYRMWTFLNTIKIKTPIDEQLRFLTSDEKQKLIPKFFRKKANFNFEDLAKELIPKGATSEFYKSNNAKTAFYLFNYKSNASVAGCPVSASLKNVFCDDWKTKIFTYQTKNKKSETVNRTVDYKDIWHLLSVSTSDLYLEEYAKEKLGLNEKIAKSFSKIKLKKDFASLSLNAINKILPYVKDGLLYSHAVFMANIEKIVDDKIWNNPQQRLFIQAEIAKIIENYTFENDKNEIINSLIKECKNEGHFYSKEAEASYRNDVNKKLISVFKFHKIDGIVNINETQNEVYDLFIKQLKKCGSYNKYEFVKLKRLDEKVIDFLRGKNQDGEVFCTDKNRLKKLYHPSDIEVFKKKIIKDEFGNEKLVLGSPLTSSIKNPMAMRALHQMRKVLNTLIVEGQIDEKTRIHIEMARELNDANRRKGIQYFQNENKKNREEYAKKIKDDYKAETGKDIEPTDDDLLRYQLWIEQNCKEIYETGKSIRISDIIGSNPAYDIEHTIPRSISQDNSLMNKTLCSQKFNRDIKKNKMPIELDNYEDILPRVEHWKHQADELTSKIEMLLKSTKNASTKEIKDKKIAERHFLTLKRDYLYGKYERFILKEAKTGFKNSQIPDIGIITKYAYSYLKSYFDRIEAVKGGMVAEFRKVWGIQKSYIENGKKYYEQKDRSKHTHHTIDAITIACMTKDKYDVLAHAWALEDKKQIPEARRILEEAKPWKTFTEDLKQIETEILVSHYTPDNVKKQSKKIVRIRGKKQFLSVIENDKTGKAIPKKDANGKTIFKLDEKGNKIPKLQQGDTVRGSLHQDSIYGAIKNPQNQDEIKYVIRKNLDSIKTSDIENIVDVEVQEKVRKAVENKILVISSNPQQKNKLNGTVWMNEEKRIPINKVRVSVNSVKNPLEIKEHAIFSKSKHEHKQKIYGQNDENYCMAIYEGIDKKGFIKRSFELVNYIDAGVYYKLSNKKNNVDALVPFIHLRTLLPLKYIVKKGDLVLFYKETKEELKDLDIKDLTKRLYKVIGFEGDGRIQFRHHKTAMQQSSKNKEEQTVVKYMSDNNLKNSQINFEIPVPWLRLSIGNMNFLLNKKEIEINSIGKIKIL

SEQ ID NO: 46 - protein, 1335 aa, unidentified
  REGION 1..1335: note = Description of Unknown: Cas Enzyme sequence
MKVLGIDLGTDSLGWAIRNKDIETGNQIEDAGVIIFSKGVGEEKNNEFSLAAYRTDKRHSRRKYYRRKMRKGRLLRILIQQNMCPLSIEALDKWTKHVKGEAKIYLTEKAFIDWLKINPYEARREATKEKVDAFVAGRALYHIVQRRGFKSNRKDQSDEKELGIVKTAIAELEEYMHQDFLGTHFHKVLKKERKIDKDEQPIAPKVRGNYTARTMYLGEFEAIAQQQQFSVALTNTLHNEIFIHRPLKSQKHTVGKCTFEIKKHRAPISSLAFEEFRMLQFINNIKYKNLDNETPDWITLSDEQKAEIKPLFFRVSKASFNFAEIADKLTPKDKKGRWRFNYKLKQNVAGCICTARLKNFFDKHVSKDRWKALSNVESKDQISKHDVWHAIFSFNDSENLKQFGIKHLQLNEVDAEKFSKITFPQGYANLSEKAINKILPFLRAGFIYSHAVFLAKIPDIIGQKMWERKHETIIKTVRNLIDNEQKNNMINRIVNDSIHYFFESGFNAGDVYVLDEDDKHTILQKVKDYFGANAWIEKKENDKQAILQEIYDKLTKQLRLNVPKVSHRYLKIPRKDERIKDYLKQNYAASDEQLKLLYHPSDIDQFAKAKKNKNGDFQLGSPVTPSVKNPMAMRALHQLKKLINYLIREGKINERDKVILETSRHLSSANERAAIDTYQRNREKENQEYKKRIIEDCNKPDPKDEDILKYRLWKEQNEICIYTGESISVCDLFTDNPKYDIEHTLPRSKSYDDSQANKTLCEKTYNQQIKKQKLPVELDNYEDILQRVEPWKKKYEALDIQVKKLSKVGGSYEEPEQKKSRIQKKNRLIIERNYWRNKYQRFTLEEITNGFKNSQLVDIGIITKYSRAYLKSLFSRVYTVKGTTTADVRKMWGLQEGNDPKNRTKHIHHTEDACVITFLEPDLYQQLAEFYHQYEKFEDNEVKKPTFEKPKNWDSFVQDIKSLQNDVLVYHHKQNHLGKNTYKKWRVNGKIQKRFEWKKDENGKPYKRYLNLKDEKANTIYTKGDTARVPLHMESFYGNIMYNNEADTDKEKWQKLSQEGKGIYVKRKPLEFGDLGFKTEAQLQNIVDKVVREKVFNHINQYKNEKGKIDLKEALSKPIWMNEAKQIPIKKVRCFAGDVKNPIKVKKQRDQHSKIRKPYKEFFYAKNEGNVLIAIYKGLVKNKEKSGFELVNNFDASAYYKESNYAYRNQYPIVPESKDGLQLAQTLYKGNMVLLYESTPDEINWEDKKELSRRMYKVIGFATLRVQDKYDFGRIYLKHHMCAKKISDVKCEQGVFNLNDEIIKEHRMLLHTQINCLIANIDFYFDIDGSIERIR

SEQ ID NO: 47 - protein, 1232 aa, unidentified
  REGION 1..1232: note = Description of Unknown: Cas Enzyme sequence
MLTYGFDLGTNSIGWVVIDQSKKEKILGAGVNIFPEGVNRDTKGAEISKNEKRRLKRQTRRQFFRKKLRKAKLVELLVRHQMFPDVEALYETTFDKPVPKFKVALFELLNLETLPEPLLDFFYNNGQNNPYLLRDKAVKGEQLSKLQLGRVFYHFAVRRGYKDSLQAPLEDGKTLRKGDPKIGKTGIDETQKLIDRPEHKSFGSAMYSIDPENPNNKNKAVEHRIRNRYTLRNWFVEEFDAIWEKQKAFYPNLLNEHLKNDKEYHLKDIIFFQRPLRNQKFLLGSCIFEKQKPKCRKSALHFEEFRMHQTINNIKIKDKKLNEEQRLILKDMFYTKKDFKTEDILEKLKIDKEDINLAEKQAVKGNETHIGFAKLFKKDVWKKMSDTDKEHAWHIKINADDKAKTIKYINKKTKWNFNEKQFKQFFDLRLNKDFASVSTKAINHILPFLKKGYLYNDAVLLGGFVNALGKEEWNSWDNELRKATEKEIVELIKNPTGETIKKKLQEFCLERFNFTNKQLNKLYHHSDLELTKTTGSLPKDDELINKVRNPLVANALFQLRRLTNALVKEFGKPFEIRVEMARELKASLNQRDEIRFGQLKNEELNNKAKATLDEYNLPHTPKNIRKVLLFEEIYKQNGQAINPFSLGEGSTESFGVNDIFHKMQIEHIIPYSRSLNNSMGNLTLCDPDRNRNKGDKTPYEYAMAVGKDWETIKNQIFKVLPYKKAKRFISEENIVDESFISRQLNDTRYIAKFAKEYLKHICTKVNITQGGATAYLRDIWGLNSILNKTFVLKSIYNDGDEYFAALNEANELIESSLIEWQYSENDKENKKIQKQLLKQGKVVQGVIRKGKFIPKKIRDDHRHHAVDAIAVACTEKKFLQEISYMHGQYERGDQAKKAISNFPEPWLGFYQDARKAIDNILIYYRVNNKVLSKTRKKVFDKKTAKHKENKDGSKRYGQGITARGQLHEETIYGKRKAPFEQSHGFHIRKNLADLTSAMLDKIVDPIVRHQVYEFAANHPNAEWDAKGKLNIKKVEFFKFDETENISKPLVFMPQKTDKKTGELKPKRPIKKVRIRQESSNAIKLKNINQWVEPGNNYAVVLYDNEDGKRYGKVITFWEAVEAMRNGLDPINQNVNGEYLMHLKKGDMVLMDYESLDFDGLPDNLKLSKSLYYLRKFSSSGGQIKLIFVKHNYSNVEVDRAKFPIVIRKVPNTLKCIKVEISLTGKLVRPKVL

SEQ ID NO: 48 - protein, 1119 aa, unidentified
  REGION 1..1119: note = Description of Unknown: Cas Enzyme sequence
MSKILGLDLGTNSLGWAITDTDKEEILGMGVRIFPMGVSELGKGEKELSKNASRTGNRQKRRQFARKRFRKKLMIKVLAQHSMCPLSPMDYEQWKKEGKFPEGPLRDWFKMNPYELRARSVKEKVSLHELGRVFYHMIQRRGFLSNARKGAADEGVLFSGKPKEGKTGIDETLSHLSHSTLGSYLHSIAPVENEPFKDSLTRIRNRYTTRAMYIQEFEQIWSEQSKHHALLTAELRGSIGGQKNAGYKKDGILFFQRPLRSQKGKIGACSLEPKKARCPISAIPFEEFRLWQWINTVEFNGYWLNDKQRHKAFNYLIRKEKVKFKALRSELDYADASFKSNYANDDTILGSRTISLLCNKKFFGERWFKFTDKEREDIWHDMLFYEDKKLLTARAIDKWKLDPEAAEKLASTNLADGYANFSRKALMNILPFLEKGCLYDIAVALGGIKNLFGKEWDNLSEEQTSFILDNVPEIVRSNQKGGYIKELMKVLADQYGFSEADMEKKLYHHSSSIAADAYVERLPVNVQADKEIQAIRNPVVITAMFELRKVVNELLERFGPMDRIVVEMARDLKNSKSRRQDERRRQQKQENYNNEMKGLLAHHGQRVSHDNLLLIKLWKECQETCPYTGRSISVQQLFSGEVQIEHILPWSRTLNDSFMNKTLCFADENRAKGDKTPYEYYSGQSEAKWEEVKARALSLFHDSPVFPDRYRKFKQFTLKKFDEDFVSRQLNDTRYISRQSKDYLSQICKDVRVSPGQVTSKLRHLWGLNNLIGVKDSKERDDHRHHAIDALTVAATEQSAVQKLNAWNRYDRGVHESDFPAPWKTFRSQAEKTVNELIVSHRCVNNDISKRMYSVKKKGVKYSNLGIAARGPLHLETVFGKRKAPGSEDYGYHVRKSLDGLSKMKQIEKVVDSAIRELIYKHIAQLGGFQGKNKDEVPKGAFFDTNEDGSLRPLLFLPNKNGAPVPIIKVRMKENFGNAEPLKDGINQYVNPRNNHHVIIYEDEKGNLQEDVVTFWTVVERRKQGQDLIQLPKDGKKIISVLQINDMFSLQCSDGQRRIYRVQKLSSKFYEFRLNSESLIAKNEQPHFIRVNSFGTGKTGWLTFEPEKVIISPSGMLNP

SEQ ID NO: 49 - protein, 1156 aa, unidentified
  REGION 1..1156: note = Description of Unknown: Cas Enzyme sequence
MAKKILGLDLGTNSIGWALIEENKKLIDAGSRIFPEGVNRDKSGLEVSKNETRRLARQIRRQYFRRKMRKMHAAKLLMANGMFPQVQSLSTKITEIHLIEPLRRFFALNPYELRSKAAQGHKLELMELGRIFYQLSQRRGYKGTLLADVDEEGVIFEGKPEENKPGINITKQMAEKFGTLGIYLNSLDPLMERKRNRYVGRDLYVKEFNTIWDQQKEYYPGVLTDELRFALGDVEKGILFFQRGLRSQKSKVGRCVFEKDKPRCQLSHPLFELSRILQFVNNIVIDGIALTSIQKDTVLDLMTSESKNFDFVKIKKKLKVLDLSANYDDKFKAPGSPFLAGLKKILGKQQFDCFDYDLLERLWNVKVFATDKDWLKNHVIDKFNFDDKTAEGFCSIRLPKGYGSLSRKALLGILEFLKIGSKYHEAVWLAGIRRVFNDKWDALSIDQQDFLITNGVEILNKPGVNSVQALGDILKNDFGVMERDLKRLYHHSDLDVPDGSMDQLPPFSDNIRNPLVQQTIQELRKLVNAIIKEYGKPDQIVVEMSRELKLPAEERKKLLKKQFENEERNTKAKDELSKLGLPPTGNNVLKFKLYMELSSKNGTAACPYTGTTIRISDLFDDNLVQVEHIIPYSISLDDSFANKTLCMAATNNAKGDRTPFQFFGSDHAAWEDAKTRAKSLLPYKKYERFIAESNPALNDFISRQLNDNRYSSRIALTYLQHVCSSVRVSRGELTSKLRRQWGLDGILSPSIPVTSIGDGAYVICLNGENEILEIKSWDAGRYKQDLKSFEKKGLAATGYVKSGQFYFDKQRDDHRHHAIDAIVVACSTIGALQNLSKLHHRFANQKTLMTRFNYPMPWDTFYGEVRNRVLQILVSYKKRIRATTPVHKKVDIVVRGVKTHMRSQGLGARGELHKESVYGRYGSDDNQFFHIRKGLENFTAVKDLDKIVDYGIRLLLSDLVKSRLGVTELEPGMAIPNDTFFGRDGSGNRYPKVFLPNANGPGIPIYKVRIREKLGKAVQLHDQVNQWVNPRNNHHVIIGLDASGKPLEKVVSFWEVVERKSKGGNVFEKPSEFVRDIVFMQMNDMFLFPTIEQQKSTADAIYRVQKLSDSDYTFRKTTATLISNPNEEIRIVSYKRWLGLSPQKVRIDVLGRIKSI

SEQ ID NO: 50 - protein, 1469 aa, unidentified
  REGION 1..1469: note = Description of Unknown: Cas Enzyme sequence
MAKILGLDLGTNSLGWAIVENDKESGKETLKLKNKGVVIFSEGVGRGSQGQEISRAAQRTAFRGTRKLKFRRKLRKYETLLVLSESKMCPLTKDEVIAWKKSNFKEYPTNEIFLNWLKTDDDKQKYPYFFRDKASREKINKLDLGRAFYHLAQRRGFLSNRLDQSDKGIVELHKPNLLDVLEESKTRTELVITINDYFENIEIANKKKKDLDAGGQKLLTLYNVIQKVLKENSELEKMKGLIIERLNKKENLGKVKQGISDLDEKIKDGNFGTLGQYFYSIYDKSNQRIRNQYTAREEHYIKEFEQICKIQDLGEIITNENEPNKRYKSLTLLLYKAIFYQRPLKSQKGLIGKCTLEPAKYRCSVSRPEFEEYRMYQYLNNFKIKTPVNEKMRVLTNEEKEKIKPLFFRKKTHFDFEDIVKKLIPKNENAIYYKSKDARTAQYVVNYKLNTSLSNCPSIAHFKTIFGNDWKNLKFTYKTTNKKGIEKTQTINYQDIWHIWTTFTKNEKLQDFALTKLKLDAELAVKFSKVTLKKEYASLSLKAINGILPYLEEGLIYSHAVFMANMKNVVKEKNWSNDNDRKLIQSEIKKIIDNHQIENKLLFVINGYIKTNFKNSYSKEADLIYRKELEASFEFEFGKKKWKELNIDNLFEDNYTVFIEQFKKKEFLQIKRIDEKVIAFLSDNDLLSNENKLYHPSDIEKFKLEEAKNKDGVEFTVLGSPLSDSIKNPMAMKSLHKVRKLINTLILEEKIDENTKIHIELARELNDANKRKAIQKWQNEKEEERKVYRKKIQELYKQDFEPTLDDLEKFKMVLEQREDKKLVSKDDVSKYKLWEEQRHVCLYTGKTINLTSFLQKNPAFDIEHTIPRSVSIDDSQMNKTLCDSKFNRDKKKNQIPFQLANHSEIMNRISHWKDKYEKLESEIKGLVRASKTATDKEAKDRIIQKRHYLKMEYNYWRGKYSRFEKEEIKAGFKNSQITDIGIITKYAQQYLKSYFKRVYSVKGTMVDQFKKAWGIKKTIKDEDGIEKKDRSNHIHHCEDAITIACMTKNKYDVLAHAWGLEEKEKFNEAKIALKNSKPWKTFAEDVKNIQNEVLIVHNHKDKVPIQSKKKLRVRGKIQYRIISELPNEFLKKKEGKDYFIIENNKYKIPIYLHGDTVRGSLHKDTFYGAILDKNPKNDKTYAQDKEGNGIVKYVVRRPLDGIKKTDIEKIVDKAVKEKIKQAIKDKVLVAKKDAYKIDSDKTVWMNEEKQIPIHKVRVYAPSVKNPLQDFKKHAIKDKSKHPHKREYHVQNDENYCMAIYEGKDKKGNDKRTFELVNMLEAGNYYRLSNKSNRKDLEIVPTADFETNYPLKYMLTKNVQVLFYQNTPDEIWELNTIEKQKRLYKIIGFEADGRIQLRFHQTAMQQSSKNKNELTIVKFMKDNNLKNSKVNFEKPVPWLRIRGKNLNFIVEGVDFKINPLGEIMKLQKFE

SEQ ID NO: 51 - protein, 1478 aa, unidentified
  REGION 1..1478: note = Description of Unknown: Cas Enzyme sequence
NHTYLFLGKSLPLDFLIKKLKAMSKILGLDLGTNSIGWALVEKDEKEFTLKDKGVRIFTEGVKSEKGIESSRAAERTGFRSTRRIKYRRKLRKYETLKVLSLNGMCPLSVDEVEDWKKSGFKNYPLNPKFLVWLKTDESTNTNPYFYRERASKQKVSLMEFGRALYHIAQRRGFKSGRLDQSAEGVMEEHCPQIQGKIEDVDNILDLKTEIEQYFVDFDFINNKDLDEGEKKLRGLFKSLQIIIKKNSDSFDKAREEVIARLNRKEDLGAVKKHINEISQAMTEGGFETLGQYFASLYNKTRIRNQYTAREEHYLNEFEFICKKQKIEGILENELLPEKRYFGLVKYLYRAIFFQRPLKSQKGLIGKCSFEKTKTRCAVSHPDFEEYRMWAYINTIKIKTQQDETLRFLNEEEKQKIIPKFYRAKQHFNFEDLAKELILKNSVFAFYKSSNAKAAHYLFNYKATDTVTGCPVSASLKNVLGKDWKTKTYSYATINAKGDSKTSRVDYKDLWHLLSVATSEVFLYEYAKNKLLLEDKKAKAFSRIRLKKDFASLSLSAILKITPYLKAGLLYSHAVFMANIEHIVDQNIWNDLSQRKYIQDRIAEIIENHIFDNGLLESINGLIKLYKTESAYYSKESEHIYKKELETKLNSFFKYHKIENHGERESIFKDLYPIFIEQLKKNEYSKIKRLDDKVIEFLKGKNEDGEVFCSNEKKLNKLFHPSDVAKFKKKIVKDTDGNVLAELLGSPLTSSIKNPMAMRALHQLRKVLNTLIMEGVIDEKTRIHIEMARELNDANRRKGIQDFQNENKKNREIYKEEIKKLYFEACKKEIEPTEDDLLRYQLWLEQNKQEIYEPTLNSGGSKAISICQIIGSNPDYDIEHTIPRSISQDNSLMNKTLCSKRFNREVKKKKMPIELNNHELILPFVNHWKEEANNLSEEIERITRSIKIAATKEIKDRKIRKRHYLSFKRNYLKGKYERFIWEEPKVGFKNSQIPDTGIITRYAQSYLKSYFKRVISVKGGMVAEFRKIWGIQKSYQENDRKYYEEKDRSKHTHHTIDAITIACMTKDKYDLLASAWKMEDNERYKESRKILVNSKPWSTFTQDMVKIEEEILVSHYTPDNIKKQTKKVERVRGKKQYVAEIERDAKGKAIPKKDTKGKIIYKLDKDGKRIPRFQQGDTVRGSLHQDSLYGAIKHPENPDKIRFVIRKDLESIKASDVANIVDEVVRKIVEEAITNKVLLLSSNPQQKNKIDGTVWMNQEKGVMINKVRLYANSVKNPLNIKKHMPLSKSRHEYKNIVYGQNDENYLMALYELDGKREFELINNFNLAKLLKAKQGFYPLFKDKEIRGKMVQFPIAKSNGRDVVLKRGKQVIFYDPEVENPKDINDILDYTGRNYVIEGLSIQRIKSKNNKFHEYGVIMMRYFKEARRSDDIKKDNFKPDGVFKLGENKPTRKMNHNQFSAFIEGIDFKVTPSGKFHKI

SEQ ID NO: 52 - protein, 1436 aa, unidentified
  REGION 1..1436: note = Description of Unknown: Cas Enzyme sequence
MAKILGLDLGTNSIGWAIVENDRVNNKETFKLNDKGVIIFSEGVKKEKGNEISRAAERTNFRSTRRLKFRRKLRKYETLLVLAKNKMCPLLEDEVIAWKKSRFKNYPNNEDFLNWLKTDDNIEKHPYYYRDSASKVKIGRLELGRALYHIAQRRGFLSNRLDQSDKGVIERHQPRISEILEESKTKTELSIAIDDFFKGFDILDKKAKDLNEGDKKLKTLYNSFNKILKDNIDFTLVKEKIGERLYKKENLGKVKQGISDLDKKIKEGKFKTLGQYFYSIYGDGNKRIRNQYTAREDHYLEEFEQICKVQDLGKINRSENEPNKRYVGLTLLLYKAIFYQRPLKSQKGLVGKCSLEPTKYRCPVSRPEFEEFRMYQYLNNFKIKTPENEKLRELTEEEKEIIKPLFYRKSKTSFDFDEVVKKIIPKHEKAVYFKSKDAKNAKYIVNYKLNTSLSNCPTIAHFKTVFGEEWKKLDYSYKTINKKGIEKTRTINYQDIWHVWTTFTTNDKLYDFALTKLGLSTEIAVKFSKVTLKKDYASLSLKAINNILPYLKDGLIYSHAVFMANMKNVTKEQNWKNKNDRELIQSEIKKIINNHQTENKLLFVINGFIKKNIENSYSKEADDIYRKELEKSFEFEFGTKKWKELNTVNLFETYYNLFVNNFKNKSFLRIKRIDEKVVNFLSDNDLLNNQNKLYHPSDVEKFKLEKAKNKDGVEFTVLGSPLSNSIKNPMAMKSLHKVRKLINTLILEEEIDENTKIHIELSRDLNDANKRKAIQKWQSDKEEERKVYRKKIKELYKEDFEPTLEDLEKFKMALEQREDKKNVSKEDVLKYKLWEEQRHICLYTGKTISLSSFLNKNPSFDTEHTIPRSVSIDDSQMNKTLCESRFNREVKKNQIPFQLNDYTKILNRISHWKDRYEKLDNEIKGLVRASKTAVDKEAKDKIIQKRHYLKMEYNYWRGKYSRFEREEIKAGFKNSQIVDIGIITKYAQQYLKSYFKKVYSVKGTMVDQFKKAWGIKFTVIDEDGIAKKDRSNHIHHCLDAITIACMTKNKYDVLAHAWGLEEKDKLNNAKKELANSKPWKTFTEDIKNLSKEVLIVHSHKDKVPIQSKKKLRKRGKIQYNKHGKVIYQQGDTVRGSLHNDTFYGAILEQNQNDSRSFEKDKEGNGFVKYVVRKPLDGLKKTDVDKIVDETVKSIIKKAIIDKILIARGDSYKIDTDKIVWMNKEKQILIRKVRVYTPSVKNPLKGFKKHVDKDLSKHPHKRAYHVQNEENYCMAIYEGKNKQGKIKRSSELINMLDASKLLKLKRTNKSEKEIVSEFDSKTNYPLKYVLTKGKMVLLYENSPNEIWELSDNEKLERLFEITQLDKESNGIKLLYHQEAREKKKITAFMGLKKGMKGGKNIGKHMQFPWLKIGHNAFDALVEGYDFKISVIGEIEKI

SEQ ID NO: 53 - protein, 1123 aa, unidentified
  REGION 1..1123: note = Description of Unknown: Cas Enzyme sequence
MAKILGLDLGTNSIGWALIDDTRSTILGMGSRIFPMGVDNLGDGTNEMSKNTSRTGARGVRRQFFRRRLRKKILLKTLSEYGMCPLVAEDFKNWKETNKFPTKKLAVWFALNPYELRSKSINKKISLEEMGRIFYHLIQRRGFLSNSRKGGKDDGAIFKGNAKEGRTGIDDTRDSIQDKTLGSYLFEIYPRVNLPFVNGLERIRNRYTTRKMYVDEFECIWEHQKQYHSELTDDLKTTIGGRKQDGYGEDGVLFHQRPLRSQKHLVGNCSFESSKTKCPISAIPNEMRRIYEWVNTVEYNGKKILQEEREKMIAVLLSKEKPSFKDLKKVIGKVDANYKFNYKDEDKIVGTHTISNLSNKNFFGNQWFDFSEKEQEDIWHVLYFFDSKDKVKEYAIFNWGFDDEKADVISKFNLKDGYANLSRRAINNILLFLKLGFTYDISVALGGIKNAFGKDWETLEEEKKNFILDNVPEIIRTKIAGGYIETIKELLKKEYHLTDKQLAKLYHHSTSINAEKIFELLPLGKEADKEIQAIRNPIVITALFEVRRLVNELIEEYGTFDEIKVEMARDLKISKTRRNDIRREQQRLERENDRVKDELNRLGERITHDNILKYKLWEECKKTCPYTGVTIPVHKLFTGEIQIEHIHPWSRSLNDSFMNKTLCWADENRNKGDRTPFEFYGSDLANWLTIKERALKLYSDTKEYPKAYQKFKRFVQQKFDDDFTTRQLNDTRYISKEAKSYLKQICGKVTVSPGQMTATLRHFWGLNSVLNEENEKTREDHRHHAIDALVMACGKTRYLQELSKWNRYDRQPASSNFPLPWDTFRYDAEQAVEGILVSHKKQNNIITVRAHKTEKNGRIYKNVGVAARGQLHKETVFGNRKAPFGEEAFHVRKPIDSLTTEKQLEKVVDETIKHLIFKRIHSLGGYVKGKIPPHTFFEIDENGVKHPQIFLPNKNGDPVPVLKVRMKENIGGAEQLKEDANQWVNPRNNHHVLIYKDLNSNLKEDVITFWTVVERKRKGFPIYQLPTDGSEIITTMQINDMFLLGIDEEEINWEIPNSSLLKEHLYRIQKLTSGDYFFRKHTSSTVTDEHYIQIRGFGDGKTGWFTFNPIKVKVSVSGKVEKL

SEQ ID NO: 54 - protein, 1179 aa, unidentified
  REGION 1..1179: note = Description of Unknown: Cas Enzyme sequence
KYIQKGKTPSLLSHPIYEEFRAYQFINNIEYGRKQRLDETQRLQVLDLINSKDGNFNFSEIPKRLKMGYEKWNYADSQKVPGNYTTKHLSSLFSEEIWNTKKEEIWHCFLDYNDNDYLIEKLANAYGLDEKLFEKVESINLKEGYSNVSLKAIKNILPFLREGFRMSDATILGGIMNAFGEQMSYFQESIDVLKTDVLEIVRDKSNKEGEAIEKIKAYLIDNKFGFEKNDKRFLKLYHHSQDVVTKELKEKLDPIENLRNPIVQQGLNETRRVVNQLILEYGKFDRIQVELGRNIKNSKKGRQEQLSRINENTAKNDQARKLLTEFGLRHSRDNIQKVLLYKEMQDRGVMTVCPYTNISINIKDVLGSENKIQIEHIFPKSTSLNDSLSNKTLCESTFNGLKGNLTPYQFYLKNDDKNLWGGAESWEDIEQRAYRLLPYRKAKRFTSKIKIEDTEVKSGFIERQLNDTRYISKKTKEIMSQICEDVRVLPGGLTSELRHLWGLNNILQPIIGLNIDIENMDENRRYPYYVVLDANNVAVSTTCIYNQKPNLQKNETTITGKVDKGIFKTSEKYVNLNVEAPELRNGEYWLKLKLSEPKQIVRIFKEKMNSTEEEIVIRGNVEKSRFKNDGVGVIAAPNLDNGSYWAKLPIDNKKFIVPEKGKQPKKTRKQYLLFGEVKEGVFKSYIYSCECDEEDGKYWLLLDLDLENSVFERAVNEMPQFEPNQIRIEGTINETGLFVSEVDAEHQFEVSEKEGKYWMIFDILGDLSEFDAIENPKPKFADNQSVIEGSLWVDKYTGEIKFDPKKNRDDHRHHAIDALVIALSKQSYFQQLSTYNAQRVAKKKGIQFDKEQLDFPEPWLNFHTAAKKEAEKILVSHKQNRKVLTQVRKRITKNGKTHLSVGDAVRGKLHMENVYGERQAPFETTKGYHIRKKVVDLTDSQLKKIVDVEIRKIITNARVEEAKIKKQLAVLEKQKRKSRTDNDELLVQNEIDKLKDDIEQLYTLKNKNGARVPIKKVRIREEMSNAQKVKELNQFVNPRNNHHIMIYRKANDELDKAVINFWTAVEREKQGVDLFQLPDDGIEIIETFQENDMFLLFLDESVNIEEISDKDIFNHLYKVQKIAGADYFMEICFRRHLDGKSSSEAEYVYIKGFGSGKTGWFTFNPIKVRVSVLGKIQKV

SEQ ID NO: 55 - protein, 1127 aa, unidentified
  REGION 1..1127: note = Description of Unknown: Cas Enzyme sequence
MAKILGLDLGTNSIGWAVVDDEANKISGMGSRIFPMGVDNLGDGDNELSKNASRTGARGVRRQFFRRRLRKKVLLKSLSENEMCPLVSTDFEDWKKTKQFPSEKLSTWFTLNPYELRQKALNEKLTLEEIGRIFYHLIQRRGFLSNSRKGGSDDGAIFKGNPKEGKIGIDETLKSIEDKTLGSYLFEIYPKENQPFQNGLERIRNRYTTRKMYVDEFELIWEKQAKFHKELNDALKQLFGGRKQDGYKEDGILFHQRPLRSQKHLVGNCSFETNKTKCPISAIPVELFRIYQWVNTVEYNGKKISKEEKDKLIEQLLASDKIEFKKLRKAIGKESAEFKFNYKDDDKIVGTHTISNLSNKKFFGKKWFEFTDKEQEDIWHVLYFFDSKSNLKDYAIKNWNFTEDQAEAISKFNVKDGYASLSRKAIGNILPFLKMGFTYDVAVVLGGIKNAFGSDWENLEQEKKDFLTDNIEDIVRSKISGGFIETIKELLVKEFGFTERNLKKLYHHSASIEAKTLLDKLPVNKEADKEVQAIRNPIVITALFELRKLVNELIDEHGKIDEIKVEMARDLKISKSQRNKIRREQKRLERENDRVKDRLLEEGQRITHDNILLYKLWEECKHTCPYTGQPIPIHKLFTGEVQIEHIHPWSRSLNDSFSNKTLCYADENRRKGDKTPFEFYGSDEANWSAIKERALKLFSDTKEYPNAYQKFKRFVQQKFDDDFSSRQLNDTRYISKEAKNYLAQICNKVNVSPGQATSNLRHKWGLNSILNDENEKTREDHRHHAIDALVMACTNVSYVQELSKWNRYKRNSTLKNFPMPWDNFHYDAEKAVDKILVSHKRINNVLTIRTHKAEKNGKVYRNVGVAARGQLHKETVFGKRKAPSSEEAYHVRKQIDSLTTEKQLEKVVDKTIRQLILKRVHELGGFDNGKIPANTFFTVDENGIKQPQIFLPNKNGNPVPILKIRMKENFSGAEKLKDDINQWVNPRNNHHVLIYKDGEGNLKEDVVTFWTVVERKRKGFPVYQLPTDGKEIVTTLHINDMFLLGLNEDEINWGKPDYEELKECLFKVQTLSSIFYEFRLNTDSTQNKDTNSNVFKRIQSFGEGKTGWVTHNPIKVKISVSGKIEKP

SEQ ID NO: 56 - protein, 1126 aa, unidentified
  REGION 1..1126: note = Description of Unknown: Cas Enzyme sequence
MARILGLDLGTNSIGWALIDDVQNKIVGLGSRIFPMGVENLGDGDGEISKNASRTGARGVRRQFFRRKLRKKILLKALSDNQMCPMFAKDFEDWKKTKEFPSEKLANWFALNPYELRQKALNEKLTLEEIGRIFYHLIQRRGFLSNSRKGASDDGTIFKGNPKEGKIGITETQQSMQDKTLGAYLFEIYPKENQPFQNGLERIRNRYTTRKMYVDEFELIWNKQSQYHTVLNEELKTKFGGRKLDGYKEDGILFHQRPLRSQKHLVGNCSFEPTKNKCPISAIPFEQFRVWQWVNTVEYNGKKISQEEKEKMVEFLYANEKPEFKKIRKVIGKESAEYKFNYKDDDKIVGTHTISNLSNKKYFGKKWFEFTEKEQEDIWHVLYFFDSKSNLKEYAIKNWNFTEEQAESIAKFNLKDGYSSLSRKAINNILPFLKFGFTYDVAVVLGGIKNVFGSDWDKLPEDKRNYIIDNVEGIVRSKTKGRFIDIIKDILRNDYNISDNQLRKLYHHSATIEATELLEKLPVGKGADKEIQAIRNPIVITALFELRKLVNELIDEHGKIDEIKVEMARDLKISKSQRNKIRREQKRLERENDRVKARLLEEGQRITHDNILLYKLWEECKRTCPYTGKSISLTQLFSGEVQIEHIHPWSRSLNDSFSNKTLCYADENRKKGDKTPYEFYGNDEANWSAIKERALKLFSDTKEYPNAYQKFKRFVQQKFDDDFSSRQLNDTRYISKEAKNYLSRICKNVMVSPGQATSNLRQKWGMNNILNDENEKTREDHRHHAIDALVMACTKVSYVQELSKWNRYNRNSELKNFPLPWQTFHYDAEKAVDRILVSHKKVSNDITVRTHKSEKNGKTHVNLGVAARGQLHKETVYGKRTFNGEEAFHVRKSIDSLTTEKQLEKVVDETIKLLIRKRILELGGFVKGNIPANTFFVVDENGVKQPQIFLPNKNGAPVPVLKVRMKENIGGAEKLKAKVNQWVNPRNNHHVLIYKDEKGNLKEEVVTFWTVVERKRTGQPAYQLPIDGKEIVTTLHINDMFLLGLNEEEINWENPDYEVLKDHLFKVQTLSQMFYEFRLSPDATQNKDTNSTVFKRIQSFGDGKTGWRNHNPIKVKISVSGKIQKL

SEQ ID NO: 57 - protein, 1119 aa, unidentified
  REGION 1..1119: note = Description of Unknown: Cas Enzyme sequence
MSRILGLDLGTNSIGWALIDDAKNKILGIGSRIFPMGVENLGEGEGREMSKNAGRTGARGVRRQFFRRRLRKKVLLKALSDNNMCPMVANDFEDWKKTKEFPSEKLAAWFALNPYELRHKALNEKLSLEEIGRIFYHLIQRRGFLSNSRKGGSDDGAIFKGNPKEGKIGITETQESIEDKTLGSYLFEIYPKENQPFQNGLERIRNRYTTRKMYVDEFELIWNKQSQFYSNLNEELKTLFGGRKLEGYKEDGILFHQRPLRSQKHLVGNCSFEPSKTKCHISAIPFEQFRVWQWVNTVEYNGKKISQEEKEKIVEFLYANEKPDFKKIRKAIGKESPEFKFNYKDDDKIVGTHTIANLSNKKYFGKKWFEFTEKEQEDIWHVLYFFDSKSNLKEYAIKNWNFTEEQAEAISKFNVKDGYSSLSRKAISNILPFLKLGFTYDVAVVLGGIKNVFASNWDKLSEEKKNYLIDNVEGIVRSKTKGGFIDIIKDILRNDYSVSDHQLRKLYHHSATIDVLELLEKLPLGKDADAAIQAIRNPIVIKALFELRKLVNELITDYGAIDEIKVEMARDLKVSKSQRNKIRKEQNRLERENDRVKSRLLEEGQRTTHDTILLYKLWEECKRTCPYTGKPISVTQLFSGEVQIEHIHPWSRSLNDSFANKTLCYADENRNKGNKTPYEFYGNDDTNWSAIKERALKLFSDTKEYPNAYQKFKRFVQQKFDDDFSSRQLNDTRFISKEAKNYLSRICKNVMVSPGQATSNLRQKWGMNNILNDENEKTREDHRHHAVDALVMACTKLSYVQELSKWNRYNRNSELKNFPLPWDSFRYDAEKAVENILVSHKKVSNDITVRTHITEKNGNKHKNIGLAARGQLHKETVYGKRTFNGEEAFHVRKPIESLETAKQIEKVVDETIKTLILKRINELGGFIKDKVPTNTFFIVGENGVKQPQIFLPNKNGNPVPILKVRVKENIGGAEKLKDNINQWVNPRNNHHVLIYKDEKGNLKEDVVTFWTVVERKRTNQPAYQLPIDGKEIVTTLHINDMFLLGLNEEEINWENPDFDLLRENLYRVQKLTSGDYFFRDGKASSINNKNEEKRLSLKGLFLLSPIKVKISVSGKIQKV

SEQ ID NO: 58 - protein, 1464 aa, unidentified
  REGION 1..1464: note = Description of Unknown: Cas Enzyme sequence
VVNVGKKNLSSYEENRNVINLFFHSFKNSYKIECIMTKILGLDLGTNSIGWAIVDKEGNEFSLVDKGVRIFSEGVKSEKGIESSRAAERTGYRSARKIKFRRKLRKYETLKVLSKNGMCPLSLDEVEAWRKSGFKQYPLNPEFLNWLRTDDVHNINPYVFRDRASKTKVTLYEVGRALYHLAQRRGFLSNRLDQSAEGIIELHAPNIESRIEETTTINDLKIEIQEYFEGLDILDKNAKELDEGEKKLKSLYNALDKIIKANEFEKAKTEIIARLNRKEDQGAVKQEIGEISQAMKDGCFETLGQYFYSLYNKGKIRNHYTAREAHYLNEFEKICEVQKISAIDISENIPEKRYSGLAKELYRAIFFQRPLKSQKGLIGKCSLDKTKSRCAISHPDFEAYRMWSYLNTIKIKTPQEEQLRFLTIEEKQQLIPKFFRKKDNFNFEDLSKELIPKGYTPDFYKSSSAKTVSYIFNYKAKDSVAGCVVSASLKNVLGEEWNTKTWTYETKNSKGEFVNREVDYKDLWHLLTVSTSDAYLEEYAIEKLGLDEKRAKSFSKIRLKKDFASLSISAINKILPYLKQGLLYSHAVFMANIEKIVDENIWNNPEERLYIQNKIAEIIENNTFENSKLEIVNGLIKDSKLNSCYYSLEAEQSYKEDLVKKVNSIFKEIDNKEAIVNDLFPVFIEQLKKYEYISVKRLDEKVLEFLKGENEDGEIYCTNPSKLNKLFHPSDIDVFKKKVIEDEFGNKKVVLGSPLISSIKNPMAMRALHQLRKVLNALIIEGLVDEKTRVHIELARELNDANKRKAIQDFQKENQTKREEFRKEIKALYLAEINKEIEPTEDDLLRYQLWIEQDKKEIYEEGKNISICDFIGENPKYDIEHTVPRSISQDNSLMNKTLCSQRFNREIKKNKMPIELANHEEIIKRVDHWRIEADKLSWEIEQLSKGIKAAATKDTKDRKIRRRHFLTLKRDYLKGKYERFVWKEPKVGFKNSQIPDTGIITKYSRAYLNSYFSRVESVKGGMVAEFRKIWGIQESYSKDGKKYYVEKDRSKHTHHTIDAITIACMTKDKYDVLAKAWTDEDNENLPLARKLLADSKPWSTFTEDIKKIEEEILVSHHTPDNVKKQAKKIIRIRGKKQYLAEMTQDENSKKVPQKDENGKIIYKLNTDGKRIPRVQQGDTVRGSLHQDSIYGAIKNPLNPEEIRYVIRKDIESIKATDVENIVDEVVKEKVREAIANKVLLISSNPQQKNKLADNQKVWMNEEKGIAINKVRLYANSVKNPLHIKEHSNLSKSRHEHKQKVYGQNDENYAMAIYEGKDKKGKIKRSFELLNYMDAGSYFKLSKKNFKEKYDIVTNPHDTTNLQLKYILKKGLMVLFYKESPIELKDLPINELNLRLYKLSKFDAQGRLTFRTHFEARQASELKEIYSFDFEKPFEQIRLQVSKLDMIVQGFDFNLSSSSKIDFLF

SEQ ID NO: 59 - protein, 1292 aa, unidentified
  REGION 1..1292: note = Description of Unknown: Cas Enzyme sequence
MTKILGLDLGTNSIGWAIRDTLLEGNQIIDTNVIVFPQGVGEEKGVEFSLAAERTKHRASRKLYRRRKKRKTDLLELLIKNGFCPLNLDELHLWSVYEKKREMKYPTENYEFSEWLKINPYKVRAKAANSMVSKQELGRALYHMCQRRGFKSGRKDADAGKDVEQYKKEKLILEQNGFKTLGEYYYDLLANDKKVRKTKFNADDQEVNSSRISYVEEFNFLIKTQKISKNLADKFFDAIFFQRPLKSQKGVVGKCTLEKTKTRCAVSHPLFEEFRMFQYLNSIKIKERTNDTFVFLSEYPEYYKIAKDKFYRVSAKNFKFSDISKSVNVAARKNSLFFTFNYKDKYPIVGSPTISKLIEVFDAKDWEECKVIIKSKYRKKDNKSVDELIDELWHTLFFAGDFVNDITSEKVNLFIRNRFEIPEEKVDYFEKINLKQGYSSLSKKAIGKILPFLKDKIIYPYAVFFANIDEVIGKDKWNENKQFIQDTIVDIISGYKNQTLKIDIINGLVGDFIKEYDNSDSSYILDETDKKDVIEKTKLFYGKYDWDKMPDENKNAILTKIEKEFQVQLRKRRVGSHFLVKPRVDEIIKEFLIQEYKILKEQADKLYHPSAMDAYPQSQDGFLGLPFTDSVKNPMAMRTLFYLRKLVNTLLKENKIAPDTEIIIELARELNDKNKRLAIERWQRELENENKKSRIKLEELAKDTNSIVTETDIIKYKLCKEQNGVCLYTNKTISCEKLLGSNPQFDIEHTFPRSKSFDNSLVNKTLADKTFNQIKGNRIPQELEEEYKQNFIHNIKDWKTKIEALEEKIEQQRYFSKVAGSVEQKNRAIQQRHYLKLKLDYWKQKVYRFTVTEIKPNFKNSQLVDTGVITKYSQLFLKSLFQRVFPAKGTMVADVRKSLGLNVKDRNYHYHHAIDAVVLTCMDKSIRDGLAKAFKESEVLGKKEKFKIEKPWKTFTEDASKLKNRIIVVHNHKDNIEKQTVKKLRKRNKIQYDKSGNTIYERGQGIRASLHKDTFYGAIERKNEKSEKEIWFVLRKPVNNNFTDANVNTIIDEGIKSRILKHGLKNIRTPENWILLPSEKDEKGNEIKEMLIKRIRVKTNNKNLPKIKAQSHVSQKSRKPYKENFYATLENIFGMAIYEAINEKGKKIVAHKTISAFDLAKHNQGNSKLEMPIENNIIKNKGKKNEILLPLSRVLKVNQMAIFYENNPNELKTISKENLNKRLFKITQFESDGRIQFRHHAQGGADKELKKESSLDFNTSAQKLRISLSNVKAIFEGNDFVIHSTSKIDFLI

SEQ ID NO: 60 - protein, 1533 aa, unidentified
  REGION 1..1533: note = Description of Unknown: Cas Enzyme sequence
LRANKLQKSVSETAFLFLSLSLHIIKKNMTKILGLDLGTNSIGWAIVDKEGSDFSLVDKGVRIFSEGVNIEAKTASESSKAAKRTGYRSARKLKYRRKIRKINVLKVLSDNNFCPPILDEELHTWRYKKIYPQNDELRQWLHTDNQADEHERKQQKKNPYYYRYIASKEVFDLNNKQDRYILGRALYHLAQRRGFLSNRLDNSENSIIEEKSFDISAIINESNSIAEFSEHFNEFLTSYDKTENTDKPLFTLNRAFERIIKENKGLSLKETKVKLEERLNKKEFLGPVKRAISDLSEKIKESNCSTLGEYFYKVYEQGGKIRGEHTDRNAHYLIEFEAICTKQRLPDLLKEKLKEAIFFQRPLKSQKGLVAKCPLENRKRCVPISHPSFEEFRMLSYLNTIKIKLPNDDKLRFLNLEERSLIRTLFFRKSRVNFDFSDIAKKITPKNLKYGFYKDKNVAEYDVLFNYNLRSNVTGCPTIANLIAVFGEDWKDYLQLYYAKKDKKTIEQIVDDIWHVLFRFDQEDMLRQFAKNNLGCNEKNALKFSKINLKQGYGSLSLKAIRNILPYLRGNVIYSHAVFLANMTNVLPKEIWKNQENKQIISNEINSILESHKVYSNKINIVNGLIKKNSNGTWNSNNPFVIESYQKNIEQQVKDFYGDKNWNKKSELEQKKIIEDCFLLLSKQMKLNSGRGEFAKKKTIDELLKTFLDDNFNIDRADLEKLYHPSAIEVYKKTKGHEDGKLYLESPLISSIKNPMAMRSLHQLKKVVNQLIKDELIDESTIVHIEMPRELNSANQRTAIRQWQDDLSKSRATHKKEIKAIFNGEVKTANCNDSFKPEYEPTEQDILKYQLWIEQNKVCLYTGKTICLSEFIGKNPKFDVEHTIPRSRSLDNSQVNKTLCCATYNRQIKKDRIPFECENHPEILLRIKHWYTKCKNLEAQINGLSKKVRAASTKERKDKYIVDRTKLKFEHSYLLKKYNSFTMEEVPNGFKNSQLVDIGIISKYGNMFLKTVFPKVFTVKGKTTANLRKMWGLPDKIRDNHAHHAKDAVIVACCSRDINDALANYYHQLELFNYYGKPKPSFAHRIPWKGFTHDVNAFDTNTLISHHTPDILAKQSKKTIRKKGIIQRNKNGEIIYKQGDTVRGSLHKETFYGAIKREVIDKKTGNTEEVIKYVKRQSIDLFKDTDLKNIVDDRIKEIVIHARALEKELKKEIELLIKQLRNAVEKDEQPLKDAIQVIENKISNELYVLPNKNGPSIPIKKIRYYTNDVSKPLFIKKHRDVSRHKHKQFYHAKNDSNYCMALYSGKNAKGKKEMAFELVNNIEAGNFFRLKNKKDRNADRILFLPEKHLETGFNLCYRNNKPIVLKKGLSVILLKEEDSIDFNDSELVLNRFYRIIGLDTDGIKLLYHSDARGSSEAISHMNNEINKIKLQDVENELRSLGSFVYFQNKFNDENIKKVEFFKELNDFFLKNNIEDDKGKIRKIKESKLTTPKGGDVIDNHKKFPYIKFKVSNFDALIEGIDFNISSIGEIKKI

SEQ ID NO: 61 - protein, 1456 aa, unidentified
  REGION 1..1456: note = Description of Unknown: Cas Enzyme sequence
TNSIGWAIVEKENDDFSLIDKGVRIFSEGVKSEKGVESSRAAERTGFRSARKIKFRRKLRKFETLKVLAENKMCPLSIQDVEQWRKSGFKDYPLNDEFLRWLRTDDDKNINPYFFRDKVSRSKANLYEIGRAFYHIAQRRGFLSNRLDQSAEGVLEEHCPKIEDITEECSTVEELKTEIHQYFEVLDILDKNSKDLDEGEKKLKSFFNSLDKIINTNLKDFAKAKNEIIEKLNKKENLGAVKQKIGEISQAMADGGFITLGQYFYSLYNKEVEIKNINTQVLEKFNRSKIRNQYTAREEHYLKEFETICRAQNIEGIDENERLPEKKYSGLAKELYKAIFFQRPLKSQKGLIGKCSFEKSKSRCAVSHPDFEEYRMWTYVNTIKIKTLEDETLRFLTAEERQKIVPKFYRKKDNFNFEDLAKELIPKGASLDFYKSLNSKSAHYLFNYKPKDSVSGCVVSASLKNVFGDDWKTKTFDYQTKNGNGAIVKRSVDYKDLWHLLSVSTSDIYLQEYAKENLGLDEKQAKSFSRIKLKKDFASLSLNAINKILPYLKEGLLYSHAVFMANIENIVDEKIWKDETQRKYIQNNIAKIIENYTYENGLLEAINSLIKECKNDGSYYSKEAENSYKADLNNKLISFYKYNKIEENKEKILNDLFPVFIEQLKKYEFISIKRLDEKVLEFLNGNNEDGEVFCDNEKRLNKLYHPSDIEVFKMKIIKDEFGNEKVVLGSPLTSSIKNPMAMRALHQLRKVLNALILEGQIDSKTRIHIEMARELNDANKRKGIQDFQNENKKAKESYREDIKKLYFEETKKEIEPTEDDVLRYQLWIEQNKMEIYEDGKSIGISQIIGNNPDYDIEHTIPRSISQDNSLMNKTLCSQRFNRDVKKTKMPFELTNHEEILLRVDHWRKEADKLNWEIEQIVKSTKGAATKDAKDRKIRRRHHLTIKRNYLQGKYDRFIWEEPKVGFKNSQIPDIGIISKYSQAYLKSYFNRVESVKGGMVAEFRKIWGIQESYQENGKKYYDIKDRSKHTHHTIDAITMACMTKDKYDVLASAWTLEDKEQISDARKLLANSKPWKTFTEDLKQIETEILVSHYTPDNVKKQSKKIVRIRGKKQYVAEVEKDENGKSIPKKDSNSNIIYKLNEKGKRIPRLQQGDTIGGSLHQDSIYGAIKNPLNHEEIRYVIRKDLESIKASDIENIVDEAVKEKVREAKENKIIVFSSNTQQKNKLNGTVWMNEEKGIPINKVRLYSNSVKNPLEIKEHVALSKSRHEHKQKVYAQNDENYAMAIYELDGKREFELINNFNLAKLMKLDEGDYPLYKEKITKGKIIQIPIAKSNNRDLVLKRGQQVIFYDKDVESPNDIEDLIDLKGRIYIIEGLSIQRIVRPSGKVDEYGVIMLRYFKEARKADDIKKDSFKPDGDFKLGENKPTRKMNHNQFSAFVEGIDFNVLPTGKIEKI

SEQ ID NO: 62 - protein, 1426 aa, unidentified
  REGION 1..1426: note = Description of Unknown: Cas Enzyme sequence
MSRILGLDLGTNSIGWAIVDKDGAEFSLVDRGVRIFSEGVNIEAKTNSESSKAAQRTDYRSARKLKYRRKIRKIDLLQVLSDNNFCPGLTEEELSDWRYKKIYPQNAEFRKWLSTDNQDDDNQRKAQKDNPYYFRFISVKNSLDLNNKQDRYNIGRAFYHIAQRRGFLSNRLDSSDNSIVEEKKFEITSLITESHSVIEFSELFNDFLSSFDKEETIDKPLFTLSRAFNAIIKDNEALVYDDLKVKLTERLNKKDFLGPVKKAISDLSEKIENSGCATLGEYFYTLYEKGLKIRGEYTDRKDHYIIEFDKICDKQNISTELKNKIKEAIFFQRPLKSQKGLVAKCPLENRKSCAPISHPDYEEFRLYGFLNNIKIKTPNDEKLRVLNTDEKELIDSLFYRKSKANFDFLEIAKKLTPKNLKFGYYKDKNSKEYDILFNYNLGSNVAGCPTIANLREVFGKDWKEYLLANFNKLNKNGAKKTAEEIVDAIWHVLFRFDNEEKLKQFAAESLLCDDKTATKFSKIKLKQDYGSLSLKAIRNILPYLKQNLIYAHSVFLANMKNILPNEIWNSEENKRVINTEINSILENYKVYSNNIEIVNGLIKNIKKANGTWSSDNKFVAEVYKNDLEKQVKDFFGTKKWNETREEYKTEILTECFELFSSQMQLKSGRGEFVKKKTIDEILKEFLEDNFNVSTDDLKKLYHPSAIEVYKKAKRSEDDGKLYLGSPLISSIKNPMAMRSLHQLKKVVNQLIKDDLIDEETIIHIEMPRELNSANERVAIRQWQEELKNRRNKFVEEIKIIYKEQCHQEIEPTEDEILKYQLWIEQDKVCLYTGKNIGICDFIGSNPKFDIEHTIPRSRSLDNSQINKTLCCATYNRQNKKDKIPFECDNHIEILPRISRWFAKYKGLEDQMKDISKKIKVASTKENRDKNIIKRTKLKFEHTYYFKKYKSFIIEEIPEGFKNSQSVDIGIISKYGNLFLKTAFNKVYPVKGKTTANLRQMWGLEEKTRTNHAHHAKDAVVVACCTRDINDALANYYQDLEQFEYYGKPKPSFSHRIPWKGFNDDVKEFDNNILISHYTPDVLPVQSKKAIRKRGLIQRNEKSEIKYKQGDTVRGALHKESFYGAIKREEIDKKTGKPEEVIKYVLRKPIENFSESDIKNIVDDKVREIVMSGKEQEKTIKKEIEDLKRQIKNADERREQELKTGIEQLEYKIKNELYTLPNQKGAPIPIKKIRYYTADVTNPLLIKKHRDVSRHEHKQHYFAKNDGNYCMAIYEGIDGKGKLLTDFKVINNFDAGKYYNSRTNSHKYPLEYNIEDKNKNILNLKFLLKTGTLVFFFKDFKDEVWELDAIELAKRLYKTSAIEADGRIQFRLHSTAKPDGELEKASSLNFELANEKLRLSKSALNVLVEGFDFRISSIGKIEKINSL

SEQ ID NO: 63 - protein, 1122 aa, unidentified
  REGION 1..1122: note = Description of Unknown: Cas Enzyme sequence
MAKILGLDLGTNSIGWAVVDDENKKILGMGSRIFPMGVENLGDGDNEVSKNASRTGARGVRRQFFRRRLRKKILLKALSENKMCPLNEEDFKDWKNTKMFPSAKLKDWFALNPYELRNKALTKKLNLEEIGRIFYHLIQRRGFLSNSRKGGSDDGAIFKGNAKEGKIGITETQDKIQDKTLGSYLYDIYPKENEPFKDGLERIRNRYTTRKMYVDEFELIWDKQKEFHSAFTDELKQLFGGRKLDGYKEDGILFHQRPLRSQKHLVGYCTFEPTKTKCPISAIPFEQYRVYQWVNTIECNGKKITQEEREKIANFLFENEKPDFKRIRKVLGKESAEFKFNYKNDDKIVGTYTISNLCNKKFFGKKWFDFTNKEQEDIWHILYFFDSKSNLKEYAVKNWGFNEEQATNISKFNVKDGYASLSRKAINNILPFLKQSFVYDVAVVLGGIKNVFGNKWELLSEEKRNFIVDNVEDIVRSKIAGGFIETIKDLLKKEYGLSDKELKKLYHHSATIEAKAILEKLPVGKEADKQIQAIRNPIVTTALFELRKLVNELLDEHKKFDEIKVEMARDLKISKSQRNKIRRDQKRLEKENDRVKAEVLKYTNLSHDNILKFKLWEECKQTCPYTGKPISIKDLFSGEVQIEHIHPWSRSLNDSFANKTVCWADENRKKGDKTPFEFYGNDEANWSAIKERALKLFSDTKEYPNAYQKFKRFVQQNFDDDFSSRQLNDTRYISKEAKNYLAQICKKVTVAPGQMTSNLRHKWGLNNILNDENEKTREDHRHHAIDALVMALGKVSYLQELSRWNRHNRTHELKNFPMPWETFQQDAAKATEQILVSHKRLKSVLTIRTHFTEKNGKKYKNVGVAARGQLHKETVFGKRTAPFSEEAFHVRKPIESLTTEKQVEKVVDETIRKLIFKRVTELGGYDKGKIPANTFFVADENGINQPQIFLPNKNGNPVPILKIRMKENIGGAEQLKNDVNQWVNPRNNHHVLIYKDENDNLKEDVVTFWTVVERKRKGFPVYQLPTGGKEIVTTLHINDMFLLGLNEEDINWEKPNYELLKEHLYRVQKLTSGDYFFRKHKSSTITDDDYKQIRGFGEGKTGWVTHNPIKVKITPTGKIEKL

SEQ ID NO: 64 - protein, 1527 aa, unidentified
  REGION 1..1527: note = Description of Unknown: Cas Enzyme sequence
MSKIKLGLDIGTNSIGWTVLEKQDGIYDFLKIEDGSGELIPSKGSYIFSKSVDANENSKASERRGFRGSRRRIDRIRLRKIATLKVLDEFGLCPKFKEGELNRWKNKKIYPCENIDFIDWQRTGKKNGNSQTEKLKQPYYLRNLAATKPGMMYTNDDKLQLGRAFYHLSQRRGYLSNSEDDQSDDKIDLFKTDVIKLLESCSGSGDFKVPYEVIFNLYKSDDKVKKLNSKISKVLKTEQILENIKTLIVAEFEKPENLGKVMAGIGELSKEMKGFPTMGCYFYSIYNTKDKNSGLINRIRGRYTHREEHYEAEFNHICKIQNISGDLKDKLHKAIFNQRPLKSQKGLVAKCTLEPKRKRIALSHPLFEEFRMWESINKIKIKREFEDKLNFLNKGEKELIKNEFLQITDFEFGKIANKLSNGLPYNYIKRPEEVYIKGKTDKDSEIKAVISFNFPLDKKFSACPTTSSLKKVIGTEKYSAMQLLNSGYKDEKGKKQISIEDVWHCLQMDSFGSKDKKTVREEFAKKHLQLDEKGIENFVKIKLVKGYGSLSKSAIKKIIPFLEKGEIYTNAVFLANVSEVLGRKISVIEQNQISEIIKKALENFRIEKQNKGIVNNYISKFKDNRENSLGNNELSINAFKKELDYEIANWIGEVQLGSMKKEEVSKITETCWNLFFEAACDKLPKDVNYLTTKTIPQFIEEGLREVFPNDKIDVSKLYHPSAMEAYPKADKKLGNPEITSIKNPVFDRAMHQVKRLCNELIRNGLVDKETEVNIEVAGEINSASYRRALSIWQKEQEEIRTWAKNKIIECYPEEDRKNKIPTDTEVAKYILYSEQNGRCLYTSETITPRDFLNKQTIYDIEHTIPRSKNNDNSLKNKTLANYDFNRNYKKAILPSLLNINFNGVQIDKETILLNRNEHLKSYSFIGKKPNMNIAWNVTLSDLKSEYKKFKKAAENISDAVAHDEVMSKAHYTKMKLDYLREKYRNFEIKEINNQFTNANLVDTRIITKYARAYLNSYFNKVNVVIGKITDTLRKIWGLQGDEDVKDRSNHIHHCIDAIVVACVEKGTANRISELYHKYENDYFRGNSNPRISANEPMKNFVERMKNLHKEVLVYHKQTDRIKPLLINAQKENAKKLNLRGRLNSQNPYAHIKKDGELIFAQRKPISGLDGSDIDNIIDEGIKMRLLSLVDTKGWEKLIEVQTFDIDEILTKQIELKKTVALKIYEKIKKDKKYKDFLKNNIDKENIGFDYFDKESLIDMIYINSVLDGSIEAKKEIIRKKIINEITNLVRSKGLETLLKENSGVVILPEYIDKKTEKRISEMIIKRVRLKSSKSNLKDYKEIRNIDRNLNIDKDGKLRFVHKFDFYFDKESYTNYEARIYGDLIPNEKGKFKNRDYKVINHHNIVKNVFEKEDFSPILKLHQDDLFLVFDINPTDEIEWKNIQDLQNRLFKIVKFDENGIIVLIRHNFAGGSVDSASPIKAESDLNDVSQVVLRRSPSTLRVIPAKINALGKLDINFSKNFINSINN

SEQ ID NO: 65 - protein, 1123 aa, unidentified
  REGION 1..1123: note = Description of Unknown: Cas Enzyme sequence
MARILGLDLGTNSIGWALIDDKQNKILGVGSRIFPMGVENLGDGDGEISKNASRTGARGVRRQFFRRRLRKKILLKALSEYGMCPLIQSDFEDWKKTKAFPSEKLVAWFALNPYELRHKGLHEKLSLEEIGRLFYHLIQRRGFLSNSRKGGSDDGAIFKGNPKEGKIGIDATLDSLEGKTLGSYLYSIYPKENEPFQNGLERIRNRYTTRKMYVDEFEVLWHAQSKYHASLTAELKALFGGRKLDGYKEDGILFHQRPLRSQKHLVGNCSFEPSKTKCPISAIPVELFRIYQWVNTVEYNGKKLAKTEKDKMIEVLLTSEKDEFKKLRKAIGKESAEFKFNYKDDDKIVGTHTISNLSNKKYFGKRWFDFTDKEQEDIWHVLYFFDSKSNLKEYALKNWNFTEEQAEAIAKFNVKDGYASLSRKAIGNILPFLQQGFVYDIAVALGGIKNALGTEWETLSEDKKSFIIDNVPDIVRAKISGGYIDTIKDLLRKEFGFTDATLKKLYHHSTNIDATTLLDRLPVGKEADKELQSLKNPIVVTALFELRKLVTALIDEYGSIDEIKVEMARDLKLSKMQRNKIRREQKRLEKENDRVKDRLKEEGQRITHDNILLYKLWEECKKTCPYTGQPIPLHKLFTGEIQIEHIHPWSRSLNDSFSNKTLCYADENRRKGDKTPFEFYGGDEGNWSAIKERALKLFSDTKEYPNSYQKFKRFVQIKFDEDFSTRQLNDTRYISKEAKEYLSQICPKVIVSPGQATSNLRQKWGMNNILNDENEKTRDDHRHHAVDALVMACTKVSYVQELSKWNRYNRNSELKEFPLPWEGFRRETELAVEKILVSHKRTSKDITVRTHTFEKNGVKRKNVGVAARGQLHKETVFGKRTFNGEEAFHVRKPIDSLTTEKQLEKVVDSTIKNLILKRVQELGGFVKGNIPANTFFIVDENGIKQPQIFLPNKNGNAVPILKVRVKESIGRAEKLKENVNQWVNPRNNHHVLIYKDEKGNLKEEVVTFWTVVERKRTGQPAYQLPADGKELVTTLHTNDMFIVGLNDEDINWDSTDLSILCQNLYRVQKTSKKEKSFEFNFRMAVASSLDNKNQEISIQSFKKWIELNPIKVKISVSGKIYKV

SEQ ID NO: 66 - protein, 1128 aa, unidentified
  REGION 1..1128: note = Description of Unknown: Cas Enzyme sequence
MARILGLDLGTNSIGWALIDDKQNKILGVGSRIFPMGVENLGDGDGEISKNASRTGARGVRRQFFRRRLRKKILLKALSEYGMCPLIQSDFEDWKKTKAFPSEKLVAWFALNPYELRHKGLHEKLSLEEIGRLFYHLIQRRGFLSNSRKGGSDDGAIFKGNPKEGKIGIDATLDSLEGKTLGSYLYSIYPKENEPFQNGLERIRNRYTTRKMYVDEFEVLWHAQSKYHASLTAELKALFGGRKLDGYKEDGILFHQRPLRSQKHLVGNCSFEPSKTKCPISAIPVELFRIYQWVNTVEYNGKKLAKTEKDKMIEVLLTSEKDEFKKLRKAIGKESAEFKFNYKDDDKIVGTHTISNLSNKKYFGKRWFDFTDKEQEDIWHVLYFFDSKSNLKEYALKNWNFTEEQAEAIAKFNVKDGYASLSRKAIGNILPFLQQGFVYDIAVALGGIKNALGTEWETLSEDKKSFIIDNVPDIVRAKISGGYIDTIKDLLRKEFGFTDATLKKLYHHSTNIDATTLLDRLPVGKEADKELQSLKNPIVVTALFELRKLVTALIDEYGSIDEIKVEMARDLKLSKMQRNKIRREQKRLEKENDRVKDRLKEEGQRITHDNILLYKLWEECKKTCPYTGQPIPLHKLFTGEIQIEHIHPWSRSLNDSFSNKTLCYADENRRKGDKTPFEFYGDDEGNWSAIKERALKLFSDTKEYPNSYQKFKRFVQIKFDEDFSTRQLNDTRYISKEAKEYLSQICPKVIVSPGQATSNLRQKWGMNNILNDENEKTREDHRHHAVDALVMACTKVSYVQELSKWNRYNRNSELKEFPLPWEGFRREAELAIEKILVSHKRTSKDITVRTHTIEKNGVKYKNVGVAARGQLHKEFVYGKRKAPFSDEAFHIRKPIESLLTEKHIEKVVDTTIRNLIIKKVNEMGGFDKDKIPANTFFIVDDKGVKQPQIFLPNKNGQPVPILKVRIQETINKAKQLKNNSNQFVNPRNNDHVLIYETIDGKLEKDVVSFWEVVERKKQGLDKIKLPIDGKKIIQTFKENDMFILFKIEDEIDWNINNDISDNLYKVQKIAGADYFMEICFRKHNDSRDDKNAKADYVYIKGFGEGKTGWFTFNPIKVKISVSGKILKA

SEQ ID NO: 67 - protein, 1128 aa, unidentified
  REGION 1..1128: note = Description of Unknown: Cas Enzyme sequence
MAKILGLDLGTNSIGWAVVDDEKNKILGIGSRIFPMGVENLGDGDNEMSKNASRTGARGTRRQFFRRRLRKKVLLKALSEHNMCPLKDEDFKDWKKTKEFPSVKLSEWFALNPYELRQKALNEKLSLEEIGRIFYHLIQRRGFLSNSRKSGGEDDEKGTIYKGVAKEGKIGITETQEKIQDKTLGTYLYEIYPPENKPFQDGLERIRNRYTTRKMYIDEFELIWNNQSQFHSSLTDDLKTLFGGRKIDGYKEDGILFHQRPLRSQKHLVGNCSFEPSKTKCPISAIPFEQFRVWQWVNTVEYNGKKLSQEEKEKIVEFLYTIEKPVFKRIRKVIGKESAEFKFNYKDDDKIVGTHTISNLSNKKFFGKKWFDFSEKEQEDIWHVLYFFDSKSNLKDYALKNWHFTEEQAVAISKFNVKDGYSSLSRKAISNILPFLKRGYTYDVAVVMGGIRNVFGSNWEQLPDDKRNFLIDNVEGIVRSKTKGGFIDIIKDILRKDYGISDLQLRKLYHHSATIDATELLEKLPVGKDADKEIQSIRNPIVITALFELRKLVNELIDEHGKLDEIKVEMARDLKISKSQRNKIRRNQKRLERENDRIKAEVEKYARVTHDSMLLYKLWEECKKTCPYTGKPISVTQLFSGEVQIEHIHPWSRSLNDSFSNKTLCYADENRKKGNKTPFEFYGHDEANWSAIKERALKLFSDTKEYPTSYQKFKRFVQQKFDDDFTTRQLNDTRYISKEAKNYLSKICKKVTVSPGQATSNLRLKWGLNSVLNDENTKTREDHRHHAIDALVMACTKVSYVQELAKWNRYNRTYDLKEFPMPWETFRYDAEKAVEQILVSHKKVSNDITIRTHITEKNGKKYKNIGIAARGQLHKETVFGKRTFNGEEAFHVRKPIDSLTTEKQLEKVVDEAIKLLIRKRIQVLGGFVKGTIPNNTFFIVDENGVKQPQIFLPNKNGEPVPILKVRVKENIGGAEKLKQNVNQWVNPRNNHHVLIYKDDKGNLKEEVVTFWTVVERKRQKQSIYLLPEDGKEIVTTLHINDMFLLGLNEDEINWENPDYELLKAHLFKVQTLSQMFYEFRLSQDATQNKDTNSDVFRRIQSFGDGKTGWKTHNPIKVKITPTGKIEKA

SEQ ID NO: 68 - protein, 1447 aa, unidentified
  REGION 1..1447: note = Description of Unknown: Cas Enzyme sequence
MAKILGLDLGTNSIGWAIVEKDGTEFSLIAKGVRIFSEGVNIEAKTNSESSKAAKRTEFRSARKLKYRRKIRKIELLKALSDNNLCPKLSDEELSDWRFKKIYPQNDEFRIWLSTDNQDDIEERKLQNKNPYSFRFKATKENLNLNSKEDRYILGRAFYHIAQRRGFLSNRLDSSDNSIIEEKNSDITGIINDTTSIVEFLESFSEFLSSFDKEEANNKPLFSLYRAFNAIIKENSALGYSEIKEKLEERLNKKEFLGPVKRAISDLSEKIQEEKCTTLGEYFYILYQKGGKIRGEYTHRIEHYLTEFNFICSKQKISTEVKEAIEKAIFFQRPLKSQKGLVAKCPLENRKACVPVSHPDFEEFRMSGYLNNVKIKLPTDEKLRLLNDDEREQIQSLFFRKSKANFDFIDIAKKLAPKGLIYKYYKDKEASNENVLFNYNLGSNVAGCPTISYLVDIFGANWKDYLLSNFVKNTKVENNLKVSKSIDDIIDDVWHVLFRFDSEELLKQFALENLQCDEKTASKFSKIKLKQDYGSLSLKAIRNILPYLRQNMIYSHAVFLANMKNILPTEIWNNEENKNVINKEINSIIENYKLYSNNIDIVNGLIKNVKKENGTWSSSNDFVAEAYRNGLNKQVRDFFGTKKWNETPEVYQNKILSECFELFSNQMKLNSGRGEFAKKQTIDEILKLFLSDNFNISEESLKKLYHPSAIEVYKKAKRSEIDGKKYLESPLISSIKNPMAMRSLHQLKKVINQLIKDDMVDEETLIHIEMPRELNSSNERVAIRQWNEDLKSRRNKYSEEIKSIFRGEIKTEACNNVNSSYNNYEPTETDILKYQLWIEQNKVCLYTGKTICLSDFIGNNPKFDIEHTIPRSRSLDNSQINKTLCCATYNRQTKKDKIPFECPNHEEILLRIKHWYAKYKALEQQIKDLSKKVKAASTKEKRDKYIIDRTKLRFEYSYYFKKYKSFNMEEVPEGFKNSQSVDIGIISKYGNLFLKTVFNKVYPIKGKTTANLRQMWGLNEKSRDNHAHHAKDAVVVACCTRDINDALANYYHDLEQFEFFGKPKPSFSHRIPWEGFHKDIDDFDNNTLVSHHTPDNLPVQSKKAIRKRGIIQRNEKGEIKYKQGDTVRGALHKESFYGAIKREEVDKKTGEIIETIKYVKRQAIELFKDTDLKNIVDDKIKEIVEKGREQEKQLKKEIEELKKQLKNLKEEEEQPIKDAIQVIENKIKNELYVLPNKNGKPVPINKIRYYTSDVTNPLFVKKHRDVSRHEHKQFYHAKNDGNYCMAIYEGLDKKGKINRSNQLINIIDAGKYFKLSNNDKKLYPIAPEKDENLNPLKYILTKGKMLLIYDKSPKELFEMSEDKLLERLFEITQLDVEDSCVKLLHHSEAREKKKLTPLMGLKSGMKGGKNIGEHKKYPWIKIGVNSFDCLVEGYEFMLTTTGKIKFL

SEQ ID NO: 69 - protein, 1545 aa, unidentified
  REGION 1..1545: note = Description of Unknown: Cas Enzyme sequence
MAKILGLDLGTNSIGWAIVDKDGNDFSLVDKGVRIFSEGVKSEKGIESSRAAERTGYRSARKIKYRRKLRKCETLKVLSLNGMCPLSIEEVEEWKKSGFKKYPLNPEFLKWLRTDETENINPYVFRDRASKQKVALFELGRAFYHIAQRRGFLSNRLDQSAEGVFEEHNPQIQALIEDLDNASLILDELNGYYLGIGIIEATEKNVFKKDLDEGEKKLKTLYNSLVAITNKNENIEKCKEELIIRLNKKEDLGKVKGKIKDISQAMLDGNFKTLGQYFFSLYNKEKIRNQYTSREEHYLKEFIIICEAQGINGIDDDEKLPEKKFTGLAKDLYKAIFFQRPLKSQKGLIGKCSFEKSKSRCAVSHPDFEEYRMWTYLNTIKIGTQSEKTLRFLTQEEKIKLVPKFYRKNDFNFEILAKELVEKGASFGYYKSSKKNECFYWFNYKPTDTVSACQVSASLKNAVGDDWKTKSFTYQTLNAKKEEVTKTVDYKDLWHLLSISTSDIYLYEYAKEKLKLDDKNAKVFSKIKLKKDFASLSLSAITKILPYIKEGLLYSHAVFMANIENVIDDEIWKDESQRKYIKTQIAEIVENYTFEKNLLEVVNGLMKEYKTEKEDEKKVYYSKEAEPEFGIDLKKKLIGFYKSNKIEDEREQQFIFNHLLPIFIDQLKKYEFIKIKRLDEKVLEFLKGENETGQVFCSEEKGTDQEKEKKINNRLKKLYHPSDIEVFKKQKAKDKDGNETGQLILGSPLTSSIKNPMAMRALHQLRKVLNTLILEGQVDENTRIHIEMARELNDANKRKGIQDYQNENKKFREEAIKVIKKLYFEECKKEVEPTEDDILRYQLWIEQGKCEIYEQGKNISICDIIGNNPAYDIEHTIPRSISQDNSQMNKTLCSQRFNREIKKQKMPIELSNHLEILPRIAHWKEEADNLSREIEIISRSIKAASTKEIKDKKIRRRHYLTLKRDYLQGKYDRFIWKEPKVGFKNSQIPDTGIITKYAQAYLKSYFKRVESVKGGMVAEFRKQWGIQESYIDENGFKQYKEKDRSKHTHHTIDAITIACMTKDKYDVLAHAWRLEDEQNKKEAKAIIEQAKPWKTFKEDLLKIEEEILVSHFTPDNVKKQSKKIVRVRGKKQYVAEIERDAKGKAIPKKDANGKVIYKLNEKGEKIPRLHQGDTVRGSLHQDSIYGAIKNPLNTDEIRYVIRKDLESLKATDIENIVDEAVKEKVKKAIANKVLLLSSNAQQKNKIAENEKVWMNEEKQVPIKKVRIYANSVKNPLEIKEHSLLSKSRHEHKQMVYGLNDENFAMAIYEGLDKKGNTERAFELINYMDAGYYYKLKNKNERRKNIISLIPEKHLETGFDLLKSNNKPIILKKGLNVILYKNEKEEINFNNPNSIIKRLYKISGLDKDGIKLTYCVSAKGSTENIAYMNDIINEQKLFQIRSEIENLGLWDNIFSDFKNDNIKKSIFFKNLNDLLNKHYLENNIYDSKGLIKKVKFKESGLTTPKGGDVIDSFKDFPYIKFKASNFNALIEGIDFKILPSGRVVEI

SEQ ID NO: 70 - protein, 1123 aa, unidentified
  REGION 1..1123: note = Description of Unknown: Cas Enzyme sequence
MSKILGLDLGTNSIGWALIDDNQNRILGVGSRIFPMGVENLGDGDGEVSKNASRTGARGVRRQFFRRRLRKKVLLKALSEHNMCPMVTIDFEDWKKSKQFPSEKLSNWFSLNPYELRHKALSEKLTLEEIGRILYHLIQRRGFLSNSRKGGSDDGAIFKGNPKEGKIGITETQESIQDKSLGSYLFEIYPKENQPFEGGLERIRNRYTIRKMYVDEFELIWNKQSQFHSSLNDDLKTLLGGRKLDGYKEDGILFHQRPLRSQKHLVGNCSFEPTKTKCPISAIPFEMFRIWQWVNTLEYNGKKITQEEKEKIVEFMCANEKPDFKRIRKVIGKESAEFKFNYKDDDKIVGTHTISNLSNKKFFGKAWFDFSEKEQEDIWHVLYFFDSKSNLKDYAIKHWNFNEAQASDVSKFNVKDGYSSLSRKAISNILPFLKLGFTYDVSVVLGGIKNVFGSEWEKLSEEKRNYLIDNVEGIVRSKIKGGFIDVIKGILRNDYSISDNQLRKLYHHSATIDAVELLDKLPVGKEADKEIQAIRNPIVITALFELRKLVNELIDEHGKLDEIKVEMARDLKISKSQRNKIRREQKRLERENDRVKDRLVENNIRITHDNILLYKLWEECKKTCPYTGKPISVTQLFSGEVQIEHIHPWSRSLNDSFSNKTLCYADENRKKGNLTPFEFYGSDETNWSAIKERALKLFSDTKEYPNAYQKFKRFVQVKFDDDFSSRQLNDTRYISKEAKNYLSRICKNVIVSPGQATSNLRQKWGMNNILSDENEKTRDDHRHHAVDALVMACTKVSYVQELAKWNRYNRNSELKNFPLPWETFRFDAEKAVEKILISHKKVSNDITVRTHITEKNGIKYKNVGVAARGQLHKETVFGKRTFNGEEAYHVRKSIDSLETAKQIEKVVDETIKQLILKRVNELGGFVKDKVPANTFFIVDEKGIKQPQLFLPNKNGQPIPVLKVRVKESVGRAEQLKANVNQWVNPRNNHHVLIYKDEHGNLKEDVVTFWTVVERKRTGQSIYQLPINGKEIITSLHTNDMFIIGLNEDEINWELIDFNLINHHLYRVQKTSKKEKSFEFNFRLGIASSLDNKSQEISIQSFKKWIELNPIKVKISVSGKIQKV

SEQ ID NO: 71 - protein, 1128 aa, unidentified
  REGION 1..1128: note = Description of Unknown: Cas Enzyme sequence
MAKILGLDLGTNSIGWALIDDKQNKILGIGSRIFPMGVENLGEGEGREMSKNAGRTGARGVRRQFFRRRLRKKILLKALTENKMCPMVVSDFEDWKKTKEFPSEKLANWFAINPYELRQKALNEKLSLEEIGRIFYHLIQRRGFLSNSRKGGNDDGTIFKGNLKEGKIGIDDTLESIEGKTLGSYLYEIFPKQNQPFQDGLERIRNRYTTRKMYVDEFELIWNKQSQYHANLNEDLKTLFGGRKLDGYKEDGILFHQRPLRSQKHLVGYCSFEPTKTKCPVSAIPFEQFRVWQWVNTIEYNGKKIPHQDKDKIVEFLYANEKPDFKRIRKVIGKESAEFKFNYKDEDKIVGTHTISNLLNKKYFGKKWFEFSDKEQEDIWHVLYFFDSKSNLKEYAFKNWNFTDEQADVISRFNVKDGYSSLSRKAITNILPFLKIGFTYDVAVVLGGIRNVFGSDWEKLSDEKRNYLIDNVEGIVRSKTKGGFIDVVKDILRNDYSITDNQLRKLYHHSAAIDVSELLEKLPVDSVADKEIQKIKNPIVITALFELRKLVNELIDEHGKIDEIKVEMARDLKISKSERYKIRRNQQRLEKENDRVKAEVLKYTNLSHDTILKFKLWEECKRTCPYTGLSIPINELFTNKWQIEHIHPWSKSLNDSFANKTLCLGTENIKKGNQTPFEFYGNDEVSWSAIKERALKLFSDTKEYPNAYQKFKRFVQQKFDDDFSSRQLNDTRFISKEAKNYLSKVCKNVMVSPGQATSNLRQKWGLNNILHDENAKTREDHRHHAVDALVMACTKLSYVQELSKWNRYNRTYDLKQFPLPWETFSYDAEKAVEKILISHKKVSNDITVRFKSVEKNGKKHTNKGVAARGQLHKEFIYGKRIAPFIGEAYHIRKPIGSLETEKHIEKVVDVTIRNLIYKKVNELGGFINGKIPNNTFFTVDENGNKQPQILLPNKNGQPVPILKIRIQETINKAKQLKKDSNQFVNPRNNDHVLIYETIDGNLEKDVVSFWEVVERKKEGLNKIKLPSDGKKIINTFKENDMFILFKNEDEINWDSSIDLSDNLYKVQKIAGADYFMEICFRKHNDSRDDKNAKGDYVYIKGFGEGKTGWFTFNPIKVKISVSGKISKV

SEQ ID NO: 72 - protein, 1436 aa, unidentified
  REGION 1..1436: note = Description of Unknown: Cas Enzyme sequence
MAKILGLDLGTNSIGWAIVEKDNNDFSLVDKGVRIFSEGVNIEAKTNSESSKAAQRTGYRSARKLKYRRKVRKIDLLKILSDNNLCPKLSDRELSDWRYKKIYPQNDEFRRWLSTDNQDNEDERKKQKDNPYYFRFISVKNSLNLSSKLDRYYVGRAFYHIAQRRGFLSNRLDSSDNSIIEEKKFDINSIINESHSIAEFSELFIDFLSSFDKDEALDKPLFTLSRAFNTIIKDNSTLIYNELKEKLIERLNKKEFLGPVKRAISDLSEKIEDAKCLTLGEYFYTLYEKGEKIRGEYTHREDHYLKEFETICNRQNIASELKDKIKEAIFFQRPLKSQKGLVAKCPLENRKACVPISHPDYEEFRLYSYLNNIKIKTLNDDKLRVLTTDEREQIDFLFYRKSKANFDFAEIAKKLTPKNLKPGYYKDKNSKDYDVLFNYNLGSNVAGCPTIANLREVFGKDWKIYLSSNFLKNTKTENNKVVGKTEEDIIEDIWHVLFRFDKEELLKQFAIDNLSCDEKTANKFSKIKLKQDYGSLSLKAIRNILPYLRENLIYSHSVFLANMKNILPAEIWNNEENKRVINNEINSILENYKVYSNNIEIVNGLINNIKKENGTWSSDNKFVAEIYKKDLEKQVKDFVGTKKWNETPIVYQASILKECFELFSTQMQLKSGRGEFAKKKTIDEILKQFLNDNFNVDEGGLKKLYHPSAIEVYKKAKRSEDDGKFYLGSPLISSIKNPMAMRSLHQLKKVVNQLIKDDLIDEETVIHIEMPRELNSANERVSIRQWQEELKNRRNKYAEEIKSIFRGDIKTDDCNDVKSLEYEPTENDILKYQLWIEQDKVCLYTGKTICLSDFIGSNPKFDIEHTIPRSRSLDNSQTNKTLCCSIYNREVKKDKIPFECGNNDEILLRISHWYAKYKGLEDQIKDVSKKIKVASTKENRDKNIIKRTKLKFEHTYYYKKYKSFTIEEIPEGFKNSQSVDIGIISKYGNLFLKTAFSKVYAVKGKTTANLRQMWGLEEKTRDNHAHHAKDAVVVACCTRDINDALANYYHDLEQFEFYGKPKPSFSHRIPWKGFNDDVKEFDNNILISHHTPDVFSTQSKKAIRKRGIIQRNEKGKIKYKQGDTVRGALHKESFYGAILREELDKKTGKAEEVVKYVKRQSIGLFKDTDLKNIVDDKVKEIVEKGREQEKQIKKEIEELKKQMKNVKEEEEQQFKEAIELLEIKIKNELYVLPNQNGSPVPIKKIRYFTNDVSNPLLIKKHRDVSRHEHKQHYFAKNDGNYCFAIYEGKDKKDKFISEYKVVNNYEAGKYYNSKANTHKFPLEFNVEDKNKNVLELKFLLKTGTLVLFYKNFKDEIWELDNLDLAKRLYKTVAIEADGRIQFRLHSTSKPDGQLEKSSEINFEIAKEKLRLSKSALNVIVEGFDFKISSTGKISKM

SEQ ID NO: 73 - protein, 1424 aa, unidentified
  REGION 1..1424: note = Description of Unknown: Cas Enzyme sequence
MTKILGLDLGTNSIGWAVVEKEKSEKDYTLIDKGVRIFSEGVNIEPKTNSESSKAAQRTDYRSGRKLKYRRKLRKLELLKVLSDNGFCPALSNDELKLWRYKKIYPKNDEFRLWLSTDNQNDKLERKKQIKNPYVFRFKASTQKLDLNNIIDKHELGRAFYHMAQRRGFLSNRLDTSDNSIIEEKNLEIEDIIQQSNSAAELQVTYDEFLESYDKADANTKALFTLGRAFKSILKDNKNEDFESVKEKLSERLNRKEFLGKVKSAISDLSSKIEEANCNTLGEYFYELHKEGQRIRNNYTHREEHYLHEFNTICDKQNLPTKLKKAIENAIFYQRPLKSQKGLVAKCPLENDKACVPISHPDFEAFRMYSFINSIKIKPVDEDKLRFLNEVEREIIEPLFYRKSKPNFDFVEIAKKLTPKGLTFGYFKDKKSKEFDVLFNFGNYTNVSGCPTIANLRYVFGDDWKAYLTTNFNKKNKDNSNKTEHQIIDAIWHVLFRFDKTEKLKQFVKDYLNCDEKTAIKFSKIKLKQDYGSLSLKATRNILPYLEKGLLYSHAVFLANMKTVLPNDVWKNKEDRAIINKEVFSIIDNYNNYKNTINIVNGLIKKVKANQETWNSTNNFVVEAYQKDLNVIIEDYYGVKRWNSFSEEKKENILNDSFQLFSKQMALNSGRGAFTKKETLEERVKTFLRDNFNVSEANLKKLYHPSAIEVYDKVKRSKTDGKLYLGSPLISSIKNPMAMRSLHQLRKVINQLIKDDVIDENTIIRIEMARELKSANERVAIRQWQNDLQNNRKNYIEAIKKLYKEDCGLDIEPSENEILKYQLWNEQNRVCIYTGKNIGICDFIGANPKFDIEHTIPRSKSLDNSQTNKTLCCSIYNRDIKKNKIPTECHNHDEILPRISHWYAKYKSLEAQMRALTKKVRASTTKENRDSNIQKRAKLRFEYNYYRNKYKTFTMTEIPKGFKNSQSVDIGIISKYGNLFLKSLFSQVYPVKGKTTANLRDIWGLDKKERINHAHHAKDAVVVACCSRDINDALAEYYHNYEDYKFYGKPKPSFKHRIPWKGFNNDVNNFNENTLISHHTPDVLSIQSKKAIRKRGIIQRNKDGKIMYKQGDTVRGALHKESFYGAIKREEKNKKGETQEVVKYVLRKPLENFKDTDLKHIVDDTIKDIVTRGRQEEKKLKKEIETLKKQINRVDDTEEAVLKSQIQNLTHKIDNELYVLPNKNGNPIPIKKIRYFATDVKVPLTIKKHRDVSRHEHKQHYFAKNDSNYCMAIYEGINTKGKLKRDFEIVNNIDAGEFYRLSNKKHRDNHGLVPNPHNSSKLPLKYILKKGNMVLMYEKEVNEIQELSTEDLLKRLYKLAKFDAQGRLTFRPHTEAKQASELKEVYSVDFNKKEEQIRLQVSKLNILVEDYDFIISSTGKLNFI

SEQ ID NO: 74 - protein, 1446 aa, unidentified
  REGION 1..1446: note = Description of Unknown: Cas Enzyme sequence
MAKILGLDLGTNSIGWAIVDKEKNDFKLLDKGVRIFSEGVNIEAKTNSESSKAAKRTEFRSARKLKYRRKIRKIELLKVLSENNLCPKLSDDELNEWRYKKIYPQNDEFRIWLGTDNQKDEAERKKQNKNPYFFRFKAAKENLNLNNIEDRYILGRALYHISQRRGFLSNRLDNSDNSIIEEKNIEIAGIINDATSIVGFSETFSEFLTSFDKDDASNKPLFTLSRAFIAISKENSALAYSDLKEKLHERLNKKEFLGPVKRAISDLTEKIQEEKCSTLGEYFYTLYQKGDKIRGEYTHRIDHYLTEFNFICNKQNISNEVKVAIEKAIFFQRPLKSQKGLVAKCPLENRKACVPISHPDFEEFRMLSFLNNVKIKMPTDEKLRLLSLEEREQIQPLFFRKKANFDFIDIAKKLTPKNLTPKYYKDREVSDENVLFNYNLGSNVAGCPTIANIFDVFGIKWKEYLLSNFAKNTKTQDNTKVQKSIEEIIDDVWHVLFRFDNEELLKQFAIENLKCDEKTATKFSKIKLKQDYGSLSLKAIRNILPYLRQNLIYSHAVFLANMKNILPKEIWNIEENRNVINNEINSIIESYKLYSNNIDIVNGLIKNVKKENGTWSSTNNFVAEAYKNGLNKQVKDFFGTKKWNETSEIFQSKILSECFELFSNQMKLNSGRGEFAKKQTIDEILKTFLSDNFNVTEESLKKLYHPSAIEVYKKAKRSDVDGKKYLGSPLISSIKNPMAMRSLHQLKKVINQLIMDDMIDEDTSIHIEMPRELNSSNERVAIRQWNEDLKNRRNKYSEEIKSIFRGEILTEDCNDANSNYSDYEPTETDILKYQLWIEQNKVCLYTGKTICLSDFIGNNPKFDIEHTIPRSRSLDNSHVNKTLCSAIYNRQTKKDKIPFECPNYEEILPRIKHWYAKYKDLEQQIKDLSKKVKAATIKDKRDKYIIERTKLRFEYSYYSKKYRLFTMDEVPEGFKNSQSVDIGIISKYGNLFLKTVFNKVYPIKGKTTANLRQMWGLNEKSRDNHAHHAKDAVVVACCTNEINDALANYYHDLEQFEFFGKPKPSFSHRIPWEGFHKDVDDFDNNTLVSHHTPDNLPVQSKKAIRKRGIIQRNENGEIKYKQGDTVRGTLHKESFYGAIKREELNKKTGETEEVIKYVKRQGIEVFKDADLKNIVDDKIKEIVTNGREQEKQIKKEVEELKKQIKNLKEDEEQPIKEAIQILENKIKNDLYVLPNKNGNPIPIKKIRYYTSDVTNPLFIKKHRDISRHEHKQFYHTKNDGNYCMAIYEGVDKKGKLSRSNQLINIIDAGKYFKLSNDDKKIYPIAPEKDENLNPLKYILTKGKMVLIYDKSPKELFEMSEEKLLERLFEITQMDVEDSCIKLLHHSEAREKKKLTPFMGLKTGMKGGKNIGEHKKYPWIKIGVNSFDCLVEDYEFKLTPTGKIKFL

SEQ ID NO: 75 - protein, 1150 aa, unidentified
  REGION 1..1150: note = Description of Unknown: Cas Enzyme sequence
MARILGLDLGTNSIGWALIDDSQNKILGVGSRIFPMGVENLGDGEGEISKNASRTGARGVRRQFYRRRLRKKVLLKALSENNMCPMCKADFDNWKTTKQFPSDKLASWFAINPYELRHKALNGKLTLEEIGRLLYHMIQRRGFLSNSRKGGSDDGAIFKGNIKEGKIGIDDTLESIEGKTLGSYLYSIYPKENQPFQNGLERIRNRYTTRKMYVDEFELIWNNQAKHHTILNDDLKELFGGRKQDGYKEDGILFHQRPLRSQKHLVGNCSFEPSKTKCPISAIPVELYRVYQWVNTVEYNGKKITKEDRDKLVEQLLLSDKVEFKKLRKAIGKESAEFKFNYKDDDKIVGTHTISHLANKKFFGKKWFDFTEKEQEDIWHVLYFFDSKSNLKDYALKHWGFTDEQAEAISKFNVKEGYASLSRKAIGNILPFLKQGFVYDIAVALGGIKNAFGEDWEMLSEEKKNFIIDNVPDIVRAKISGGYIDTIKDLLRKEFGFTDKQLKKLYHHSTTIDAQTLLDRLPVGKEADKAIQAIRNPIVITALFELRKLVNELLDEHGKIDEIKVEMARDLKISKMQRNKIRREQKRLERENDRVKDRLKEEGQRITHDNILLYKLWEECKKTCPYTGNPIPLHKLFTGEIQIEHIHPWSRSLNDSFANKTLCYADENRRKGDKTPFEFYGSDEANWSAIKERALKLFSDTKEYPNAYQKFKRFVQQKFDDDFSTRQMNDTRYISKEAKEYLSQVCKNVIVSPGQATSNLRQKWGMNNILNDENEKTREDHRHHAVDALVLACTKVSYIQELSKWNRYNRATELKDFPLPWEGFRKDAENAIDNVLVSHKRTTNDITVRTHTTEKNGKKYVNKGVAARGQLHLETIYGQNKNCKPDEYVYRVDINNLSFSQLTSIVDLNLKQVILKEIFKKLESSEIEFFNMMNLKVKNLDKNQQKKIKEKIDRILKETTFYMPNEGRRYARLNKTEPIDFERVPVPIRKVRIKKVLGKAERVNDKIKQFVDPNKNHHVLIYKDEKGNLKEEVVTFWTVVERKRTGQPAYQLPIDGKEIITTLHINDMFLLGLSDEEINWENLDYELLVNHLYRVQKLTSGDYFFRKHKSSTVTDDDYKQIRGFGDGKTGWFTFNPIKVKISVSGKIQKV

SEQ ID NO: 76 - protein, 1122 aa, unidentified
  REGION 1..1122: note = Description of Unknown: Cas Enzyme sequence
MAKILGLDLGTNSIGWALIDDKLNKILGVGSRIFPMGVENLGDGDNEMSKNAGRTGARGVRRQFFRRRLRKKVLLKALSENKMCPMLDSDFEDWKKTKQFPSDKLSNWFALNPYELRQKALSEKLSLEEIGRIFYHLIQRRGFLSNSRKGGTDDGAIFKGNPKEGKIGIIETQEKIQDKTLGSYLFEIYPKQNQPFQDGLERIRNRYTTRKMYVDEFELIWEKQKQFHSILNDDLKQLFGGRKLDGYKEDGILFYQRSLRSQKHLVGNCSFEPAKTKCPISAIPFEQFRVWQWVNTIEYNGKKISQEEKEKIVEFLYANEKPDFKKIRKVIGKESAEFKFNYKDDDKIVGTHTISNLSNKKYFGKKWFEFSDKEQEDIWHVLYFFDSKSNLKEYAIKNWSFTEEQAVAISKFNVKDGYASLSRKAISNVLPFLQMGFTYDVAVVLGGIKNVFGADWEKLSDEKRNYLIDNVYGIVRSKTKGGFIYIIKDILRNDYSISDNQLRKLYHHSTTIDVTELLEKLPVDKDSDKEIQSIRNPIVITALFELRKLVNELIDEHGKLDEIKVEMARDLKISKSQRNQIRRDQKRLEKENDRVKERLVENNVRITHDNLLLYKLWEECKKTCPYTGKPISVTQLFSGEVQIEHIHPWSRSLNDSFSNKTLCYADENRKKGNKTPFEFYGNDETNWSAIKERALKLFSDTKEYPNAYQKFKRFVQQKFDDDFSSRQLNDTRYISKEAKNYLSKICKNVMVSPGQATSNLRQKWGMNNILNDENEKTREDHRHHAVDALVMACTKVSYVQELSKWNRYNRNSELKQFPLPWETFRRDAEIAVEQILISHKRISNDITIRTHTTEKNGIKHKNVGVAARGQLHKETVFGKRTFNGEEAFHVRKAIDSLETAKQIDKVVDGTIRTLILKRVNELGGFVKDKVPANTFFIVDENGMKQPQIFLPNKNGQPVPILKVRMKENFSGAEKLKENVNQWVNPRNNHHVLIYKDEKGNLKEEVVTFWTVVERKRTGQSAYQLPVEGKEIVTTLHINDMFLLGLNDEEINWENPDYDVLKEHLYRVQKLTSGDYFFRKHKSSTVTDDDYKQIRGFGEGKTGWFTFNPVKVKISVSGKIEKL

SEQ ID NO: 77 - protein, 1124 aa, unidentified
  REGION 1..1124: note = Description of Unknown: Cas Enzyme sequence
MAKILGLDLGTNSIGWALIDDKQNKILGIGSRIFPMGVENLGDGDGEISKNASRTGARGVRRQFFRRRLRKKILLKALSEHKMCPIEANDFENWKKTKKFPADKLAVWFALNPYELRQKALKEKLSLDEIGRILYHLIQRRGFLSNSRKGGSDDGAIFKGNPKEGKIGIDETLESIEGKSLGSYLFDIYPKENEPFKAGLERIRNRYTSRKMYVDEFELIWNKQAQFNSVLDEDLKELFGGRKLDGYKEDGILFHQRPLRSQKHLVGNCSFEPSKTKCPVSAIPVELFRIYQWVNTVEYNGSKITQQEKEKFIEQLLSHDKIEFKKLRKTIGKESSEFKFNYKDDDRIFGTHTISNLSNKKYFGKKWFDFSEKEQEDIWHVLYFFDSKSNLKEYAIKNWSFTDEQAEAISKFNVKDGYASLSRKAIENILPFLQQGYTYDVAVVMGGIKNVFGDKWQDDTLENNQKQLDLIDNVEGIVRSKIAGGFIDTIKELLVKDFALNDRQLKKLYHHSSTIDAKTIVNKLPIGLLADKEIQAIRNPIVITALFELRKLVNELIGEHGSLDEIKVEMARDLKMSKTQRNKIRRDQKRLERENDRVKVEVEKYTRVTNDNILKFKLWEECKQTCPYTGLAIPVSKLFTGEIQIEHIHPWSRSLNDSFNNKTLCWADENRRKGDKTPFEYYGKDESNWSAIKERALKLFSDTREYPNAYQKFKRFVQIKFDDDFSSRQLNDTRYISKEAKDYLSKVCKKVAVSPGQMTANLRQKWGLNTVLNDENAKTREDHRHHAIDALVMACGKASYLQELSKWNRYNRNYDLKEFPTPWETFRFDAEKAVDKILISHKRISNTITVRTHTTEKNGVKYKNIGIAARGQLHKETVFGKRDFNGEEAFHVRKSIDSLTTEKQLEKVVDETIKKLILKRIQELGGFVKGAIPANTFFIVDENGIKQPQIFLPNKNGAPVPILKIRMKESIGRAEQLKDNVNQWVNPRNNHHVLIYKDKNENLKEEVVTFWTVVERKRQGLPVYQLPSDGAAIITTLHINDMFLLGVKEEEINWENPDYDVLKEHLYRVQKLTSGDYFFRKHKSSTITDDDYKQIRGFGEGKTGWFSFNPIKVKITVSGKIEKL

SEQ ID NO: 78 - protein, 1121 aa, unidentified
  REGION 1..1121: note = Description of Unknown: Cas Enzyme sequence
MAKILGLDLGTNSIGWALIDDKSKRILGIGSRIFPMGVENLGEGDNEMSKNASRTGARGVRRQFFRRRLRKKLLLKALAEYKMCPISEEDFKQWKQTKQFPSDTLKEWFAMNPYELRHRALTEKLSLEELGRIFYHLIQRRGFLSNSRKGGKDDGAIFKGNAKEGKIGITETQDRIKDKTLGSYLYGVYPKENEPFKDGLERIRNRYTTRQMYVDEFEMIWNNQAKYHSEFTGELKTMFGGRKLDGYAEDGILFHQRPLRSQKHLVGYCSFEPSKTKCPKSAIPCEEFRVWQWVNTVECNGKKISQEEKELIVDFLYANEKPEFKKIRKVIGKESAEFKFNYKDDDKIGGTHTISNLSSKKFFGKQWFEFTEKKQEDIWHVLYFFDSKSNLKDYALKHWGFTESQADAISKFNVKDGYANLSRKAIGNILPFMKLGFTYDVAVVLGGIKNVFGAGWDTMPEEKRQFLIDNVEGIVRSKRKGGFMDVIKDILRNDYGVSDHQMRKLYHHSANINVNELLDKLPTGKEADKEIQSIRNPIVITALFELRKLVNELIDEHGTIDEIKVEMARDLKMSKSQRNKVRREQKRLERENDRIKKEVVKYTRVTHENILKYKLWEECKNTCPYTGKSIAINQLFSGEVQIEHIHPWSRSLNDSFSNKTLCYADENRNKGNKTPFEFYGSDERNWSAIKERALKLFSDTKEYPTAYQKFKRFVQQKYDDDFTTRQLNDTRYISKEAKNYLSRVCKKVSVSPGQVTAHLRQKWGLNSVLNVENAKTREDHRHHAVDALVLAATKTAFVQELSSWNRYDRTPELKDFPMPWDGFRYDAEKATEGILVSHKRVANDITVRTHTTEKNGKKHKNVGVAARGQLHKETVFGKRNFNGEEAFHVRKPIDSLTTEKQLDKVVDESIKLLIRQRIQVLGGFDKGKIPPDTFFIVDENGVKQPQIFLPNKKGAPVPLMKVRVKENIGGAEQLKSEVNQWVNPRNNHHVLIYKDEKGTLKEEVVTFWTVVERKRTGEPIYKLPSDGKEMVATLHINDMFLLGLNEDEINWDTPDYEVLREHLYRIQKLTSGDYFFRKHTSSTVTDDNYNQIRGFGEGKTGWYKFNPIKVKLSVTGKIEKA

SEQ ID NO: 79 - protein, 1520 aa, unidentified
  REGION 1..1520: note = Description of Unknown: Cas Enzyme sequence
MSKIKLGLDLGTNSIGWSVLEKYAGKYDFLEFEDENGNLIPTKGSYIFQKGADAKENSKAAERRGFRGARRRLERIILRKIATLKVLNEFGLCPKFEEGELNKWKNKRIYPDENEKFIEWQRTGKKKGNSESERLKQPYYLRHIAATKEGLMDNAQGKLQLGRAFYHLGQRRGYLSNGDEEQTEDKLDLFKTEVSKLLEETTDSPAFLEPFNVILDTRKNDDKVKRLGSKILKELKKEIEFEQIRTFIITEFDKPENLGTVMKSIGELSEAIQKSGQPTMGSYFYSIYAKSDKKTGLITKIRGIYTHREIHYEQEFFSICDKQNIQGELKDKLHNAIFYQRPLKSQKGLVAMCPLERKRIAISHPLFEEFRMWESINRIKTRNEGHKQLDFLTTNEKELIKPLFLQKTDFEFSKIANKLSGEKMYCYIKKPQEVFYKGHLIEGGIAELFFNFPLDKKFSACPTISALTKILSKNGYKDIPLLNTGYKDEKGKTQISIEDIWHCLFLDTFGKKDKKTARKEFAEKHLGLDENGIEDFQKIKLAKSYGSLSKAALKKIVPFLEKGEIYSHAVFLANITEVLNRKINSDEQKKITKKITEALSLHKIEKQYNGIVNNYISKLKEKNESLGSSTYSVEAHQKSLTEEIINWIGESQFKIMAADEKDVLFTNCWNKFAEFSLDKSSKEISFISTKTIPEFILEKLTDTFPNDKIDISKLYHPSAMEAYPKAHKKLGNPEISSIKNPVFNRSMHQIKRLCNELIRRGIVDKDTEVNVEVAGEINSASYRRALSQWQKEQEIIREWAKQEIINSYPKECRQEIHPTDTDIIKYILFKEQNHQCIYTGNQISICEFLGGKTTYDIEHTIPRSKFHDNSLANKTLADSEFNRKIKKDILPGLLNENFKGKSITKESILLNRNSNLKLYSLKNNVPTWSIGLKSLKEEYKKYKNAAKAITEPISHGEIMTKAHYTKIKLDYLSKKHKNFENEEIINQFTNANLVDTRIIAKYARAYLNSYFNKVNVVNGKITDTLRKMWGLEGEYEVKDRSNHIHHCIDAVTVACVERGTANWISEAFHKYERDYFKGNDNPKYKLKEPMENFAERMHNLHQEVFIFHKQTDRIKPLLAAVEKVNTKKQNLRGKLNSQNPYAHIKKNDVLIFAQRKPITSINGGDIENVIDEGIKSRLLKLADVKGWDKLMDFQVKEDESTAEKELEHKKIIAFRVFEKIKKADKKKEIVISSITKKSITSDFSNITEFIKVLFDTIIRTDIDRKKILNYKGRIEREVTNLTRTKGLEILLSENKKSEGALILPEYYDKKNKKQIGRMVIKKLRLKSSKSNLKNYKEIRLMDKSKFEHKRDYYFDKDSYTNYEARIFGDLIPDEKGKFKNRNYKLINHYNIVKNIFEKETEKPILKLHQDDMFLVFDKNPNDEIDWESHSDLQERLFKIVKFDENGIIVLVRHNYALRNVNSAKAIKSENNLSDLTEVVLRRNSSTVRIIPLKIDTLGDIDVKYSKKFMELNSKKIFEVL

SEQ ID NO: 80 - protein, 1273 aa, unidentified
  REGION 1..1273: note = Description of Unknown: Cas Enzyme sequence
MIGYPIKNNLDKLQIKYGIENVKIEKIIDISSKSTLYKITTSTNVPLKIFLGGEIEKDEDGKIKHKSQNSVLFWQRPLRSQRGLLAKCRFEPDVKNKVGKYLQKGKTPCHLSHPLYEEFRTWQYINNIEYGKKQKLEISQQLLVLELINNKDTNFNFSEIPKKLKMEYEKWNYENDQKVPGNYTTKHLSSLFPKDVWETNKNEIWHCFHFFEDNDNLIDKLKRDFKLAEKDFDKVDKITLKEGYSNVSLKAIKNILPYLRRGINMSNATILGGVKNAFGKHWQYFTDSHELIENEILKINLQKNNKEGEAIIKIKSFLSENNFGFSKDDFNFIKLYHHSQEIEEKKLKEKLDPVENLRNPIVQQGVNETRRLVNQLIKEYGKFDRIQVELGREIKNSKKGRQEQSKRIDENTGKNNEARKLLTEYGLKHNRNNVQKVLLYKEMQEKGVVTVCPYTNKSININDVLGRENKIQIEHIIPKSVSLDDGFANKTLCESKFNGLKGNLTPYQFYLLNDDPKLWGGAKSWEEIEQRVFRILPYYKAKRFTTKINLEDADVKSSFIERQLNDMRYISKKTKEIMSQICEDVRVLPGGLTAELRHLWGLNNILQPVMLVDLPEYKLEVGKTIPHYVVLDESNNPISAVPIFKDKPILKINETTITGIVDKGVFKTTEKFVKLNVDTPELQNGEYWLKLKLSEPKKIIRIFKERPIISKNEIVLRGKNEKEKFKHDSIGGVNAKGFDNGSYWAKFNITNKTFETPEKGKQPKKTGKQILLFGEVKEGHFKSYIFECDTTEINGKYWVLLDIDTENVTFDRAINERPLISENKIIIEGSVNGEGNFVSEIDNGHQFKTVEKQGKYWIVFDIINDFIEFDAIENPKPILIDKQTLVEGAVWVDKYTGEIKFDPKKNRDDHRHHAIDALVIALSKQTYFQQLSIYNAQRIAKKKGLTFDKEQFNFPEPWNHFHSDVKKVAEKLLISHKQNRKVLTQVRKKITKNGKTHTSVGGAVRGMLHKENFYGQRQAPTKTTKGYHIRKKVADLKPNQLDKIVDVEIRKIIINAREEEVKIKKQIDALEKIKRKVRTDEEENILNTKINGLKKDVSILYTLKNKNGERVPIKKVRIREEMSNAQRLKEENQFVNPRNNHHVLIYKAESGELKESVVSFWEVVERQKQNQETYQLPEKDNNGSIVTTIQENDMFILGLTNDEFEDNKDNFKFLTKYLYRNQKISNGDYSFRHHLASTLNDNNQEMRIRSLKKWTEVNPIKVNLTKTGVIEII

SEQ ID NO: 81 - protein, 1254 aa, unidentified
  REGION 1..1254: note = Description of Unknown: Cas Enzyme sequence
GIKDLDILLDSNKFETIGQYFYSIYNQEKNISEIEDKDFIVSRAKIRNHYTGREEHYLIEFKLICQRQGVDEQLKETLLKAIFFQRPLKSQKGLVGYCNFQTNKRRCNLSRPEFEEFRMKSFINNIKIKTPTDEKLRRLDDSEIKKIKGQFYRKTKPTFDFIDLVDELIPKGKTALYYKNKEAKTAEYVVNYKLNTTVQGCPTISNFISILGNDWKSFEVETSEKNKKDKLKKYNYIDIWHAWQTFTDAKKLKNFAVEKLSLDEIKATKFSSVSLKTGYCDLSLSAIEKINKYLDEGLIYSHAVFMANIANVIKKEFLENQNEREKIQLQIGIIIDTYSLEKKYCNAVNDLLSKYYEDKEHRVFYSKEAEPIFRKELWTKFEEAFGKKVWNENVEKDEYFNHYFIELLKKLQERKRIKIEPLEEKVKNYLLSFEYCYEKDLKKIYHPSAIEKFMTKPLKDIKGGFYKDENGNNLLGLGSPLTTSIKNPMAMKTVHQLRKLINTLLIEGKITKDTIIHVETARELNDNNRRKAIEEYQKERENIRSIYRQKIEELYFKETGNTIIPNDEDITKFQFALEQREDKKIVTKEEILKYELWEEQNHVCLYTGKTIRLSDFLGKNSKFDIEHTLPRSLSQDNSLENKTLADPNFNRNVKKQLLPTQLENIEDVLLRVRHWKIKYLSLEKEIENLKKKGSRIADKEQKDKNIQQRHKLKMEFDYWYGKHNRFVMEDITDGFKNSQKVDTGLITRFAQNYLKSCFERVYSVKGTMTDEFRKLWAKDVFYRVKDGKLEKNRDNHTHHCKDAVVIACITKDKYDSLAKYWEKEDENKKDEAREIIRSTIPWKGFANDLKEIEETVLVKHIKKDVMKVTTFKKLRKKGKLLHMPEYIRDENGNVKFDENGKKIKLIIKDKNGKERVVYQKDNEGNPLPIIQRSDSARGSLHKQNFIGAVAKKMLDDNGKPLQIQGKYILQKDTSGNIEKLYVVRKEITKDFTDADVKNIVDDGIKKRIEKYGLKNVLIKDFIILPEEKKGIDGSDKDLKEMYIKRIRLFVKDTPLVIKQQPLQNLQSEKANLKKHKHDIYAQNDENYCMAIYEGLDKKGKIDRRNELVKNFDAGRFYKKSNKEKDTINKYPLVPEKNQNEYPLKYILTKGKMVLMYNKNPNEIFELSDEEKLKYLYEITQLDVEGNCIKLLHHTEARAQKTLSEFMNLASKMKGGKNFGNFKSFPWIKVTLNDFDCLVEGYEFVISPTGKIKEV

SEQ ID NO: 82 - protein, 1128 aa, unidentified
  REGION 1..1128: note = Description of Unknown: Cas Enzyme sequence
MAKILGLDLGTNSIGWALIDDKQNKILGIGSRIFPMGVENLGDGDGEISKNASRTGARGVRRQFFRRRLRKKILLKALSEHKMCPIEANDFENWKKTKKFPSDKLAVWFALNPYELRQKALKEKLSLDEIGRILYHLIQRRGFLSNSRKGGSDDGAIFKGNPKEGKIGIDETLESIEGKSLGSYLFDIYPKENEPFKAGLERIRNRYTTRKMYVDEFELIWNKQAQFNSVLDEDLKELFGGRKLDGYKEDGILFHQRPLRSQKHLVGNCSFEPSKTKCPVSAIPVELFRIYQWVNTVEYNGSKITQQEKEKFIEQLLSHDKIEFKKLRKTIGKESSEFKFNYKDDDRIVGTHTISNLSNKKYFGKKWFDFSEKVQEDIWHVLYFFDSKSNLKEYVIKNWSFTDEQAEAISKFNVKDGYASLSRKAIENILPFLQQGYTYDVAVVMGGIKNVFGDKWQVDTLENNQKQLDLIDNVEGIVRSKIAGGFIDTIKELLVKDFALNDRQLKKLYHHSTTIDAKALVNKLPLGLLADKEIQAIRNPIVITALFELRKLVNELIGEHGSLDEIKVEMARDLKMSKTQRNKIRRDQKRLERENDRVKVEVEKYTRVTNDNILKFKLWEECKQTCPYTGLAIPVSKLFTGEIQIEHIHPWSRSLNDSFNNKTLCWADENRRKGDKTPFEYYGKDESNWSAIKERALKLFSDTREYPNAYQKFKRFVQIKFDDDFSSRQLNDTRYISKEAKDYLSKVCKKVAVSPGQMTANLRQKWGLNTVLNDENAKTREDHRHHAIDALVMACGKASYLQELSKWNRYNRNYDLKEFPMPWETFRFDAEKAVDKILISHKRISNTITVRTHTTEKNGVKYKNIGIAARGQLHKETVFGKRNFNGEEAYHVRKPIESLTTEKQIDKVVDDSTRLLILKRVQELGGFVKDKVPANTFFAVDENGINQPQIFLPNKNGAPVPIRKVRMKENIGGAERLKEDINQYVNPRNNHHVIIYKDEKGNLREDVVTFWTVVERKRQKQAVFQLPADGTSIVTTLQINDMFLLGLKEEEINWENPNYEELKESLFKVQTLSQMFYEFRLSPDATQNKDTNSVVFKRIQSFGDGKTGWRNHNPIKVKISVSGKIEKL

SEQ ID NO: 83 - protein, 1293 aa, unidentified
  REGION 1..1293: note = Description of Unknown: Cas Enzyme sequence
MAKILGLDLGTNSIGWAIRDTNKEGNQIVDANVIVFPQGVGEEKGVEFSLASERTKLRASRKLYKRRKKRKTDLLKLLIENGFCPLTIDELTIWSEYKKGQEMKYPTANFEFSEWLKINPYEVRAKAVNQIVSRQELGRALYHMCQRRGFKSGRKDADAGKDLEQYKKEQELLGQNGFKTLGEYYFDLLQNDKKVRKTKFSADDQEVNSSRISYVEEFNVLMKAQNISKELADDFFDAIFFQRPLKSQKGAVGKCTLEKIKTRCPISHPLFEEFRMYQYLNSIKVKERNSDKFVFLSEFPEYYKIAKDKFYRVSAKNFKFVDISKSINTSAKKNSLLFEFNYNDKYPIVGSPTISKLIEVFDAEDWIGCKKLIISKYKKQDNKTVSDLVDELWHSLFFSGDFVNDITSEKVKNFIRTRFNISEEKINYYESINLKQGYSSLSKKAIVKILPFLENTIIYPYAVFFANIDSIIGKEKWEANKEFIQDTIVDIISNYKTQILKIDIVNGLVGDFIKEYDNSNFDYILDETDKINVVDKTKLFYGKYEWEKMSDESRNGLLNEIEKEFQSQLRKRRVGGYYLPKPRVDEIIKEFLIQEYKVSKEQADKLYHPSAMDAYPQSQDNLLGLPFTNSIKNPMAMRTLFYLRKLVNTLLKENKIAPDTEIIIELARELNDKNKRLAIERWQRERETENKKFREKLEELAKDTNSKVTDADIIKYRLCQEQNGKCFYTNNTINCEKLLGSNPQFDIEHTFPRSKSFDNSLANKTLADRTFNQIKGNRIPQEINEGNYKENFTHNIKDWQKTIEDLEEKIEQQKYFSKVASTVEQKNSAIQKRHYLKLELDYWKQKVYRFTATEIKPNFKNSQLVDTGIITKYSELFLKSLFQKVFPAKGTMVADVRKSWGLGEKDRNYHYHHAIDAVVLTFMDKSIRDGLAAAFKESEENRYQEKFKIAKPWQTFTEDVFQLKESIIVVHNHKDKIEKQTVRKLRKRNKIQYDKQGNVIYEKGQGIRGSLHKDTFYGAIERENENAEKEIWFVLRKPVNSNFTDADVSNIVDEGIKNRILKHGLKNIRTIENWILLPTEKDEKEKEIKEMLIKKIRVKTSNKNLPKIKSQSHVSKGNRKEYKEHYYATLENIFGMAIYESFDNKGKKEQAFKTISAFDLAKHNQGKLKLEMPVEENIIKNKGKKSEVLIPLTKVLRVNQMALFYENSPEELKQLSKSELNNRLFKITQFESDGRIQLRHHAQGGADKDLKKESSVNFEQPVQKLRISLSNVKAIFEGKDFILYQTGKIDFMY

SEQ ID NO: 84 - protein, 1054 aa, unidentified
  REGION 1..1054: note = Description of Unknown: Cas Enzyme sequence
TIASLKRVFGEEAYNNTQLSNTGYGEEKGKKQLSIEDVWHCLQMDTFGSKDKKTVRAEFAKKHLKLDEKALENFVKIKLVKGYGSLSKSAIKKIIPFLEKGEIYTNAVFLANVTEVLGRKISETEQKQIAEIIKEALENFRIEKQNKGIVNNYVSKFKADKENSLGNNQFSIEAHQKELDYEIANWIGEVQLGKMDKEVIAEITKTCWELFYNAACDKSSKEIIYLSSKTIPEFIYDGLKVAFPNDKIDVSKLYHPSAMEAYAKADKKLGNPEITSIKNPVFDRAMHQVKRLCNELIRKGLVDKDTEVNLEVAGEINSASYRRALSQWQKEQELIRTWAKRKIVESYPKESQKDIKPTESEIVKYILCSEQNHKCLYTADTISICDFLGTTTYYDIEHTIPRSKNNDNSLKNKTLANFDFNRNYKKATLPALLNVDFKGKAIDVVTILQNRDNNLKSYTIKGDEVFWNVSLNDLKFDYKKFKNAAKAITDAVAHDEVMTKAHYTKMKLDYLREKYRNFEIEEINNQFTNANLVDTRIITKYARAYLNSYFNKVNVVNGKITDTLRKIWGLQGEEETKDRSNHIHHCIDAIVVACVEKGTANKISELYHKYENDYFRGNSNPRIHAKEPMDNFIERLKNLHKEVLIYHKQTDRIKPLLINAQKENDKKINLRGRLNSQNPYAHIKKNDELIFAQRKPITSISGNDIENIIDEGIKKRLLAYADIRGWEKLMEIQTIDSEEIVEKQIELKKTVVFRLYEKLKKDKKNESLIKRNVVKNDVDIDFFDSNSLIDVVFKSSVLENLDVSKKDVFNNKILKEVNNLIRSKGLETLLKESEGVIVLPEYKEEKSDKIISKMIIKRIRLKSSKSNLKDYKKIREIDRKQTTDNKYDHKHNYYFDKDSYTNYEARIYGDLIPNDNGKFKNREYKLINHHNIVKGIFEEENRNSILQLHQDDMFLVFDIQPNDEINWNDTIDLQNRLFKIVKFDENGTIVLSRHNYAGGNVNEANAIKTENDLSDSSQVVLRRSPSTLRVIPAKLDTLGKIDIKFSRDFINSNS

SEQ ID NO: 85 - protein, 1461 aa, unidentified
  REGION 1..1461: note = Description of Unknown: Cas Enzyme sequence
DGTDFSLVDKGVRIFSEGVKSEKGIESSRAAERTGFRSARKLKYRRKLRKYETLKVLSNNNMCPLSFEEVEEWKKSGFKQYPLNPEFLKWLRTDEDKNINPYVYRDIASKQKVTLFELGRALYHIAQRRGFLSNRLDQSGDGVLEKHCPEIISLIEDFNSNTEIIIGLKDYFYDTGILDDSNKDGFVKDLDEGDKELKKIYNSLKIILKKNENKFITAKEEIIARLNRKEDLGKVKGKIKDISQAMIDGNFKTLGQYFFSLYNNSKIRNQYTSREEHYLQEFNIICDKQGIGEIIVDELLPEKKYNGLAKDLYKAIFFQRPLKSQKGLIGKCSFEKSKTRCAISHPDFEEYRMWTYLNTIKIGTQSEKTLRFLTQEEKTSLISKFLRKKDNFNFEDLAKELIPKGATFGFYKSSKANEVNYLFNYKPYDTVTASPVSASLKNIFGEDWKTKTISYKTKNSKGIEVNRSVDYKDLWHLLSVSTSDIYLFQYAKEKLGLDDKNAKAFSKIRLKKDFASLSLNAITKILPYIREGLLYSHAVFMANIESIVDESIWNDSNQRKFIQDKIAEIIENHTFENGKLEAINSLIKECKTVGAFYSKEAESIYKSDLDKKIIPFVKFHKIESDKEAILSELFPVLIEQLKKYEYIKINRLDEKVLDFIKGKNDDGEIFCTNEKRINKLYHPSDIEVFKKKIIKDEFGNEKVVLGSPLTSSIKNPMAMRALHQLRKVLNTLIFEGQVDEKTIIHIEMARELNDANKRKGIQDYQNENKKNREEYAKDIRKLYFEECKKEIEPTEDDLLRYQLWLEQNKQEIYEDGRNISICDIIGNDPKYDFEHTVPRSRSQDNSQMNKTLCSQKFNREIKGNKMPFELSNYHEILPRIAHWKEESDNLTREIEIISRSIKAAATKELKDKKIRRRHYLTLKRDYLKGKYDRFIWEEPKVGFKNSQIPDTGIITKYSQAYLKSYFKRVESVKGGMVAEFRKIWGIQESFQENDKKYFHEKDRSKHTHHTIDAITIACMTKEKYDALANAWTHEDKGQLGEARKLLADSKPWKTFKEDLKKIEEEILVSHYTPDNVKKQSKKIVRIRGKKQFRDENLLDKSGNPIPIFGKRLNEVEIRSKVEGKDYFKIQKNNETLYYEYLFDKTGNIIYKKIPTYKQGDTIRGSLHQDSIYGAIKNPLNTEEIRYVIRKDLESIKASDVENIVDEMVKEKVKDAIANKVLLISSNAQQKNKLDGKVWMNEEKGIPINKVRLYANSVKNPLEIKEHSLLSKSRHEHKQKVYGQNDENYCMAIYELDGKRDFELINNFNLAKLIKQGQGNYPLSKEKEVKGKKTQIPIAKSNNRDVVLKRGQQVIFYDKEIEKPKDITEIIDFKGRIYIIEGLSIQRIPSVSGSVNEYGVITLRYFKEARKSDEIKKDNFKPDGIYKLGEIKPTRKMNHSQFSAFVEGIDFRVLPSGKFQKI

SEQ ID NO: 86 - protein, 1564 aa, unidentified
  REGION 1..1564: note = Description of Unknown: Cas Enzyme sequence
MAKILGLDLGTNSIGWAIVDDVDNKIIDSGVRIFPEGVIAKTIGSGDKEESKNAKRRNGRQLRKQFYRKRLRKIKLLRTLINFNMCPLRHDELDVWSKWDKQKKKEGRMAPELSLPSNHIYNLWLKQNPYQLRDKALNEDLTLEEFGRVLYHLIQRRGFLSNRKGKDDGAIYKGKENVKGIDATQKELENSTLGKYLFNILPKEGEPYKIIQDEAGNELRVRSRYTLRDMYVTEFEAIWNRQSHQLGLDVIDYLNVKTRLLNGSIRNKRNNKKIEHLKLTKGSENVEIITLNEGKEKLFLKVTTKLPLKEFLAGKIENDDEGNLKFKSSESVLFWQRPLQSQKKLLAKCRFETDLKDEIGKYIQKGKTPCHLSHPLFEEFRAYKFINNIEYGKKQRLEESQRLEVLELINSKDSNFKFSDIKKKLKLEYETFNFDNDAPVNGNYTIKNLNSVFLKSILEKEFIINVNNEDVSELGLERIWHLFHYCEDNDVLIKKLQNDFGLEDGKTDKIAKINLKEGYSNISLKAIKNILPYLKEGKRESDAVILGGVQNAFGKKWKLYVNDHEELKKDILKINHEKSNKEGDAIEKIKQYLIDNKYGFVENDIRFKRMYHHSQEVERKQQSDKIGDVDNLRNPIVQQGVNEVKRVVNELMLHHGKFDQIRVELGRDLKNGKSKRQELTYKISQNTAKNENAKQLLTEYGLRHSRDNVQKVLLYHELQEKGVVPVCPYTNKTINISDVLGKENKIQIEHIIPKSISLDDSFANKTLCDSTFNGLKGERTPYDFYQINKDVNLWGGAKSWEEIERRAFKVLPYPKAKRFVSQTKFDKNNFIERQLNDTRYISKKTAEILNQVCDDVRVMPGSLTAELRKLWGLNNILQPAFTIDIPNLQIDSDKHIPHYVVFDKDKNPIASQRIYNSKPNLSETETTLFGNAEKGVFKSKEQYVKFQIETPHLLNGEYWAKLKLSEPKNIVRVFKEKPETTEEEIVVRGKIEKEKFKNEGLNAINAVGKENGTYWAKLSILNKTFKKPTKEDQPKKNGKQILVFGEVKEGIFSSYVYQCDTNQEDGKYWLIIDVDFENVSFEKAMNEKPSLKDHQIIIQGTTNDENVFVSDMDSQHNFIMSEGRGKYYVLFDIISNVDDFHPVKTQEPKLEEGQTLVEGTVWVDKYTGEIKFDPKKNREDHRHHAIDALVIALTKERYFQELSKHNASVENKKRGNEYEKEQLNFVEPWNGFHTDAQKVINGILISFKQNKNILTEVRKKIVKNGKTYLSVGDSVRGQLHMENVYGKRTPPNGKEGYHIRKSVESLVTDKQINKIVDIKIREIIFKARKAEVPLYKEIENLIKQLKSPKLNDLEEASLKERITDLRMQIKALYTLPNKNGEPIPIKKVRVSEEMGNAQQLKSSIRQYVNPRNNHHIVIYKDENNSLNGDITNFWNVVERVKQKDQIYKLPEVRIGEAEPKELILTLQENDMFVLGLSDDEFRDNIENNSFLSSYLYRVQKISDGDYSFRYHIASTVTNKNEEIRVTSMKKYQEINPIKVKINLQGKLQIEEDVYKRIKMVEDQI

SEQ ID NO: 87 - protein, 1149 aa, unidentified
  REGION 1..1149: note = Description of Unknown: Cas Enzyme sequence
MSRILGLDLGTNSIGWALIDDVENRILGMGSRIFPMGVENLGDGDNEMSKNASRTGARGVRRQFFRRRLRKKILLKALSENGMCPLVQNDFEDWKRTKQFPSEKLAEWFALNPYELRKRSLKEKLSLEEIGRIFYHLIQRRGFLSNSRKGGSDDGAIFKGNVKDGKIGITETQEKIEDKTLGSYLFEIYPKENEPFKDGLERIRNRYTTRKMYVDEFELIWNKQSQFHSNLNEDLKNLFGGRKLDGYKEDGILFHQRPLRSQKHLVGNCSFEPTKTKCPISAIPNEKRRIWEWVNTVEYNGKKISQEEKENIVEFLYANEKPDFKRIRKVIGKESAEFKFNYKDDDKIVGTHTISNLSKKKYFGKKWFEFSDKEQEDIWHVLYFFDSKSNLKEYALKNWDFTEEQAESISKFNVKDGYSSLSRKTISNILPFLQMGFTYDVAVVLGGIKNVFGSDWEKLSDEKINFFYDNVFEIIRSKTKGGFIDIIKDILRNDYNISDNKMKKLYHHSANIGADEFLERLPMGKDADKEIQAIRNPIVITALFELRKLINELIDEQGKIDEIKVEMARDLKISKSQRNKIRRNQKRLERENDRVKAEVLKYTNLSHDNILKFKLWEECKKTCPYTGKTISVSQLFSGEVQIEHIHPWSRSLNDSFFNKTLCYADENRNKGNKTPFEFYGNDEFNWSAIKERALKLFSDTKEYPNSYQKFKRFVQQKFDDDFTSRQLNDTRYISKEAKNYLSKICKSVMVSPGQATSNFRHNWGMNNILNEENTKTREDHRHHAVDALVMACTKISYVQELSKWNRYNRKPELKVFPLPWETFRYDAEKAVEKILISHKKISNDITIRTHFTEKNGKKYKNVGVAARGQLHLETVYGQNKNCNSDEYVYRVDINNLSFSQLTSIVDSNLKVVIINEIFKKLELSEIEFFNKMNSKVKKLDKNKQKKLKEKIDKILKETSFFMPNEGKRYLRLNKNEPTDIKRVPVPIKKVRIKKVLGKAERVNDKIKQFVDPNKNHHVLIYKDKKGNLKEEVITFWTVVERKRTGDSVYKLPIDGVEIVATMHINDMFLLGLNEDEINWENPDYTVLNEHLYRVQKLTSRDYFFRKHKSSTITDDDYRQIRGFGEGKTGWFTFNPIKVKISVSGKILKV

SEQ ID NO: 88 - protein, 1153 aa, unidentified
  REGION 1..1153: note = Description of Unknown: Cas Enzyme sequence
MSKILGLDLGTNSIGWALIDDKQNKILGLGSRIFPMGVENLGDGDAEISKNASRTGARGVRRQFFRRRLRKKILLKALSENNMCPMIAKDFEDWKKTKQFPSEKLATWFALNPYELRQKALHEKLSLEEIGRIFYHLIQSRGFLSNSRKGGSDDGAIFKGNSKEGKIGIDDTLESIEGKTLGSYLYEIYPKENQPFQDGLERIRNRYTTRKMYVDEFELIWNKQSQFHTVLNDNLKELLGGRKQDGYKEDGILFHQRPLRSQKHLVGNCSFEPSKTKCPISAIPVELFRINQWVNTVEYNGKKITQDEKSKLIEQLLSHDKIEFKKLRKAIGKESAEFKFNYKDDDKIVGTHTISNLSNKKFFGKQWFDFSEKEQEDIWHVLYFFDSKSNVKEYALSKWNFNEEQAEAISKFNVKDGYASLSRKAIGNILPFLQQGYTYDVAVVMAGIKNVFGNTWQNDTAQNNQKQLDVIDNVHDIVRSKISGGFIDTIKELLRKEFGLNEKQLKKLYHHSATIDVKELLDKLPVGKEADKEIQAIRNPIVITALFELRKLVNELIDEHGQLDEIKVEMARDLKISKSQRNKIRRDQKRLERENDRVKAEVEKYTRVTNDNILKFKLWEECKQTCPYTGVAIPINKLFTGEIQIEHIHPWSRSLNDSFNNKTLCWADENRRKDDKTPFEFYGSDESNWSAIKERALKLFSDTREYPNAYQKFKRFVQIKFDDDFSSRQLNDTRYISKEAKEYLSQICSKVMVSPGQATSNLRHKWGMNNILNDENEKTREDHRHHAVDALVMACTKISYVQELSKWNRYNRNSELKDFPAPWENFWSDANRAVDKILISHKRISNTITVRTHTTEKNGVKYKNVGVAARGQLHKEFVYGKRTAPFSDEAYHIRKSIDSLTTLKQVDKVVDEATKKLINKRIQIRLHELNDEIFLSTDVKKVKEIEKEIENYEKKGILPSKVFFIVDENGIKQPQIFLPNKNGAPVPILKVRMNENFSGAEKLKENVNQWVNPRNNHHVLIYKDDKGNLKEEIATFWTVVERKRQGLPVYQLPIDGKEIVTTLHINDMFLLGLKDDEINWESPDYDLIKEHLYRVQKLSSKFYEFRLSSQASIQNNFQPFYISIRGFGDGKTGWDTFRPIKVKISPSGKIQKV

SEQ ID NO: 89 - protein, 1283 aa, unidentified
  REGION 1..1283: note = Description of Unknown: Cas Enzyme sequence
MAKILGLDLGTNSIGWAIRDNNIDNKNQILDSGVIIFPQGVGEEKGVEFSLASERTKKRASRKLYSRRKQRKSDLLKLLIDNGMCPLSIDELNNWAIYTKGKSCVYPTENFEFREWLKINPYEARSKASNNSVSNLEFGRALYHICQRRGFKSGRKDADAGKDLVVYLQEKEKRGDKTLGEYLYEQLEEGESVRKAKYAGDDNEVNSSRISYIEEFNVLVKNQKIATVLADNLFKAIFFQRPLKSQKGSVGKCTLEPSKTRCAVSHPLFEEFRMFQFLNSIKVKERSLDKFQFLSNYPEYFILVKELFFRKSKPSFKFAEISKAVNTKAKKNNLYFEFNYNDKYPIVGNPTMSLLKDVFDANDWEDCKEIIRSKYKLSDKKTTDDLIDELWHTLFFSGDFVNDVTSEKVKHFIRSRYSITEEQVEVYEKINLKQGYASLSKKAIVNILPFLEQNIIYSHAVFYANIPQVIGKEKWMENKQYIQDNISNIIDGYKDQTLKIDIVNSLLEDFIKEYDNSDAQYVLDETDKKNVSDKIIAFYGKDSFSKLGEALGYQLQSEIEFNFQTQLQKRRFGAYQLVKPRLDEIIKKFLIDEFKVSSTYSDKLYHPSAIDTYQESSDGLLGSPFTVSVRNPMAMRTLHYLRKLVNSLLKEKKISSDTTIIIELARELNDKNKRLAIERWQRERENENKKIREKLEEFTVGNNNIVTETDVIKYRLCQEQNNVCLYTNKTIDCEKLLGSNPQFDIEHTFPRSKSFDNSLINKTLADKAFNQIKGNKIPQELDEKYIHTVINNISHWKEKIEDLKEKIEQQRYFSKVASTVEQKDRAIQQKHYLSLEFNYWNEKYKRFTDKEINPKFKNSQLVDTGIITKYSKLFLGSLFSNVFPAKGKMVSDIRQSWGLPKKDRTLHYHHAIDAVVLTCMDKSIRDSLAKAFNESESLGKIEKFKVQKPWSTFTEDIDKLKESILVVHNHKDNLLKQTKRKLKVRNKIQYDKSGNVIYQEGQGIRSSLHLDTFYGAIERVNDKDEKEIWFVKRDWVSNLNESSVENIVDEAIKQRIKKHGLKNIRTDEGFILLPEEDKLKSMLIKKIRIKTNFKQLQTIKKQSHVSQGKRKEHKENYYAKLENIFAMVVYETLNEKGKVERIHKTISAFEVAKYNQGNKKLEIPIENNIVKNKDKKSEILIPFSYLLKVNQMVLFYESSKDELKQLSHLELSNRLYKITQFENDSRINLRHHAQGDADKNLIEESSLDFHKPAQKLRVRLSNFKASVENIDFNISPSGTINFK

SEQ ID NO: 90 - protein, 1444 aa, unidentified
  REGION 1..1444: note = Description of Unknown: Cas Enzyme sequence
MAKVLGLDLGTNSIGWAIVEKNQEINKLEDKGVLIFSQGVKSEKGQEKSKAAERTSFRSARRIKFRRKIRKYETLLVLAKHNMCPLSVGEVKEWRKSNFKKYPTKPEFLEWLRTNEDNNVNPYYFRDKASREKVSKYELGRAFYHIAQRRGFLSNRLDQSDDNLIKSKKDEIQSIIDNISLNKIDLIDFIESVFETYEFKEKKKKDCTNATEEKLWSIRYFIIKKLNDKKLSTQEAVKDIDQYINKPENLGAVQGNISELNTAIAEANCKTLGQYFWKLYQQDRNDAKNKIRNNYTSREEHYLDEFEIICKTQGLDGINEAKKDPSERYSAIVKELYKAIFYQRPLKSQKGLIGKCSLEPNRVRCSVSRPEYELFRMYSFINTIKLKESTAENFRFLRGDEIENIKSKFFRKSKPTFLFVDIKKTLGDENSYNYKDNATVSGCPTISALISVFGNDWVNTIYENYTDKTIRNIKNDKSEEVKTEEEVIADVWHVLSTFTSDEKLIDFAKNKLQLDEKKAEKFSKIHLKKDYASLSLYAIKKILPYLENGLLYSHAVFMANMEKVIKPERWKNKEDRELIEKEIGNIINKYQEENKMLFAVNSALKICFNNHQTYSKEAEKLYKGDIEKQLKKEFGIKTWENKTDKIVMFEEAFNVFKEHLKERSHPAIKRIDEKIKDFLSDNDLLKTNALDKLYHPSDIEKFKPTIIKDKKGNEYIGLGSPDVGSIKNPMAMKALHQLKKLINTLILEGKIDENTKINIELSRQLNDANKRKAIKKWQDDRKELYETYEKKIKELYRIETGEELKEVTDTDIEKFSFVLEQRKDGKLVSKEDVLKYTLWKEQNHICIYTGKTISLSSFLGANPQFDIEHTLPRSRSWDNSRMNKTLCDKAFNQKNKGNKMPFELQMNDEILPRIQHWKDKYEALANDIEKKKRSTRGATDKDQKDKLIQERHYLKMEHDYWKGKYDRFVMEEIKAGFKNSQAVDIGIISKYSRAYLKSVFKKVYSVKGEMVSEYRKAWGLHDTFIDKRGRTQYKTKDRSNHIHHCIDAVTIACMNKSKYDKLAHAWGLEDKEDYTRAKKTLEKEKPWDTFTQDVLNLENEVFIVHQSKDVLPIQTKKKFRKRGKIQRNKNKKIIYQQGDTVRGSLHLDTFYGAIAKDNNGEVKKDEAGNIKPNYVVRKELTKLKKTEVAKIVDNNIRAIVEQAAKDGLIKFNNNGAKVNETIWQNKDKHIPLKKVRIFTPTVKSPLKDFKKHPEHFRSKKLYKQQYNVVNDENYCMAIYEGINKRGKLKRDFELVNNIDAGEYYKLSNKTHRTNHDLVPNPHLKSELPLKYILKKGMTVLMYDKHPDEIWELTDHEKTKRLYKIIGFEGDGRIQFRLHQTAMQQSSMNVDEMTIVKYMKENELKNSEINFKTPVPWLRLTKGNLNFIVNNVDFKIKLTGKIESV

SEQ ID NO: 91 - protein, 1549 aa, unidentified
  REGION 1..1549: note = Description of Unknown: Cas Enzyme sequence
MKTILGLDIGTNSIGGALIKLDTENFGTNGKIIWLGSRIVPMQGDYVNTKTGSASKDPMSDFTKGIGISKAAFRTKKRGSRRLKHRYKLRRTRLIETLKILSWIPENFPVEFKEAKRKGIEFKMKDFLPFLESTLKEASKAFKIDQNKKGEINVPEDWVVYYLRKKALTEKIELSELARILYMLNQRRGFKSSRKDLKDETTVISYDEFDLMTKNGEFTDAEGRTLETKFVEVTKIKSVQWLEDEGQDKKGNHTYEITVDSNRIHSWNEKRKKKPQWEGEELRFLVTQKTDKKKQIVTQPNKPKIPEDNDWNLAMVSLDNELQQIGKQVGEFFFDKLVKNKNYRIRQQVVKRNRYQQELKAIWNKQSEFHNELKSKDKLEEIARMLYPLQAENKLAKWTKITNGSLYKTISEDIIYYLRDLKSQKNLIDECRYEKKPAYSNKNGEEITPGYKVAPKSCPDFQEFRIWQDIHNLRVLLKEDEETGKVDIPLADELFSIKIKAELFDLFNRQEEVSRQQILKVIDGSFSSKTHGINLFTNREKLKGNETKALFRKVFKKYDFDGEALLNDKDKFQLLWHILYSIRGKDHEKGIRRALTNPKNEFGNLPEDVVSHLAEKTKEFPHQYASFSRKAINKLLPLMRCGSHWNSNAVINAVSHFLKWKETDAFLNLGLKIQNQLESFEALEDFEGLETSTACYVAYGRHSERESDFKYKTWEKIDPMKIIPANSLRNPIVEQVVRETMQVVKEVWKQYGRPDEIHIEMGRDLKRNIKEREKTAKSQRDNYNEKQRIKKLLQELKVGNPDSPIDIEKFRTWKGNGGWEANNRFNELFDSKNLFVKNADIKKYRLWTEQKHRSPYTGAQINLSDLFTEKYEKEHIIPRSKLKYDAMANLVICEAAVNDFKGNRLAQVMINGDGGREHTHKGTTFTLLSKDKYLQNCKLFDKRKRKNLTADKVPEGFIERQINDTRHITRKLNELLWPVTKDKEGLVFTIGSITADLKQQWGINTIWKDLIKYRFERLGKILDKELIVKDEKDKNKFHFNKPDDKVDLKRIDHRHHAMDALVIAATTRAHINYLNALSSHKEREKWKYVAKERVREFYLPWQDFAKDGKDKLSKVIISHKYNNRVLNKPHNRYWKWEQQPDGNWKKVLKKQKANVSWKTVKKAMFNENPQGAIYLKEPKSERVIEAIKVQIERAKGVKDENGKPRDYIYDKQAREQIIKLVEQFNGDENAIKKHLKKNPVTDKQGKSTDKVQVAIFKEYAAKRITVDNTFDEKKIKGLPYAARTIERCEQRFKSDQEKDKKFVRTPSMWPIPFLLKKHLDEYDGKGIEAFAGEGLELLFKKAGRPIKKVTKYEKKSNPIKFNNGIWETAAGGNIYFVIQENSDTNERDYYSVPLFSTDDAKGPEQYGAINRLLNDDPIAEDRDGYKNIILKVGDLVYVPTPEELESPHHIKDIDWNGKDKKRVFDSTYIAKSFNKKQAFFIPHNVASSLESEGKELGSNNKAEKAWDASILKDGTMIKDVCIPIQVDRLGNIVKVHGRGITTIGQTEKL

SEQ ID NO: 92 - protein, 1131 aa, unidentified
  REGION 1..1131: note = Description of Unknown: Cas Enzyme sequence
MTKILGLDLGTNSIGWAIVDDSQNEIKGMGSRIFPMGVENLGDGEGREMSKNASRSGARGVRRQLFRRKFRKKMLLKALSENKMCPLTDDDFNEWKVNKCFPENKLKLWFTLNPYELRKKALTQKISLEEFGRILYHIGQRRGFLSNSRSAGKDDGAIFKGKPKEGKIGIDKTKESIEGKSLGHYLFEIYPKENEPYRSGLERIRNRYTTRQMYIDEFELIWTKQSEYHNKLTENLKTLLGGRKSDGYKEDGILFHQRPLRSQKHLVGNCSFEPSKTKCPISAIPFEQFRIYQWVNTVDCNGEKINKEERLKMVNALLRKDKLSFKELRKVIGKLEAHFKFNFKDDDKIVGSYTISNLSNKKYFGEKWFDFSEKEQEDIWHILYFFDSKDKVKEYALKNWGFNEKQASNISNFNLKEGYSNLSRKAIHNILPFLKQGYTYDVAVAMGGVKNAIGNSEGDEIQDVFDSMYDIVRSNLKGGYIEPLKKFLKENKGFTDKQLLKLYHHSATIQAKTILNKLPIGKDADKAIQAIKNPIVITALFEIRKLVNELVDEYGKFDEIKVEMARDLKASKSQRNRIRKEQKRLERENDRVKARLEEEGQRVTHESILKYKLWEECKKTCPYTGATIPLHKLFTGEIQIEHIHPWSRSLNDSFSNKTLCYADENRLKGDKTPYEFYGNDKANWFVIKERALKLFSDTKEYPNAYQKFKRFAQQKFDDDFSSRQLNDTRYISKEAKNYLTQICKKVTVAPGQMTANLRRKWGLNYILNKNDGEKTREDHRHHAIDALVMACSKISYLQELSRRNRYNPNYELKDFPMPWEGFNVNAEKAVNNILVSHKKINKIVTVRKHTTKKNGNLYKNIGVAARGQLHKETVFGKRKAPDCNENHFHIRKPIESLTTQKQIDKVVDKTIRSLIVKQIQVLGGFVKGKVPENTFFIVDENGIKHPQIFLPNKNGEPVPILKIRISETINKAKQLKTNLNQYVNPRNNHHILIYKDDNGNLEKEVVSFWEVVERKKQGMNVIHLPYNGIKVVETFSENEMFILFKNEDEINWIDLNLNEISDNLYKVQKIAGADYFMEICFRKHNDSRDDKTAKSDYVYIKGFGEGKTGWKTLNPIKVKVSISGKIKKKLT

SEQ ID NO: 93 - protein, 1385 aa, unidentified
  REGION 1..1385: note = Description of Unknown: Cas Enzyme sequence
MSKILGLDLGTNSIGWALTDDGKETELLLQGNTLFAQGVHSEKGIESSKAAKRTDYRSARKLKARRRIRKQNTLAVLIKNKLCPLSIEELNSWKKNKANYPKNEEFLNWLQTDEVTNYNPYMLRDAASRKKIKPLDLGRALYHLAQRRGFLSNKLEGSGDNEIYELLRENILEFLAQDPNETDFLQFLLTVEDEQSDSEDKGIKKLLRLIKAILKDKADGQKKLTTFLNKKENLGPVKQQIMDLTEKIEANNCETLGQLFYKWYKNDRHNKDFKIRTWHTGREEHYITEFEKICLAQEIAGINTSKSNPKERYTGLANKLYNAIFYQRPLKSQKGNVGYCTFEKNKRRCASSHPLFEFYRAFQFINSIKIEENETWRPLNKCERNAIWPKFLRVTNGFKFEELIKQLNKVNGKELFYNYKNYEKVSNCTTLAKMKNAFEGSSNKIVEAINNSIKNIYDNDLTLNFSNKEYKLLNESWHVLFDDNFSDFEHLFNWAQTKLGLNSKHAQKFAKINLKKDYAQLSLKAIKKILPYLKNGHIYSYAVFMANIPNAIKNKTLSNADKSAIAEGIDGVVNDHGVHSKKVKVVNNLIAHFRENYANSSADYKLDERDKTDVREFTENVWGKNRFNALTKSNQTEIVNWIAENYEKQLRKKHTGLFMPNLRLDERIIAFLKDNFDEDNVNSDQLYHPSAIKMFPKPNRHKDGNLYLASPQSNSVKNPMAMKTLHQLRYLLNYLIREELIDEDTKINIELARELNDANKRKAIKRIQRETTEKHDEIRERIAEFHKKKGVEAVVSQNDILKYKLREEQKGICVYTGDPINCTDFLGKNPKYDIEHTLPLSKSFDDSQSNKTLAQLKFNRQTKGNKLPVDLAEHEQILQHVSHWKDKIDHYELLFSIRKKAKGIETKEQKDKRLQEKHYYKYWLDYWRKKYNTFIIDEVPEGFKNSQLVDTGIITKFARAYLKSVFNKVYSVKGDMVSIFRKVWGLQNYHETKERNSHFHHTTDAIIIACMTKNRYDYLASEIRKQEENKVDFAINRLEMPKPWKTFTQDVKALESKTLSVHGKKYNEFKQTKRKKRKRGKIVKQNGQPIYQTGQGTRLSLHKETFYGKILYCGEERVVIRKELSKLNKTDVKNIVDEKVKAIIEKAALEKIIVFKKEGATINETVWQNKTKGIALKKIRLFAPSVKNPIKLKQHRNVSTKEYKQSFLVQNDENYGLAVYEGVNAKGKLIRASEIVNALNATIANKESELTEKLIFEPKKFNKKNNELTLKYILKKKLHVLLYNEQPKELTKMAKADLFKRLFIITQLDTEASCIKLLHHQEARLGKDISKHMGLKSGMKGGKNLDNHEQYPWIKVSVNSFDALVEGYDFELTPLGEIKWLKSYA

SEQ ID NO: 94 - protein, 1480 aa, unidentified
  REGION 1..1480: note = Description of Unknown: Cas Enzyme sequence
MAKILGLDLGTNSIGWAIVEKDSSDFSLIDKGVRVFSEGVKSEKGIESSRAAERTAFRSARKIKFRRKLRKYETLKVLSLNGMCPLSIEEVEEWRKSGFKQYPLNPEFLKWLRTDDDQNINPYIFRDRASKQKVSLFELGRALYHIAQRRGFLSNRLDQSAEGVIEQHKPGLEDILESVSTISELQMELTDYFQDRDLIERKATDLDEGEKKLKTLYNSFLKTIKDNPKDFEKTKSILIERLNKKEDLGAVKQKIGEISQAMKLGNYTTLGQYFFSLYNKGKIRNQYTSREEHYRSEFEVICLAQGIEGIIASEKLPEKRYFGLAKELYKAIFFQRPLKSQKGLIGKCTFEKSKSRCAVSHPDFEEYRMLCFINTIKIKTPDDEGLRFLTNEERLKIIPKFLRKKDNFNFEDLAKELVPSGSKYAFYKSSTAATFNYLFNYNMNSSVSGCVVSTSFKNALGEDWKTKIYSYETLNKNGESVTRNVDYNDLWHLISVSTSDLYLQEFAKDKLKLDDKKAILFSKIKLKKDFASLSLTAINKINPFLREGLLYSHAVFMANIENIVDADIWKNLDDRKYIQTKIAELIDTNTFDNNLLEIVNGLIKECKVGGFYYSKEAEAAYKSDLDKKVSYFVKSNKIEDQKETIINELFPVYIEQLKKYEFLTIKRLDEKVFDFLDGQNDDGQVFCNAKNKLKKLYHPSDIDVFRKQISKDGNGNEKLVLGSPLISSIKNPMAMRALHQLRKVLNALIVEGQIDEKTRIHIEMARELNDANKRKGIQDYQRDIEKNRKEYIDEIKKDYKAASGIDIEPTEDDILRYQLWIEQDRKTIYEEQYTNISISQIIGSDPDYDIEHTIPRSRSQDNSQMNKTLCSKRYNREVKKNKMPIELSNHSDILARVAPWQKKYLELEYKIIGISRAIKAATTKEQKDRKIRFRHKLNLQKDYFKGKYERFTYKEPKIGFKNSQIPDTGIITKYASAYLKSYFGRVEAVKGGMVAEFRKAWGIQESYIKDGKKYYEIKDRSKHTHHCIDAITIACMTKEKYDIMAHAWDLEDDLDKNQYKLMKSVLEQSKPWKTFTEDLKKIEEEILVSHHTPDNVKKQSKKIIRIRGKKQFVAEMESDANGKSVPRKDSNNKIIFKKDSKGEKMARFHQGDTVRGSLHQDSIYGAIKQPEIDDNTNKPKHTSKGAFVIKKDEKGIDEINFVIRKALSKLSENDIKNIVDPIVCQKIQKAVNDELITFKTVQGKKVAVVKEGTTIWMREPNKEKDLVGIPINKVRIFTGLKNPLEIKEHGTLSKSRFEHKQKVYAQNDENFAMAIYEGIDKKGNVKRSFESVNYMDAGAYFKLSNKNNNANSLVPLIHLKTQLPLKYEVKKGDLVLFYKENKEELNEIGNKDLPKRLYKVIAFEGDGRIQFRHHKTAMQQSSSNKEELTIVKFMADNNLKNSQVDFENPVPWLRLRVSNCDFLLIKKEFEITSTGRIDFL

SEQ ID NO: 95 - protein, 1124 aa, unidentified
  REGION 1..1124: note = Description of Unknown: Cas Enzyme sequence
MKKILGLDLGTNSIGWALIENNTILGMGSRIFPEGVVNLGEGEGRETSKNASRTDARGTRRQFFRRRLRKRYLLKELAKHNLCPISASEIKDWNGTEIFKNERLQDWLKLNPYILRAKALTEEISLFEIGRIFYHMIQRRGFLSNSRSAGADVKESSTIFKGDPKIGKIGISETLKSIDNNKTLGSYLSSIYPRDNEPYSGELERIRNRYTTRQMYIDEFETIWEIQKQYHTELNDTLKSILGGRKKDGYKEDGVLFHQRPLRSQKHLVGYCSFEPKKTKCPISAIPFELFRIYQWLNTLSYDVNGVKQKITDAEREKIVALLMAKEKPSFKEIRKAIGKLDSSYQFNYKDADKIIGSHTISNLSNNKFFGKQWFDLSYEEQEKIWHVLSFFDDRDKLKTYAIENWGFDEEKAIKISKFNLKDGYSNLSRKAITAILPFLQQGFMYDVAVGLAGVKNVLGSDWNKHKDFVLDNVPEIVRSNIIGGYIIPLKNMMVTEFNTTEKQLKKLYHHSSAIETKKILDKLPVNLNADKEIQKIKNPVVITALFEIRKLVNEIIETYGKPDEIKVELARDLKASKKNRRETRRKQQILEKENDRVKVELVKLNQRINHANILKYKLWEECNHTCPFTGKTITISQLFTGEVQIEHIFPWSRSLNDSFNNKTLCFADENRAKGNKTPYEYYSKQGDRKWEAIKLQALSCFKDKYPSYPNAYHKFKHFVKQKHDEDFISRQLNDTRYISKEAKNYLSKICDDVMVAPGQMTATLRHLWGLNSILNLEDDSKTRDDHRHHAIDALVMTCATRSHLQELTKRNRYHKNHELKDFPDPWFNFRSDAQKMVAQILVSHKQQKSLLTVRTHSTKKNGVVHKNVGIAARGQLHKESVYGLRKAPNSQEAFHIRKPLEILTTEKHLEKIVDKSIKELIYKKVQQLGGFIKGKIPKETFFIIDDNGNKQPQIFLPNRNGNPVPIKKVRIKENIGGAERLKENINQYVNPRNNHHVLIYKDINDNLKEEVVTFWTAVERKRQKQSVYQLPKEGKEIVTTLQINDLFLLGISEEEIKSDNLNNYLFRVQKLTSGDYFFRKHTSSKVTDKEYIQIRGFGEGKTGWFTYNPIKVKLNSIGQLKRL

SEQ ID NO: 96 - protein, 1131 aa, unidentified
  REGION 1..1131: note = Description of Unknown: Cas Enzyme sequence
MKKILGLDLGTNSIGWALIENNVILGMGSRIFPEGVVNLGEGEGREASKNASRTEARGIRRQIFRRRLRKRYLLKELAKHNLCPILPTLIKDWNGTDIFKNVLIKEWFQLNPYELRAKAIQEEISLIELGRIFYHMIQRRGFLSNSRSAGADIKETSTIFKGDAKIGKIGISDTLKSIEQNKTLGSFLHTIQPKESEPFSGELERIRNRYTTRQMYIDEFETIWEFQKQYHTELNTNLKTILGGRKKDNYKEDGVLFHQRPLRSQKHLVGYCSFEPKKTKCNLSAIPFELFRIYQWINTLSYDVNGVRQNITIEERKKIIALLLSKEKLSFKEIRKVINKLDGHYQFNYKDDDKIVGTYTISNLSNTKFFGNQWFDFSKKEQENIWHVLSFFDDRDKLKEYAIKNWSFDEEKATKISKFNLKDGYSNLSRKAILNILPFLEEGFMYDVAVGLAGVKNALSVNWEEHEQFVLDNVPEIVRSHLKGGYIEPLKSMLKNEFNCTDKQLEKLYHHSSAIETEKIIDRLPVNLNADREIQKIKNPVVITALFEIRKLVNEIIDTYGKPNEIKVELARDLKASKSNRLDTRKKQKELEKQNDRVKVELEKLNQRINHVNILKYKLWEECNHTCPFTGITITVSQLFTGEVQIEHIFPWSRSLNDSFNNKTLCFADENRAKGNKTPFEFYNIQGDQKWEAIKLQALSCFKTKANYPNSYNKFKHFVKIKHDEDFISRQLNDTRYISKEAKNYLSKICSNVLVAPGQMTAILRHHWGLNSILNKEDETKTRDDHRHHAVDALVMACSTKSHLQELSKRNRYHKNHELKDFPDPWLNFRQDAEKAVEQILVSHKKQKNLLTVRTHSTKKNGIVHENIGVAARGQLHKESVYGLRKAPNSDEGFHIRKSLESLTTEKHLEKIVDDSIKLLILKKINQLGGFIKGKIPKETFFIIDENGEKKPQIFLPNRNGKPVPIKKIRIKENIGGAEKLKENINQHVNPRNNHHVLVYKDFDGNLRENVVTFWTAVERKRQGQNVIKLPDDGKEIVSTLQINDLFLLGLSSEQIDWLNPNFQLINRHLYRVQKFTSADYYFRKHQESKLDGELGIAYHYIKGFGTGKTGWQTHNPIKVKVNSIGLIEKL

SEQ ID NO: 97 - protein, 1434 aa, unidentified
  REGION 1..1434: note = Description of Unknown: Cas Enzyme sequence
MSRILGLDLGTNSIGWAIVDKYKEEKEFLLIDKGVRIFTEGVNIEPKTNSESSKAAQRTGYRSGRKLKYRRKLRKLELLKVLSDNKLCPKLSDEELKDWRYKKIYPNNEEFRLWLSTDNQNGELERKKQIKNPYAFRFKASTQQFNLDKQSDRYELGRAFYHMAQRRGFLSNRLDTSDNSIIEDKNNEIEEIIQQSNNSIDFLGTYDDFIKDYDKSDTNSKALFTLGRGFKIILNENTNVEFNKIKEKLSERLNRKEFLGKVKSAISDLSTKIEEANCKTLGEYFYSLHKEGIRIRNNYTHREEHYLYEFNEICDKQNLQTTLKSDIENAIFYQRPLKSQKGLVAKCPLENDKACVPISHPDFELFRMYSFLNIIKIKAEDDDKLRVLNADEKANIEALFYRKSKPNFDFVEIAKKLTPKHLNSGYYKDKNAKDFDILFNFGNYTNVSGCPTIANLRSVFGEDWKAYLIENFNKKNKDNSAKTEHQIIDAIWHVLFRFDKTDKLKQFVIDYLGCDENTASKFSKIKLKQDYGSLSLKAIRNILPYLEKGLLYSHAVFLANLKIVLPKDIWNNQENLKTINNEVFSIIDNYTIYKNKVDIVNGLIKNIKDKKETWNENNTFVIEVYKKEINKHIQDYFGDKRWGSFSEENKEEILKECFELFSAQMKLNSGRGEFIKKETLDERVKDFLRDNFNVSADKLKKLYHPSAIEVYDKAKRSDKDGKLYLGSPLISSIKNPMAMRSLHQLRKVINQLIKEDVIDENTIVRIEMARELKSANERVAIRQWQNDLQNNRKEYIEAIKKIYKEDCGLDIEPSKDEILKFQLWKEQNQICLYTGKTISISDFIGANPKFDIEHTIPRSKSLDNSQTNKTLCESIYNRDTKKDKIPTECKNHDEILPRIKHWYAKYKNLEEQIRDITKKVRVASTKENRDSYIQKRTKLRFEYIYYRSKYKTFTIIEIPKGFKNSQSVDIGIISKYGNLFLKSLFTKVYPVKGKTTANLRDIWGLDKKERINHAHHAKDAVVVACCSKDINDALAEYYHNYEDYKYYGKSKPSFKHRIPWKGFNTDAKNFDENTLISHHVPNVLPIQSKKAIRKRGIIQRNANGEIKYRQGDTVRGALHKESFYGAIKREETNKKGKTEEVIKYVLRKPLDSFKDADLKNIVDDKIKEIVTNGRNEEKLAKKEIEILKKQINKVDDIEEAKLKAQIDVLTNKIENELYVLPNKNGNSIPIKKIRYFATDVKTPLEIKKHRDVSRHDHKQFYFAKNDSNYCMAIYEGLDSKGNIKRTNLLINNLDAGSYFKKSNSNSETYPIAPETDSNNYPLKYILTKGKMVLIYDKTPKELFEMEEAQLLERLFQVTQMDVEASCIKLLYHSEAREKKVLTLFMDLKNGMKGGKNIGEHKKFPWIKVGVNSFDCLVEGYDFKIAASGKLNFLI

SEQ ID NO: 98 - protein, 1522 aa, unidentified
  REGION 1..1522: note = Description of Unknown: Cas Enzyme sequence
MRKIKLGLDLGTNSIGWAVIEKQDGKYDFLEKLDKNGDLIPTKGSYIFPKGVNADENSKAAERTGFRGARRRLERLILRKIATLKVLNEFGLCPKFEENELGNWKNKKIYPCENEKFIDWQRTGKKNGNRETEKLKQPYYLRHLAATKDGLMNSEQGKLQLGRAFYHLAQRRGYLSNGEEEQSDDKLELFKTEVRKLLEETNDYTSFKEPFQVLLDNRKSDKVVNTLGNKIIKLLKTEINFDKIKDFIITEFDKPENLGKVMKSIGELSDNIKIAVKNGECAPTMGSFFYSIYAKADKKTGLITKLRGRYTHRNEHYLAEFNYICDKQNIEKDLKEKLHHAIFYQRPLKSQKGMVAMCPLEPKRKRIAISHPLFEEFRMWESINRIKIGREKTKLDFLTKEEKELIKPLFLQKTDFDFVKIANKLSGEEMYCYIKKPQEVFYKGNIIEGGVANIFFNFPLDKKFSACPTISALSKLLGKDKYNEIPFLNSGYKDEKNKTQISVEDIWHCLFLDDFGKKDRNTIRKEFAEKHLKLDEKGIEDFQKIKLVKGYGNLSKSALKKIVPFLEKGEIYSNAVFLANISEVLNRKLSENEQKIVSEKINEAINIHNLEKQNIGIANNYISKVKENKESLGNNEISIDAHKNGIKKEIIEWIGETEYNKLKPEEKDQLFKNCWDKFSLVSLEKSSKEVIYISTKTIPEFILDKLTEAFPKDKIDVSKLYHPSAMEVYKQVDKKLGNPEISSIKNPVFNRSMHQIKRLCNELIKKGIVDKDTEVNVEVAGEINSASYRKAIALWQKEQEIIREWARTEIINTYPKECQKEINPTDTDIIKYILWKEQNHQCLYTSYKPISICDFLDGKTTYDIEHTIPRSKYHDNSLSNKTLANADFNRTIKKDILPGLLNTNYNGELINIETIIRNRDKNLKSYSISSQLQKVSIQWNVSLWSLKEEYKKYKNAAKAITDPISHDEVMTKAHYTKIKLDYLSKKYKNFECVEITNQFTNANLVDTRIIAKYARAYLNSYFKKVNVVNGKITETLRKMWGLEKEYEIKNRDNHIHHCIDAVTVACVEKGTANLISEAFHNYESDYFKGNNNPKYKIKQPMQDFANRMHNLHNEVLIFHKQIDRVKPFLDAVEKGNNTKQNLRGKLNSQNPYAHIKKNDKLIFAQRKPITKISGGDIEDIIDDGIKIRLLNLADTKGWEKLMEFTVKENEVAAEKEIEHKKGIAFKIYEKIKKDDKKKEIVIDNITKQNFSTEFSDFKELIEMLFNATIRYDIDEKKRVNYNEKITNEVANLTRTKGLEILLKESDGVIILPEFYDEKKNKQIGRMVIKNIRLKSGKTDTNIKPYKEYRKIDKSEYDWQHNYYFAKEPGSNYEARIFGDLIPDETGKFKNRNYKLINHYNIVKGRFSIEDSKPILKLHQNDMFLVFDKHFDEIDWNCKSDIQNRLFVLVQFDENGIIILKRHNCALGITGTPNPIKSESNLSDLTEIVLRRSPSTLRVIPAKIDALGKIDVNFSKAFIELNS

SEQ ID NO: 99 - protein, 1186 aa, unidentified
  REGION 1..1186: note = Description of Unknown: Cas Enzyme sequence
MQKNHHFSYRLGIDLGTSSIGTAIYKTDDAGNIMSLEHLDSYIFGEPVAPKEMVTLNTARRSARLIRRQVERKAARLKKIGYIAQSIGITRDDVRQDKQDVIELRAKAVNEEISLPQLIKVFCHIVKNRGYKGVLSQEERGTVGKKLSKTIDLLNGDKTLGQLLWEEKQKASKGQPWRKIEEDGTFIYRQKVEEEFERIWNKQSKYHPELNGKYSVWGNNMFPDFPNQKEISLKDVFHSAMFYQRPIKWELETVGNCPIFPQEKRAARAQVAYQEYRLAKEIANLRICTKGHRDYKSLSQDQQTKLFDFIESHTELYTKEDGTVPFSKIYDFLGVEEEVSFTIDRGSKRGIKGNSTLFEFEKTGLLNAWAELTDKEQELVIEFLSNITTMSDLVDNNAAYVLEKICGKDRLTKNISADETELKHTADFILNNRQSLSTISLEHDRSSYSVKGLRVLTEAIFKGELTNSNEEEYIDSLVQKNKVYTGKLRTLKQILDQESINDPVMSRALAEFHRVMTYILHKYGEPQEIVVELSREIKNSLRRRQFLEGQSKLQAEERKKAIQELQANGVLVSPRNIEKWLLWQEQNHTCPYSGQAISFAQAFDEKQTQVDHIIPQRGEVAGPNVFENKVLVFTDENKDKSNRLPYDWKFAQDIEEYNAFNAEKKSKRKKGEKVDTVFGNHSPLINFVQHLWGLYTKEKKGYYSARDHKYKPTQKGAKILRKISNLLMTPSQLKSDFENRQNQETAWIGKIVLDWCTDVCHKVIPSYGALTAYMRHELKFDEILPTIRVIENKPLYDKDDKEIDSKKWEELFTIKDLSYDQADALKEDFERYCAALEQQPVTEADKQRAFKDFCREQRTQLQFNKRCDHRHHAVDAAVIGLCTRSLVQRASTHNGKYGTLHKIEWLNANGIHDKSKDIAGFTVDNIPQYALLRDEVQKRLTNYVVWHKPDHFPSGKFFDETAYSVQKDKGGKEVLVHRTPLGKFLKNNAEQTIKNLERLLFADTIKQVIISEFQKRLAQGMTQEEALCGKKGDPNDGIYYRGNKVKQVKYMYLVGKGIKAFDKNADKKIKDKYGKEYKAYQNGGYACMDFDAKTGKRIALIPLWKYEQNKQIPEGVTRIFIGDMLFDKAEKQFYKVQKFAALFGIGICEVTETQGKVAYVSNLKEHILVSKREDIAKLKNEHTASN

SEQ ID NO: 100 - protein, 1026 aa, unidentified
  REGION 1..1026: note = Description of Unknown: Cas Enzyme sequence
MSYYTLGLDLGVASIGWALISEDNDKFGLKAWGSRIFEQGLDSGGGLEAISRGKGTSRAAERRQKKALRRQYSRRRDRKNDLKRVLTENGMLPDPFTPEFFVELDRRLVQALPEAERAHAAHIAPYLYRKLALDRPLTKEEFGRAIYHLAQRRGYRSNRKQDLKDEESGIVKEHIAELKAKMEKAGARTIAEYFCTVDPNMERIRGRYTDRAMYEDEFHRICEAQRALVSPDLEKDLYEAIFFQRKLKSCKGLVGKCEIHPEFRRCSMAREEAQLFRIYTTVSNLRVQAGDTDRALTDEEHDKAVAFLNGYSDKFTVRGTVTLKNLGKAIGLAKGETFSLGDESKDVYGNERHAALARVFGSEKAAAMSAAEQDAFFHDLDSIEKDTVLEKRLREHWKLSPLQVETAMKVMLPESYCAYSLQALREMLPDLEAGVPLATLKKNLYPKQVGAEHGFLPVFDSDECGIEIRNPLVHRVITELRAVVNAIVRRYGKPNAIRIELARDLKTSNKQKELITRQNNLREKERQKIAERILAEAGIEKPSRNDILKVMLADECNFECPYTGKHFSMRDLLYGKDIHIEHIIPYSRSYDDSFRNKTLCDASANSAKNNRTPFEAYTGEQYRQILARVAQFKGPHAAYKLDLFKREEVEEQDFMERNLNDTRYASRIAMQYLGLLYGGIVDKNGRQRIFATSGGATALIRRAWGGNYLLGEGEKVRTDHRHHAIDAVTIALTTPYLVQKIASMPPEKRRKLHEANTPLIDFDLYSEAKKALEAATVSHHIRNKLRGALHEETIYGKDFGGTERHVRVSLDTMEPGDVAKIVDPAVRALVLEKLGKSKPEEVTKNDLKIFCDPANLPVLRDAAGNPVNVMKKVRVARNLKTITIGSGDGVREVKTGSNYVLPIFAKLNEKGEEVEWVGEIVTLLDAIQRKKHGQPVFEKDRPGLKFKFSLKKGDIVKWTKDGKEYLCIVRGISLPEFYIVPISEARKKEDLKAMKLWFRLYLSSAFKGNLRKYRMNIFGELRDAND

SEQ ID NO: 101 - protein, 1009 aa, unidentified
  REGION 1..1009: note = Description of Unknown: Cas Enzyme sequence
MFRLNPAGGPSAIVRAGVRIFSDGRNPKDGSSLAVTRRAARSMRRRRDRLLKRKERMLGKLVEHRLFPEEVAERKALESKNPYELRAKGLDETLTPGEFARALFHINQRRGFKSNRRTDRKDNDSGALKTAIKSMREKLVESGARTVGELLWQRLRNGEGTRARYRETPYTTEEGKKRIDKSYDFYVDRQMVADEFDALWAAQAALNPVRFTEQARADLRDTLLFQRDLRPVLPGRCTLIPTEPRAPLALPSTQRFRILQEVNHLRILDASLNETPLTLAQRDTLVALLEAKAKVGFKEMRKQLKLGGVVQFNLEDEKRTELKGNATSAALSKKDLFGSAWKDFDETLQDEIVWRLVTEQSEDSLARWLCEATGVDEAHALAIAGAGLPEGYGSLSRPALARIVPALRAEVITYDKAVQAAGFEHHSALGFDYEADEIEDWTHPETGEIKPVFKQLPYYGKALQRHVAFGSGKPEDSDEKRYGKIANPTVHIGLNQVRVVVNALVRRYGRPAEVVVELARDLKQSREQKQETQKKQAENQRRNQRIRHAIAEVRGCSEEQVKSTDIQKWILWEELSFDVADRRCPYSGVQISAAMLLSDEVEIEHILPFSQTLDDSLNNRTVAMRQANRIKRNRTPWQARMDFEAQGWAYESMLQRAERMPLRKRYRFAADGYERWLGEDKGFLARALNDTRYLSRVAKSYLTLICPLGVRVIPGQMTAMLRGKFGLNHVLGPNGEKNRNDHRHHAVDACVIGVTDQGLLQQFAAASARARDHGLTRLVDDMPFPWPTYRDHVERAVRHIWVSHKPDHGYEGAMMEETSYGIRKDGSIKQRRKADGSAGREISNLIRIAEPEQPVRHGVDEEGYPLPYKGYVGGSNYCIEITVSDKGKWEGQVISTFEAYRIVRQNGVHQLRNPVLGQNRLPLAMRLMIGDSVRLTVDEVEKIMRVVKVNGNGQIFMAPIHEANVDARDKDKLDAFSYTSKYAGSLQKAKGRQVVISPIGDLRNSGLMR

SEQ ID NO: 102 - protein, 1149 aa, unidentified
  REGION 1..1149: note = Description of Unknown: Cas Enzyme sequence
MKYRLGIDLGTSSIGVVAYKLSKDNEIEGIAHIDSYIFGEPVQPKDFITKNSGRREARLIRRQVQRKAKRLKKISYIAQSIGINEKDTFSIKGDKIHELRATAVSQKIELPELVKVFFHIVKNRGYKGNLKRSGTVNENIEELKKQFAGKKCETLGQLWWKLKQEAKQKNIPWKNVSDNGTYIERNIVEKEFDLIWDKQESEHKVLKGNYKIGYSKAFPEFEGKSEISLKEAFKSAMFYQRPIRWDLESVGDCPFEEGEKRASTSQMIFQDYRIADILANIRIISKIKRGEGRVLSKDEYTLLFSLINSSFDKYNKKNELPYDFIYKEMGINKDIEKFNIDRRITRADGGIKGNSTAKIFFENKVLPEWEVLNGKAQEITIEFLACITDFGDIEDSSEEHIKSSIKELTENINDKQSEDMKQAFEFINLLKNKEIFSKGKFNLEQNRAEYSVKALKKITEQMRRQKERTQIIKELYPKSNEERNRLRAFKDVKTGSPIVDRVLREFKRTMDYIIHKLGDKPTEITIELSRDLKKSLKQRQFIENQNKENQKERNEGINELLNSSISPTGKNIERYLLWTEQKNECPYCGQNINNGDAFNPKITEVDHIIPQTIGGPNIYSNKVLAHTECNAKKGGNTPYLASKKNNLNFGALKKMVDDKFQKDANAIKKRPVGTKWVKPQKKKNLERKIENLLTEKSLEEIERNFSERSNQETAWIGKIVLAWCADISDKVNPSFGGLTAYLRHIWNFKNILPEIRIKEEKSIFNRDNKEIDKERWKELFLTEGVSYKDTLFKKEFEEYVGKLEEKPLTESDWQRTFWHFLDMVRRDYIFNKRCDHRHHAIDAAIIGLCDRSLVQKANIHNAKNGTLQDIVNKQTGAVIRCGFFPEHPFSKLSKELKKRLFNYTVWHKPDRYPNKEFFQENAYNVLKKEDKTRLVKRFGLDTFLKKNKLEDVVNKLEDVVVGDEIKKEIVKQLNDRVQNKGMSVKDALLGEDENDGIFYKGNKVKKVKAMYKKKSLIEFKDDIDIKLPVVKNKNGEVKYKAYLNGGFACMDFDKKTGKRLRLIPIWKYQQEYKNKPIDENIIRIFARDTVFDKRKKRFFTVISFREQSGFVFSETTESKETSKEVVSNNFKDFLLVKDRKDLSEIKNGK

SEQ ID NO: 103 - protein, 993 aa, unidentified
  REGION 1..993: note = Description of Unknown: Cas Enzyme sequence
PGDETWYTSCLLRIKLLRGEKLAPWQIYKAIRSAIQKRGYDPDIPWKNREEKQQQKEDKETAAVLFDEKLLRQTVGDNPEWLYPCYLDASRMGLWNPARPDQLETRQDHKAQSTRKTVMLRALVEKELRDLLRQAARQLPVLAGKEEFILYGPNGKYSSSAVRAGVLAQKVPRFDNRIIDKCALIPRLNVCKIRMADNRPHPASQIIFEITFLQKLKNMRVQGSGGIRGLTPAEIALATFSQKNALPPKAWTAFCEERGLHPDPAHKKLAFQDISPVLPPEAFRSALAAKLNGISIMDSGKRVRNLTEEERAALLALFQQPRDSYSFTSSKWADFCEDIGVASLPGHEEVKPPKAAGRARFCRPAAQILKRLILSGQAPAAFHAAEIRALNGNADPRQGLVASDLDFLLNMGDSWDAIRIPDGKLDAIASRCADADEAIRKLIGSQNNPVVRHRLGVFAQRLRELKRRFGEPDHVVLEFVREDFMGDKARKELQKFQNDRAKARAEARERVAELGISEKNSLRYELWKAQGGRCLYNDDPLAETDLDNYHVDHIVPRAKGGPDSRLNYALTLNQTNDDKGDRTPYEWLSGNPVRWQAYLNRVEARLKAADGISRKTAQLLTLPNAAELAEKYTALAETAWISRLAQKIADLAFGWHNGVDAAGRKRTVVVSGGLTARIRRKYGLNRILNPNVATEEEAEKKNRADKRHHALDAMTISFIPQWARDPDKTGFFRLPREIRDNPWPFFQARIDAVVPRQLCYEKAPLAETIYGLRKTPEGDQVVKRTDLRELAYQTVNMKTVYNIDYAVKTSIPKILDERIQSPLLEFARTKPTEEDWNRFVSGFAPFGSLVRRVRLAETALPPDSMGEFKNMSKDGTPMLRKRLKANKGQYVLVEPDGKILVRPVYSFESPFQVRAQLLAEKAGRTIQGFYQTGCLVELEKEVEAGKRILPKGIYRLSTVLADGRAWLFSHEGPLLPRLSLKPLLSAGFKRIDS

SEQ ID NO: 104 - protein, 1002 aa, unidentified
  REGION 1..1002: note = Description of Unknown: Cas Enzyme sequence
MSKILGLDLGTNSIGWAFIDSESKKIIGTGVRIFPEGLNRTPSGSEESKNAQRRTARGMRRRLDRYQMRRSTLQEYLKKQSFYPKEKVEEDLFFKMDPYEIRKKGLDEKLSLYEIGRSIFHINQRRGFKSNRKTAGKDDNKIFKGYSEITGITETEQAIKEGGFRTLGEYLSTLKPEEQRRRNRFALRKMYEEEVDALWEKQRSFYPDELTDDIKNHIKDIVFFQRKLKSQKENVAFCTFESQKRCAPKSSPVYQYFRILETIVRIRITTDDRFDEALGDEERFLLIEKLNKTDRLEIEKIKKILHLPQDTHINLEDQLKIYGNRTYSALSRVFGTKRWDTFSDEKKHEIWHTLHFSDDDLWLEEYARKKWLLNDNEIKKLLIMPLESGYARLSAKAMKNIIPHLEEGLTYDQACLEAGYHHSDIYRPDHLADELPEPENIRNPLVQQSLYELRKLVNTIGDTYGKPEIVRVELLRDLKLSKDKRQQIFIENKRKEKHINEVKEILRNELHFPKITSDAIQKYLLWEESKRRCPYTGKDISLAGLFNGEFEIEHIIPYSRSLDNSMANKTLCHRSVNQEKGNLTPYEAFGNDPQRWFEITTCVKRDMPHKLRKFLMKDVGKEINEDFFNHQYTDSAYISREVSKYLKLICPKVQVTKGGATAQLRQMWGLNTILSVENENKKNREDQRHHAIDALVIANVNPGVLHRLSKCHKYSSEPEQEQFPEPWDNFRNDASDNMDRVLISYKVNPRVRGKLHEETYYGKIRTLEGKETYVVRKPVKSLTAKEIGNIVDPVVRQAVYDRLKSLGVNTDTKLKDIPKEAFVNPLYMPNGKTKIKKVRVIKDSETMYPLYSDNDKLFVQTGSNHHIEIFRHKQGGKGYGRVVRLIDAVKNEKEKLPVIDKTPPNDDYEFAYSLAINEMAIINPCPEIEIQLKEKNYGLITQRLYRVKKIDSLSEVITFIHHLASGKNEVTEKKTIFWATPSTLNAIKVVIDPVGNIYPVND

SEQ ID NO: 105 - protein, 1037 aa, unidentified
  REGION 1..1037: note = Description of Unknown: Cas Enzyme sequence
KKVKNLRYRLGIDLGTTSIGTALVELTEANDLLVPSSVMHMGVRIFEDGRDPKTKEPLGVTRRNAKQARKNRDRYLRRRKRLMDALIEFGLMPKQEDQRKCLALLNPYDLRMRGLDEQISLSELARAIFHLNQRRGFKSNRKAQGGEDGKIRVAVNALKEIFQKENCRTLGEFYYKTRLQKGLSVRSRLEGNGAKAAYPFYPSREMLEDEFNKLWDTQAQFYSKVLTHEAKEKIRDIFLYQRPLKPVKPGRCTLEPGELRAPLASPLFQKFRILQQINELRILDHYGNKRSLTREQRDLLYKELSHKKELKCTDARNKILKLARNERFSIEDDRKDKLSGDQIAALLGAKKYFGENWFKLPLENQCEIVNAIRNEENSEKLIDILMAFGVSHEIGASICEENMPTGYGNLSEKVLKKIIPELEAEVITYAEAAKRAGYNHSSNYTGEIFDKLPYYGKILENRVAHGSGLETDSDEKRYGKIANPTVHIALNQLRHVVNCVIKHFGAPEQIVIEVARDLKMSIEETKDYTKRQKENQDNNERINKELEKLGQVPNGANRERYKLWENLGDNPMDRRCPYTQQIISVNMIFSAEVEVEHILPFGQTYDDSLANKTLSMRYANRAKGNKSPFEAFGNSPTIAGVTYDYQVMMDSLPKSEFWTRNRWRFEKDALDRFNENGDFQNRQLTDTAYASRLALEYLQYICPPPNIWAIPGRLTSMMRSKWGLNEILGIEQEDGTFKKSRDHHGHHAIDALVVAMTDRSLLQRISKMSGDHWINEKHLLKGFEPPITDLQLQARNRLQKLVVSHRKDHGAGGLLHNATAYGFVGEYDANGASQVRHRVFLTSLKKDAIVNVQSEAIKVRLEELAADCSTEKEWSDALLQFSQETGIRRVRIIEKISVIPIANRETGAVYKAFKTDGNYCYDIWADGDKWTGRVISRYEANVNGAKTPENVLMRLRGGDTICLENMDFCFFYVVGISLGKVTLAPIFESGNLRERDRSKIDSFKYLVKSPNALLPLKARVVHVDECGFVYDPGFMEK

SEQ ID NO: 106 - protein, 1461 aa, unidentified
  REGION 1..1461: note = Description of Unknown: Cas Enzyme sequence
MTKILGLDLGTNSIGWAIVEREKTEFQLLDKGVRIFSEGVKSEKGIESSRAAERRAFRSARKLKFRRKLRKYETLHVLVRNNMCPLSIEEVDNWKKSGFKNYPLNPEFIKWLRTSDDDQINPYQFRAKASLQQVDKLELGRAFYHLAQRRGFLSNRLDQTAEGVLEEHCPQLLTLIEDATNVIEMKSEIQDHFEIAGIFDSNVKDGYKKDTDEGEKKLIKLHKSLITILNKNEDFEKCVKDLNDQLNKKENLGVVKQKINELTTQMKEGNFTTLGQLFNSQYNKAKIRNQYTAREEHYLDEFEIICKTQGLTGISETEQVKERRYSGLIKDLYRAIFFQRPLKSQKGLVGKCPFEKTKSRCAVSHPDFEEFRMWTYLNTIKLGTKVDKTMRFLSLEEKLALVPKFLRKKEHFDFADLAKELVGKNSSFGFYLGSKKDEVDFLFNYRPNDTVTGCPVSAAFSAVFGKNWKEIEFTYSTLNKDQKSVERKVDYSDLWHLLSVSTSDVYLMEYAKEKLNLDDKNSKAFSKIRLKKDYGNLSLSAINKILPYLKEGLLYSHAVFMANIEKIVEPTIWNKPEQRLSIRENISEIIENHSYENARLEIINGLIKNCKNEQTYYSKEAEPIYKTDLKNAMVRFFKLYHHEDANIQASLVDELFPMFMKQLKLNEFKKIKRLDEKVLEFLSGQNQDGEIYCKNQQSLKKLYHPSDIEVFKKVIYKDKSGNEQIILGSPLTQSIKNPMAMRALHQLRKVLNELIKQDQIDEKTIIHIEMARELNDANKRKGIQQFQNELKKRNEEALKDIKKLYYEECKKEIEPTGDDLLRYQLWIEQNRQEIYEPSINDGMSRKIAISQIIGENPDYDIEHTIPRSISQDNSQMNKTLCSKSFNRDIKKKSMPSELKNHEIILQHVKHWRNESEKMTIEIEKISRQIKAAATKEAKDKKITQRHYLTLKRDYLKGKYERFTWVEPKVGFKNSQIPDTGIITRYAQAYLKSYFKQVESVKGGMVAEFRKIWGIQESYQKDGKKYYTEKDRSKHTHHTIDAITIACMTKDKYDALAHAWTLEEKSDLQGVRTLLSNSKPWKTFKEDLKKIEDEILVSHYTPDNLKKQAKKIIRIRGKKQYVAEMVNDVDGKLVPKNDANNRIAYKVDEKGEKIPRLQQGDTIRGSLHQDSIYGAIKNPNDQNETQYVIRKDLESLKGTDIENIVDKTVREKVLEAIQNKVIVLSSNPQQKNKINEPVWMNFEKQIPIKKVRIIANSVKNPLEVKKHAALSLSKQRHKQMVYGQNDENYAMAIYELEGKKDFTLINNFEVANLTKEGKSIYSPFKTKLNKGVPIQMPIAKRNGKDLVLKRGQQVIFYDSEIEQPESISDLADLSGRIYIIEGLSIQRIVRPSGKIDEYGVVMFRYFREARKSDDLKKDNYKPDGSFKIGDSKPTRKMNHNQFTGFVEGIDFLVSTTGKIKPI

SEQ ID NO: 107 - protein, 1126 aa, unidentified
  REGION 1..1126: note = Description of Unknown: Cas Enzyme sequence
MRLGLDIGTNSIGWWLYATDGERITQAIDGGVRIFSDGRDPKSGASLAVDRRAARSMRRRRDRYLRRRKALMRKLRKAGLMPADPNEAKTLEKKLDPYELRARGLDEALPLTHLGRALFHLNQRRGFKSNRKAERGRGDNEGGKIKDATKRLDEAMRIANARTYGEFLHKRRGDKPEKPGDAQKTNKDGTRLDDRHTKSVRTRLTVARRDNAEKEEAGYDFYPDRRNLEEEFKELWAAQVKHHRDVLTDDLKNALFETIFHQRPLKEPKIGLCLFSGRQGVPSDERRLPKAHPLNQRRVLYETVNNLRVTADGRAKRTLTLDERDRIVHALDNRKPTKSPKSMVLKFDALGKAIKLASDERFTLQTVARDAIACDPVRASLSHPDRFGRNWSKLDLDAQWEAIRRIREVQSDADHTELVAWLKKTHGLDEAHAQATADAPLPEGYGRLGETASRKILGKLKSDVVTYSDAVEACGWHHSDHRTGEVLEQLPYYGEILERHVIPGSGNPEDDDITRFGRITNPTVHIGLNQLRRLVNKIVEVHGKPDQIVVELARELKQSKDQREDAQKRIKENTEAARKRSEKLAELRELNKSKEPADTGANRMLLRLWEDLNPKDCLRRRCPYTGKPIGAAMVFDGSCDVDHILPYSRTLDDSVANRTLCLREANREKGNKTPWEAWGGTPKWENIAANLKHLPKNKHWRFTPDAMERFEGENDFIDRALVDTQYLSRIARTYLDALYTEGGHVWVVPGRLTEMLRRHWGLNSLLPDSNQDRDKSTAKAKNRTDHRHHAIDAAVIAATDRGLIKKIADAAKRDEGNGLSAEDVARTTPEPWGFRTDIHTQLDKIVVSHRADRGRIDPTAKKQGRDSTAGQLHNDTAYGIVNEREVVSRTPLLSLKAGDIAVTTKGKNIRDPYLQKLLSEAIAGKEAPKEIEAALAGFAESERLPNGKYNPYRGIRHVRLIESLQSSARVEIKDATGKPYKAYKGDSNHCYEIWRMPDGKYQAWVVPNFYAHKADMPMDVRPATPATCLRPHPAAILKLRLQKNDMVRLENSSGKEIVATVEKFDVSGTIELIPHTEANAADRYNKDKSDNVYIRKRATPLMEAKARRVFVDEMGRLQDPGPPPPI

SEQ ID NO: 108 - protein, 1224 aa, unidentified
  REGION 1..1224: note = Description of Unknown: Cas Enzyme sequence
MQRVLGLDTGTNSLGWAVVDRNANEQGDYALIDKGVVIFEEGVNKGKESSKATERTRHHALRTGYFRRRLRKIETLKVLIAHQLCPVLSDEDLHRWRTKKIYPLTKDFMAWQSTNEHEGRNPYACRHRCLHEQLNLEDTADRFVLGRALYHLSQRRGFLSNRLESTPEKDTGDVKKGIKDLSAEMQKAGMEYLGDYFYHLYATKGNTVRLRARYTHREEHYYKEFQAICRKQQLPQSLCKALERALYFQRPLRSQRQTVGKCPFESNKSRCALSHPAYEEFRMLQFVNNIKVVDIDAATDPLGEQKKLPMRPLNPEERALAISRFTLKSYASKSTIDFEDIAKAIAGRGQYQHISDPGERAYRFNYRMKQGFAPCRTMIALRQLFGEDYRSGIAECYTKHAHRDGSPKTQNEMVADVWNILYSVEEDKHVGRWAKRYLQLSDEEAEKFAKIRLASGFANLSLTAIQKILPFLREGYLYAHAAFLANVPTIVGAQVWEEHRDTILHDIDCIFSDESIRGSDGISQAIKDYLKDNWTDRPGATDCLYHPSQIEVYPDAQPNKQGVLQLGSPRTSAVRNPMAMRSLHEVRKLINFLLREKRITPQTEVHIEYARELNDSNKRAAIGDWQKDQEKLRAKAVKEVSAVLKGGTPTEMDILKYQLWEEQGGYCLYTGNQIAPSDFLCANPLYDIEHTIPRSVGGDSTKENLMLCNRHFNREVKQTKLPTELANYEDIKERLAPWREKVGKLRKALDKARTFQGMTKKAKDDTIQRRHKLKMELDYWEGKLRRFEMTEVPEGFSLRQGVGIGLISKYAGLFLKSLFKSEHLDRNGKKVPNVRVIKSPLTAEFRRLWGLQEDYEKKSRDNHVHHCIDAITIACIGAAEARDMAEFYRAEEEMRWGRSEKPHFRKPWATFTEDVKAIAQDLLVVHHTADNLNKAARRRVKGSDGKLHLSVSDSVRASLHNDTYYGAIQQGDTIRYVQRRPLSGMKESDVKNIIDDIVREKVETAIQKWGSLAKALEHGIYMNEAKGIRIQKVRCYAPSKYSNLAHIRTHRDESRHDYKRTFHVAPDGNYMLAIYESKVGSRIKRSSQILSYLEATKLFKKGATRSTLFPATYEGQNLKYTLTKGQMVLLLNEGEEHLDFSNKKLLAQRLFEVVGIAYEVAAKRGFITLKHHQEAKPSGELQFPKGVFSSNSWRSTYMQAHTQFRALIEGADFLISNDGKISPR

SEQ ID NO: 109 - protein, 1050 aa, unidentified
  REGION 1..1050: note = Description of Unknown: Cas Enzyme sequence
MAKVLGLDVGTNSLGWALLDTAAQTIIDCGVRIFSGALTPKKDKLSNADRRQFRLTRRQFERRRRRKEKLRHRLQQLSMMPEDIKQFYRMNPYALRAMALDKQLTLHELGRVIYHLNQRRGYRSNRKSTNEEEEKGTIFKGATDKPGINTVEEALSSGKFRTLGEYLASLDTTTQRIRNRFTLRSHHEDEFNRIWKKQAEFYPDILNQAQYEYIAKKCVFFQRPLKSQKKNLGKCTLEPKKYKAPKSQPLSQMFRLLQNLNNLRIITPDRVTDESRMLTTKEREVIFAYLSSHDILDTEKKFPAALKTELGYGKRDSIAFNIKKLHGLKTEIALRNALGDTHFLSLSDEEKHQMWYILYGAEHEEWVKNYAKSHWQCNDEQAKQLAAMRLESGYMSLSSKAMRKMMPFLENGDRYDEAAFAAGYHHSDLRQDKGVADRIPPINTIRNPIVMVSLTQVRTVVNCLIDEYGKPDEIHVEMARDLKNSLSKRLEIEKQQKDRAKQREKIKEILRQYIANPSNNDILRYELWQEVNEHCPYTGDYISPSRLCSDHSDIDVEHILPYSRTLDNSVMNLTICVREENARKGDRTPWEMYGGDEEMFEELCRRINTEKMSDEKQKRFRMNDKQFEEFMTSGEGGDFLDRQLHDTAYIARETKAIMETICTNVIITKGTATADLRHLWGLNNILGKKNTIDNIAIKNRDDHRHHAIDAIVIALTSRRTLQLLSSWNASEKFNRRTKARFQLPRPWDDIFLQSQKAIANIIVSHKVNKRVRGALHEETVYGRLKMPFTGMPAYNKEKQQPYYVVRKPLSGMTDTNPVYKIVDPIVKETVYQRLIEKGINEHDLRSAEKNEKAKKIKIPKDAFAEPLYMPAAEGKKAPRILSVRIAVPATKMFPLHSHGDSAAFVEPGNNHHVTIFEREGRRKTERKEYVISLFEAVRRVIQKQSPIQRSMDGWDFICSLQKNELFIRDYHPDEINLEDKSQYHTFAESVYRVQKFTEGEINLRLHRLAVLKAVIDNKEVDIGRWICAASTLSGFKVRISPIGKLEIADD

SEQ ID NO: 110 - protein, 1028 aa, unidentified
  REGION 1..1028: note = Description of Unknown: Cas Enzyme sequence
GLDVGTTSIGFALISLDEDKETGCIVHSGCRVFPEGVTEDKKESRNKARREARLRRRQLRRKKENRKRLAQFLHETSLLPVFGSTEWKNLMDNTHSNPYELRSAALKKQLQPFELGKVIYHLAKHRGFKATKLDELMAESDEKKELGVVKDGIKELDHKLGDQTLGVYLASIPPSEKKRGRYLGRYMIQEELEQILEYQKHYNPELITSTFKKHLNSLIFSQRPTFWRLNTLGTCSLEQNESVCPKHSWIGQQFIMMQKVNDLRIVEPHPRHLTMEERTQLIQGLCKQKIMSFGGIRKLLHLPKGTVFNFETYQDKEDKRGLPGNAIEAALSTIFGSEWKHLPHKDAIRSSLSNRIWSISYNRVGNKRIEIRADESYQNQRQTVKQEMMKDWNIAEDQAEQLVQLPIPPQWLRFSEKAIQKLLPDLESGVPLQTAIKEHYPETLKSSEVEHELLPSSPHLVPELRNPTVNRALNELRKVVNNIIRSYGKPDIIRIELARDLKLGKKKKLEITKKNRQREQERKEAKNQLEKEGVKPTGMNIEKFLLWQESDGLDLYTGQKISFAALFKQTEYDIEHIIPRSRSFNNTFFNKTLAHNEINRQKGNMIPKEFFGDGETWHAFVTRVNQSKLPLEKKEKLLIPHYDAIASEEMTERQLRDTAYIATEAKTYLQTLGIPVQPTNGRATASLRRVWGINSIWATEFGLEEESKKAAGEKIRDDHRHHAVDAAVVALTSPGRIKRLSTFYQYRKEMKPDDFPLPWETFRADLITSLHKIIISHRVQRKISGPLHEETAYGFTKKKSETDPTAYYFVTRKTLDKDFKPNKVKDIVDPAVRHLIGEHLQKFDNNPAVAFAPENRPHMPLRKGGWGPPIKKVRIQIARNPQFMVSRQKNPISYYDSGDNHHMAIYGTHLDDGTVDPETVSFEVVSRFEVNQRASKNEPLVKPQNENGVPLLFTLVKNNVLIWNEPGEEEQMHLVRWTTANKGRIFHKPLWMSGTPPIEISISVKNLISYGGRKVSVDPIGNIFPCND

SEQ ID NO: 111 - protein, 1055 aa, unidentified
  REGION 1..1055: note = Description of Unknown: Cas Enzyme sequence
MKEDMILGIDLGANSIGWALLKCDPISKDVTGLVDAGSRIFEAGMTGDISSGRAESRCVERRNARSVRRNLERRRKRMTTLKNLLQEYGLLPDGESIESIVHDLDMQVKDFIKTIPESHRPENRVLAHTYPYFLRALASIQEIPPHLLGRAIYHLAQRRGFQSNRKTQTDEKELGLVKQGIADLRSRMSETGAKTLGQYFAFVDPSEIRIRGRWTSREMYESEFRLIMGNNPCNLSSSQIKKVEKTIFFQRKLRSQKTLIGECALEKSKRRCPWYRREAQEFRYLQSVNNLKLITIDGELRSLYPEERTVLLDILSGATFQLDKRGDLTLAKAKKALGLPAKTKFTIEDGGEKVLKGDRTTARMVSILGEAWNGFNPEKQASLIQDMSCFEKSEPLKKRLVSHHGISLDMSELLADTTLEPGYCNLSANAIRKLLPLMREGKAYSEAVKEVYPAVFSSTGIVNEFLPSLKNYTKSLRNPVVERCLNELRRVINAVIREYGKPGIIRLELARDVKNTKKVKERMIQENRDREKERHYALNKILEEFSEFNASRDDITKILLAEECGYICPYTGESISISSLIGRNPRFDIEHIIPRSRSMDNSFINKTLCLHEENRNVKKNRTPYEAYHGTAKYDEILGRVSRFKGKLAKRKLELFQMTPDDVTSKYEDFSNRQLNDTRYASLEASAYLGLLYGGVNTSIDGKRRVNVLSGGVTSMVRAFHGLNAILNDGGEKTRKDHRHHAVDAIAIGVTSPGMVKHLSDSIRIQETMGAVTHYRTESVLKMDSWPSMLEDSRHKIAEILASHHVSKRISGALHEATFYSKDHHATINGKVQTFKHIPVELPNLERGKVPFIVDDGVRRAVETKLEQLQIDDPKKAFRNLENLPELISSDGETRIPIKKVKIRRTQNTITVGKGNRQRSVVSGNNHHMLIYAELDDADNEVKWVGEVVTLLEAKERQRRNQPVVNRDLGPGKKFKMTIQCGDVFKMVVGEKRELVIVRTIPQSKQICFARVNDSRLVKDIKSSGDWLSKMPDTLRVSNPTKYTVDPLGRLRRAND

SEQ ID NO: 112 - protein, 1043 aa, unidentified
  REGION 1..1043: note = Description of Unknown: Cas Enzyme sequence
MSHCQQGASANILGIDIGSNSIGWALVNSAEKSKPDKITAVGVRIFQAGLDDLESDGKGKSRNTDRREARSRRRQYERRSRRMANLARALQRNQLLPEGDIDEPHERHLFLEKIDLEFGSPYELRVRALDKKLTPHELGRALYHLAHRRGFLSNRKSPIKKDKEERGMLAKIDGLEKEIKDTGARTLGEYFLRVGSKEIRIRSRHTSRKMYEDEFEFIWNKQAEFYPRLLTDTLKKKIQKIIFCQRPLKSVKRFIGDCELEKGRKRAPWGLLVSQRFRYLQKLNDLLIISNDNGHKRELSDEERQTLGDSLELKGDLTFGKMRKLLGLRGIKFNLELGEEKRIPGNRTAAKLVKIFGIDEWRDFGDERRDLIVHDLRSISNPETMKKRGMEVWGLDEEKADDLANIKLEEGYCSFSRQALENLLPLLENGTSLATAIKECYPEQSERKEALYDFLPMVESDDLPDLRNPIVERSLTELRKVVNAIIAEYGLPDKINVEFARELRQTAKQRGETSKRMSANRDSREKAAQEIIDETDIETPTRRDILKVQLAQECDWTCPYTGKKITIQSLLGDNPQFDIEHIIPFHRSLDDSYLNKTLCCAEENRKVKNNRTPYETYAGSDGWDDIIACVKKFKGSAGYAKLRRFRMKPDEVEEALADFTSRQLNDTRWASKWAKRYLGLLYGGTDSDGIDASGKRRVNAVTGQVTAFFRNEWGLNAVLGDGPGKSRDDHRHHAVDALVVALMTAAEVKKLNDAAGRAARAKKRKFEGVEPPWSGFAGEAVSLIRNIVPSHRLSKRVRGALHKETFYGRPRVDEKGKHYVHIRLPLESLSRKNVDDIVDPVIRETVKNKLDKIGGEPKTAFTDPKNHPCIHQPDGNKTTIHRVRIRQNLEPFHVGSGDARRYVKNDAIHHMVIYETAGKKEGTVKWDAEVVSLFEACQRKKAKQPIIQRNLSDGRKFIFSLARHEIIELDTLDGKSRAMYIVRTVPQSKQIFFVPINDAREKKKIKESKNVFSGLTALPESLRKRNCRKVVVTPLGEIRRAND

SEQ ID NO: 113 - protein, 1038 aa, unidentified
  REGION 1..1038: note = Description of Unknown: Cas Enzyme sequence
MDHCRPKTSANILGIDIGPNSIGWALIECNKKLKPNKITAAGVRIFPAGLDDLERDGKGKSRNTQRREARSRRRQTERTARRMLNLARALQKNGLLPEGELNNSQQRHLFLENLDQELESPYKLRAKGLDQKLNPYEFGRSLYHLAQRRGFLTNRKTPIKDEKEEKGIKAEISGLSKEIADSNARTLGEYLASIASKDVRIRQRYTSRKMYETEFELLWTKQAEYYPQILTDTLKKDIHKIIFHQRPLKSVKKFIGGCELEKGRKRAPWGLLIAQRYRYLQRLNDLKILEGMNGTERELNDDERVILATELEHKKEVSFAAMRRLLKLKKGTKFNLELGGEKKIPGNKTTAKLIDIFGLDRWRGFGDHERNSIVEDLRSIRKEETLKKRWIKEWGLDDDKAQAFSKIRLEDGYCRFSRQALDRLVPLLENGFSLQTAIKECYPAFFERTEAKFDLLPIVRAEVLPDLRNPIVERALTELRRVVNAIIVRYGLPERINIEFARELRQSAKQREQTSKKMRANQRTRESAAKKIIEETEIPDPGRTDILKVQLAEECDWICPYTGSPITPQSLLGDHPQFDIEHIIPLNRSLDDSFMNKTLCWAIENRDVKRNRTPFETYYGTPQWDEIIARVKKFKGGTAYAKLRRFQMKPDEVDKSLADFTARQLNDTRWASKWAKKYLGLLYGGIDSDGIDVTGKRRVNTVTGQVTAFFRNEWGLNAVLGDGPGKSRDDHRHHAVDALIVALMTAANVKMLSDAAGRAMRTGRRKFEGVETPWGGFAGEAKSIIRNVTVSHRLSKRVRGALHKETFYGRPRKDEKGKDYVHLRVGLDEISEKNIANIIDPAVRQAVRTKLKEKGSSPKDVFKDVANHPCLKKPNGDGITIHRVRIRENLSPFMVGNGDGARYVKNDSIHHMEVFETTNKKGEVKWGAEVVSMFDAYARKNADGPIINRDFGKKRKFLFSLAGHEIIELDDVDGKRSLFVIRSIEKSNGKVRFVPINDARTLNDIGKAGFTALPEPLRKRNCRKVVVTPLGEIRRAND

SEQ ID NO: 114 - protein, 1037 aa, unidentified
  REGION 1..1037: note = Description of Unknown: Cas Enzyme sequence
MEKDFKKIELTLGLDIGSNSIGWALLEATGGKVNKIVAAGAHVFDPGLDNPDDFGLGESKNKARRDARLMRRQTERRARRIRNMALALQSSCLLPPGELFDSKKRNEFFNEHDKNWGSPYLIRTKALDEKLSLHEIGRALYHLAQRRGFLSNRKTPQRASDDLGSVRKQIGELGQKIADERARSLGEYQASLQKDRKEVRRWYTARQMRLDEFNAIWRNQQVFYSDILNESLKRTIHRIIFHQRPLKSQRHLIGECSLERGRKRAPMSLLVAQRVRYLQKLNDLRIIDTESGEAEIRLTPEQRNALMEELDITDKLSFGAMRRLLKKKKIKFNFEFFEEDSIPGNKTAAKIIKVIGKERWNAFSNQDHEALVEDLRSINSDTALARRARKRWGFNENTSKEFSEINLEAGYFNYSRQALEKLLPYLQEGKSLYDTKKEGGYLVKESGKSEPKESLPPVLDCGLGDLRNPAIIRALTELRKLVSAVVGKYKLPDLIKVELARDIRQTAKKREQLQKNMRANEKERENAKRKIQEWGISEPGRDDIIKYILAEECNWDCPYTGKHISMDSLFASAPQFDIEHIIPYDRSLDNSFTNKTLCDVRENREVKRNRTPYETYHGAPKWDDIIARVRKFKGKAAQSKLWRFQLSEEACQKFLEDFISRQLNDTAWSAKWAKKYLGLLYGGLDDDGIDGNGKRRVQATSGGVTAELRYHWGLNNILGKDNFKSRDDHRHHAVDALVIGLTSQGSVKLLSDAAKRGSAKGLSGSKNVQLPWDDFVEDVRQVISGVVISRLISRKVGGALHKETFYSPIETDKGKKSQVCQRIALDKMTSKDVERIRDPHVRKLVREQLEILGGDPKTAFKEMANLPFITDRNGRRVPIRKARIVYNLETFPVGSGIRTRHVQSDRIHHMEIFALIDKDGSEIKWDAEVVSLFKAYQRVKQKSPVVQRNFNPGKKFLFSIVRGDILEIDDSSSSGRGLYVVRKMGESKQLRIVSLTDARKLGDIPLKDLQPLPDTLRKLHCQKVRVDILGNVRNAND

SEQ ID NO: 115 - protein, 1056 aa, unidentified
  REGION 1..1056: note = Description of Unknown: Cas Enzyme sequence
MMREDRILGLDLGTNSLGWALLACDPQTKDITGLVATGSRVFEAGMNGDIASGRAESRCAERRSARSIRRNLERRRRRMSKLKNLLQKYSLLPEGDDIEQIVLELDTQARQFIKEIPSSLKPADDILAHTYPYFLRALAAEQELPPFLLGRAIYHLAQRRGFWSNRKSKTEEKELGQVKQGIADLQIEMNKSGAKTLGQYFAFVNPLESRIRRHWTSRDMYSNEFKLIMEKNNRLLDKKQILEIEKAIFFQRKLKSQKSLIGKCILEPNKRRCSWYRREAQEFRYLQSLNNLVLVTYDGEKRVLNSEEHEELLRILSGETQQLDKHGNITMAKAKKALGLHAKSKFTIEEGGEKTLKGDRTTASIIDVIGADWLNYSPDKQELIIHDLNSFEKAEPLKKRAMNVYGLPEDKAEKLSEVSLEPDYCNLSLKAMKKLLPLMRNGLTYGEAVKMVYPETFTSTGVAADFLPQLKAFNENLRNPVVERSLNELRRVVNAVIKEYGKPGVIRLELAREMKNTQKQKEKLVTINRDNEKERNAALAKIQAEFPNIAVSRDDITKIQLAEECGYKCPYTGESISISSLLGKTPKFDIEHIIPRSRSMDNSFINKTLCLHNENRNVKKNKTPYEAYHGTDKYDEILLRVANFNGSLSKRKLELFKMTPDEVQVKFEDFSNRQLNDTRYASKEAAAYLGLLYGGVVSSIDGKRRVNVLSGGLTAIVRSFHGLNAILNDGDAKSREDHRHHAVDAIAIGVTSPGMVKQLSDSIRIQELQGSTSSYHTGKFKEMKTWPAMFEESKALVSAAIASHHISKKIRGGLHEESFYSKDHEFEVNSKLQQYKHIRIDLSSLEKSKISEIVDDGIRRAIESKLAELHIDDPKKAFKSIENLPELTSRDGKTRIPIRKVKIRRKQNTVTVGNGKRQRNVVSGSNHHMLVYAELDNNGNETKWVGEVVTLIEANQRLKNRQPVINRDVGPGRRFKMSIQCGDIFEMDLEDTRELVIVRSVPQSFQLCFVKVNEARLKKQIKDSGEWFTKMPNTLRISNPVKFSMDALGNRRKAND

SEQ ID NO: 116 - protein, 998 aa, unidentified
  REGION 1..998: note = Description of Unknown: Cas Enzyme sequence
MKSFTLGLDIGSNSLGWAMLNDEPNINGTNLIAGVRIFPDATDKKGNLEESRNLKRRAARLMRRQLDRRSRRKKKLKNLLQKEGLIPVDISSYDRWLDLDPYVLRKKALDTALTAEEFARVLIHLNQRRGFKSNLKEQGKAAKEEGEIKGAISNLQKQIDESGFRTLGEYLATEREKGNKIRETHTSRSMYEHEFELLWRTQADYHPDIWTEKLKERIREAIFFQRPLKPQDRFIGKCDLEPEEKRCQRASWFAQQFRVLQELNDLRILTKREGEPFLTAQQRETLLAALMKQKEIKVSKIKEKILGLSEIEALNYERTGRTKMQGNPVEAGLRKIFKKEFEEKAEWLRETVWESLLNEEADDFRRKALSEWNLSEEQIDALYKIPRPQGYFHYSLKAIKNLLPYLDEGCDLPSAIDNAGYQKTENERQGYLPPVHADDFRNPVVVRALSETRKVVNAIVREYGSPSKIVIELARETKGSIASRMESLRKSRQMASVHKRIAGELEKMSVPANHDTIEKYKLWEECGKVCPYTGQPIGLHQLYGESSEFEVEHILPYSLSLDDSFLNKTLCARSENRAKHNRTPYEAYHHDKARYDQILLRVKRLPYEKRRRFSIKEIPDDFTRRQLNDTSYASKAVRLYLARLGIRVRATKGGVTARLRRAWGLNNLLGASDGKKTHDDHRHHAVDALVVALTTPAHVKALGREFIRPENKKPPSPWEEKGIPQESFRRIAAGTVQGINVSHRANRKVAGQLNEETNYGRTTQENSYVTRVFLRALTPSMAARIVDPTVRRVVGERLSAHGIEIGKGSSPVPQEVFKEELCLPGRNRRKGSIIKKVRVKKTLGNAIPIRDSKGEVYRYVNPGNNHHITIFEYTNEKGSIRRCNEVVSRFEAARRALNKEPVVSKVHPEQPQARFLMSLAENDMVIAPDSEGKERLCRIQKFSAGNTKESVDIFLRLHNAATIEDKETNIRLRSLAKDKFKVKKVSVDILGRIHPCHD

SEQ ID NO: 117 - protein, 1086 aa, unidentified
  REGION 1..1086: note = Description of Unknown: Cas Enzyme sequence
MKIQTAPISYVLGLDIGAASIGWACLKLLNNRPCNVVATGVRLFDAGMSGSASDFERGREESNAVARRNARLVRRQVHRRASRRWSVFQTLQLAGLLPPDPVDGRRAISEFLVKLDQSLAAEFLPQDDHRSAQLLTYRIRARAVRERVELFAIGRAILHLAKRRGFNSNLRGVPKDDEETGTVKPAIRSLAAELAAGNRTLGEYLAEQNPFEKGIPTKGVRKRWTGREMYLEEFERIWQTQAKHHPELTDELRKKLRKAIFFQRPLRSAKGLVGKCSLEPKKRRLAAAHPLAQEVRMLQFVNHVRVQQRGELDRALNDAERERALAALQTRGRMSLKDFRTAISLPKGAKLNFEGDDDQHARGLGTLTELRGILGPRWDELDESDKEQLFYEVLSFNKRDALIRRAKNHWQFEEQQAELLADVTLEPGYASHSRQALLKLRDKLSQKDHKLGRWPTYAEAKLLAYPNAHAAEAVLQKLPPVIGSVTNVRSPAVIRALTEVRKVVNELINRFGKPELVRIELARDLKKSKKERKKAEQIIKENTAKRRKALTAIRDEFKQYSEPRGYDRGIEMYLLAEECNWVCPYTGEEIHSVRDLIGDQSRFDIEHIYPRRYLDDSFGNKTLCLHEENRNVKRDRLPAVAYADNPQRYRDILARVKSFRGPAAAKKLARFQASAVDEEFVARQLNDTRHAAVAAADYLGLLYGGRIDANGRQRVSTLTGGLTAALRGQWKLNQILGLGGEKNRTDHRQHAIDAVVAACTDMGTVAALQTAAGAAWQAGRPRGLPQIDPPWSNLLDETRRSVLSILVSHRQSRRLNGPLHADTNYAIARGDREGKSKVRKPLSLLSITEIDGDAIVDDVVRCLVQAKYAELKARLGANKKPNEVFNSPENHPFLENRDGSRTPIHSVRVWAKKEASAIRLGDPTRNVAVTQGSNFCTRILPAFDKSGNEIGWTDQPISRVDAMRNRNKPLGEVTEKFTLFINEYVLMPDETGDCRLYRVLNLSAGDIEVRLHYDGRTSDEVKKAKQRVRVGAGAMLERRFRKVSVSPTGLLTDALTGEEIDITTLAKWTPPKQTPKKGRKKKDGES

SEQ ID NO: 118 - protein, 1016 aa, unidentified
  REGION 1..1016: note = Description of Unknown: Cas Enzyme sequence
MSKSVSTILGLDIGLASVGWSLIETHADIPTKIIQAGVRVFPMGMELDDRGKGTSRSVERREARLRRRQLDRRAMRKAHIRKLLFVNNLAPDRKADPQGWRDFEGMQPYALRAKGLDQPLSAHEVGRVIYHMAQRRGFLSNRKAPEREDEKPGEVKKATQALEAEIKAAGCRTLGEYFNRLDPHQQRIRGNYTLRRWFIEEFDALWAVQAKATPALFHDALGKQLRQALFFQRPLRIKEGTVGTCELESGKKRCRLAMLDAQRFRLLQQVNNLRLETGPGKERAMTPEERAKIVELLSSKASVKFGSIRKALKLRGSFNLERGGAEAMVGDETTAIIKAKIGAAWDELDRAERDQLVNDMLSIDHAEVLKRRLITRWHLDEAAADGLSEVALEDGHSALSLAAISKLLPHMEAGDPYMTAVMKAYPDNANWKPADEVPPFPNLRNPLVQRALAETRRVVNAIVQRHGKPGRIRVELARDLKKAAKERESEWARMRVREKERSEAREALQRLKEYHIANPRASDIEKWLLFKECGGICPYTGKAITVAGLFGEHPQFDVEHIIPFSRSLDDSFGNKTLCHVDYNRNIKKNKTPHETAGTTPQWDDMVARVKTFSGVYAEAKLRRFVMEGVADEGGFMENFSQRDLAITRYATKAAYQALSKLYAPDEAKKRVEATQGIATSYLRRAWRLNNVLGLANEKTRDDHRQHAIDATVVALTNRGTIKALADAAVMGRAGAFTPIPEPWEGFKEDLASTIQGVVTSHRVSKKTNGPLHKETYYGIITDPSDLKTNRAVVRKDIASLSDKDVAGDVIVDPAVRAAVRARLAELGENDPKKAFKDRGQHPFLVAKDGRKIPIHKVRMFQKCDPMAIETEPGSRHVVLGNNHHVEFFLTKDKKGNPTLKSAVVSQLDVLRIVAKARKEGVAPVIVRKVDEEGNPLAFSLAIGEFIEFDWNGVRSAFVVQKLSLNDYWFRKPEDARKAKDIAKEDLIRITSDGKLSLLNPKKLICDPLGHTYRTCD

SEQ ID NO: 119 - protein, 1483 aa, unidentified
  REGION 1..1483: note = Description of Unknown: Cas Enzyme sequence
MDAGRLGDFEKGNSVSFTAERTQYRGARRLHERFLLRRERLIRVLQIMGFLPEHFASQLSRYGKLPDDKELKLAWKEGPAGKNEFLFMAAFEEMVADFHRAVVDRKIPYDWTIYYLRHKALTHPISKQELAWVLLQFNQKRGYYQLRGKADEGFDNAANKNEEKSYHELKVIKVEDTHEPRKGGGSWYNVTLENGWVYKKPSLLKPDWEGKIRGFIATFQLDKDGNRKSDQPKLSAPKEDDWGLRKIKTEHDIKQSGLTIGDYIYQSLLHNPDRKIIGDLVQTVDRELYLKELRQILDQQKKYIPELNDHQLYLRCIEELYPSNEPYRNSIAKRDFTYLLADDILFYQRPLKSKRSLIYDCPFETQNDRPTKCIAKSHPLYQEFRIWQFLSNLRIYKDNLDITSNLLPDHEAYARLYDHLSILNVIDLKGLLKYFKIAKADLPKCRWNYVPDKSYPVGETRATLLGGLRKACVPDSFLAPDKEEHLWHILYSVDDPAQYRSALRTFAHRQGWDKPQADAFVNAFERLTIYKEKDYGAYSAKALRRLLPLMRRGQYWKPSAIDPATRSRIEHLLTGEDDATLTPFVRNKFTHLQDLAQFQGLATWQACYLVYNRHSEPISSQKWAKPEDIDTFLAQFRRNSLNNPVVEQVVTESLRVVRDIWRQHGHLDEIHIELGRELKKTKAERERLTKIITYGEATNQRIRLLLQEFLNPDCQIDDVRPQSPSQQEKLKIYEEGVFQSGIEIPDDIQDIQKRLSTLKTKPTHAEVLRYKLWLDQKYISPYTARPIPLAKLFTTAYQIEHIIPQSRWFDDSYSNKVICESEVNRLKDRELGHEFIVHHAGQEVPLSLSDSVRILSVSQYEEHVKRTFAGNPRKMRNLLLDEIPEDFTSRQMNDSRYISRLMMQLLSNIVRSADEEGNLENAATSKNVIACNGAVTDRLKHDWGIDDVWNRIILPRFERMNAITDSTDYTATTPNGHIIPSVPVELRPGFNKKRIDHRHHAMDAIVIACTTRSHVNLLNNEAAKSDSRYDLQRKLRQTETYQDPAGKRHERFTLFYKPWPTFTQDVYQALQGIIVSFKQNLRVINKTANRYTVIRNGKHLVVKQTKGDSWAIRKPLHKETVYGEVNLQPKKKVRIKKKVRIKEAIANPDSIVSRELKAKIKEKIALRYTAKQIAEYLDKHKDIWDEAADGKIEVYYYTQSTPDRYFATRYGHELSNYLGSCLNEIDAINKINKITDTGIQKILLAHLFQEKRDPITAFNPDGIERMNKNIRQLNNGKQHQPIKKVRVWTKGEKFSLTEKGSKSKKFYNGDDGKNIHYIIYTQGDGIDRNYLVVELQVSVECQKKFGKQWKEHLEDFLKSYGKDIEKKRPGLLPENAHILEILSPGDIVYMSHLDQIPTPEQIEPSRLYRIRSFDEDHFYCIPINVANVILSKKEFGSKDKTQKHIVFNRPANDNTQGNDSDNMIRNHCIPVQIDRLGNIIKIG

SEQ ID NO: 120 - protein, 1404 aa, unidentified
  REGION 1..1404: note = Description of Unknown: Cas Enzyme sequence
MGKFLGIDLGTNSIGLSLRNTDKPGKIEEQLDYFSSAIFDAGVGSEKGNEFSYASKRTAYRSKRRLYQSRRYRIWATLDLLIEKNCCPLKMTELEKWYKYDKNSEPHRAYPLKNSAFNSWISLDFNEDGVPDYSSPYQLRDELTKAQFDFSKVIDRYKLGRALYHIAQRRGFKSSKGDTVAEIDTEDENVDLSIELKKSEEKSSSAIRKYMEVNNLKTVGQALAKLEREGVRLRGSIYTPIRQQYLDEVNYIFEFQKGLRDEVDFHKKISSTKKGEGTIFYKRPLRSQTGNIGKCTLEKNKRRCPESHPLYEEFRALSFINNIKIKRLTDSELKFLDNNLRKDLYNDLFIGRAKSNFNFEDIRKWVEKRIGEKLSKEDKTINYKDNVSVTGCPVSYRLKKILGESWKDRIIESDEVRVDKKTGREHKLSYNYIDIWHICFSFDDAEFVENFGRYKLKLDEDGVKDLCRLWGTLSQGYSMLSLKAISKINVFLRKGHIYSNAVFLAKIPEILGYEKWNIYGKLIESQLSDIITLNNKKRITIAIVNSLISKYKALSFTAKFAEKNYDYELTDSDNEAIYNAAIDHYGKNKWNQLDSDIQKSIIEPIKNLYQAFFKDRKRAYLVLPKTETAIIDYIIEKCNVSPEKTKILYHPSQIEIYPEVKPQVVETNGEAMSLRLLGNPDVGIFKNPSVMRTLRILRNLINSMLENRLIDEDTKIVVEMAREMNDANMRWAIETYQDIKERENAEFKAIISEIYQGYTLSDSELENAIEKVKLVFEQMENCNNTKKSKDNFLSFKGEKELLIKKYKLWREQNFRCLYTGATISLTSLFDGNKWDIEHTIPRSRGMDNSMANLTICSSEFNRKIKKNCIPSELPNHSEILMRIKPWIDRLKQIDKNIKFNIAKAKSASTKDKKDSYIRQRHLWELEYVYWKKKVETFTITSDKVNEDFRNSQLVDTRIITKYALHYLRSAFNSVEVVPGSITAEIRRLVGVQKEDEKKSRLYHSHHAIDATMLILITSKAQRNKMLNLFYKKEEAKKYGDNESYISNELEDLKEQNGLNNVSGIKKYIEDNILINYISKDQTLTPARKTFKARNKKGEKVVMYATGDSMRCSLHKDTFYGMIRKGEDYNIVINQRIDSLNKATEKDIDKFIESVVDEGIKNRLRDVINKRLTEGMKIDEAIKNIWLLDSEGKEIREDKNGRKLAPMRHIRCYAPGGKGRLTKNGVLTLKEQTYPSKFEYKNSYYVQNDGNYLCLFFENRDRNYVQSRIVQFMELAMIRNKYNEDITDESVYQRYFGEPGYSLKYVIKVGTKVLIYKESPDELSPDNYADRLYIIYKFNQDHTSNNIYLCLKHNLLANINNIKALSTFEDKNSTPVLRWNAKKCNMLVEGYDFYIDNLGRISFPK

SEQ ID NO: 121 - protein, 1404 aa, unidentified
  REGION 1..1404: note = Description of Unknown: Cas Enzyme sequence
LRIIKLKSIIMKKILGLDLGTTSIGWAVVNEKENNDEESSIIRLGVRVNPLTVDEKTNFEKGKSITTNADRRLKRSMRRNLQRYKLRRENLIECLLEHHIISENTPLYETGNFSTFDTYRLRAKAVNEEISLEEFARVLLMINKKRGYKSNRKVKDGEEGELIDGMEISKRLYDESITPGQLLLDLATKGKKIRPTFYRSDLQDEFDKVWTKQSEFYPDILTDEFKSSIRGFNKTQTSGAFYGIHKISTAKNNGKDSYIQGLKWRVTALTERLGIEEAAYILADINGAINNSSKRLAMISDRSKQLFFNHLTIGQFLVKRLNDNPNASLKNIIFYRQDYMDEFETLWEKQAQYHPELTPELKKEIRDIIIFYQRDLKSCKNLVGYCELEHSTREVIIDGKVQKIITGCKVCPKSSPLFQDFKIWQILNNLQVSVSKQKQLRRKADKQQQSLFNDLDFDNPQRFLTQEEKDILFYELSFKEKMSQKDVLKLLFDNPKELELNYKDVEGNKTMASLYKAYQEIINISGHGEYDFSKMQADDILSITKQIFSGLGYKTDYLTFNPLLEGKEMERQPLYRLWHLLYSYNGDQSVTGNEALLKKINEICGFEKEYATILANISMPLDYGNLSAKAIRKILPHMMKGFEYSEACSEAGYKHSARSLTKEELEQKQYKSQLDEIRRNSLRNPVVEKILNQMINLVNEIVKTYGKPDEIRIELARELKKNQEERALLDEAIRKNTVENETLRKELENNFGFVHVSRNDILRYKLYKELKMNGYKTLYSNTYIPKEELFSDRFDIEHIIPKSRLFDDSFSNKTLELKSVNLEKGNMTAYDYVEGKYDESYLSNYESRVEDLFSQKVISRTKRNNLLAKESEIPSDFLQRDLRDTQYIARKAREILEDMVPIVVTTTGSVTDRLREDWQLINIMQELNWSKYEKIGLTDQYTDRNGEVHRYIKDWTKRNDHRHHAMDALTIAFTKSSIVQYLNNLNAKSDKSSSIYAIEKNELHRNEKSKLVFNSPMPLHLFRSEAKRQLENILVSFKAKNKVITKNINKIKTKEGGQKKVQLTPRGALHNETIYGRIRRYEAEYKKVDGKFTEDIILRVSNRNYQKALLERLSEYGYDPKKAFTGKNSLEKNPIWLNDDHTNCVPLKVKLFKVVELYTIKKSIDKNLKIDKVIDDKVREILQKRLNEFGGDASKAFSNLDENPIWLNKEKGIAIKSVKIKGIANGEPLRFKRDVKGDALKDGNGALVPNDYVSTSNNHHVAIYQDTDGKLQQRIVSFYEATTRALMGLPIVDKEYRQSEGWQFLFSMKQNECFVFPNKDSISNPKDVNLMNPKNFALISPNLYRVQKITDGDYFFRHHLETNVETENKLKGITWLRITSVQNLEGVVKVRINHIGDIVSIGEY

SEQ ID NO: 122 - protein, 1535 aa, unidentified
  REGION 1..1535: note = Description of Unknown: Cas Enzyme sequence
MTKILGLDLGTNSIGWAVIDKENSKIVDAGVRIFTEGVNKDTIGKGDNEISKNTERRMHRQARRLHYRKRLRKAKLLAILIDLEMCPLSNDELRKWKNWDKRLKSTGKVFPNTTDFNNWLKMNPYYLRNKAITKSITRMEFGRILYHFIQRRGFLSSRKGSEDGAIFKGKENMEGIDATKELIKESTLGQKLYEIYPPDKQPFKRIMIDGKDTRIRSRYTLRQMYVLEFEEIWKRQGERLGLPGLMIKIKKTIHLTSTINSRRSKQKLDYLIGRYGKGNVAVSNTVVTVSKSMPLKEFLAGKIEVTDEGINFKSNESLLFWQRPLRSQKQLLGKCTFESRNFFDKAKNEWITVGLSPCAISHPEFELFRAYQFLNNIRYGKTAQPLTAEQKQTVLEIMNKSEAAFDFEKIPKSLKMTFENFNYDDKTKVPVNPSHSKLKKLFTSEQWEKCMHDIWHCFYFFEDAGLLAKKLAETYKLEAATAEKAAKIRLTDGYSNVSLKAIRNILPFLKMGYRYSTAVVLGGVKNAFGNRWEHFREFHEEIITDVVNIAEKTIHKEYELISTLKNYLSDPENLFGFAENDKAFNKLYHHSQAIVKKPTKRRLSEIENLRNPIVQKGLNEMRRLVNQLLNKYDNTEGYGPDFSFDKIHVEMGRELRNSKKRREEMVFKMRDNEKANDEARLRLVEFGLKSSRENITKYRLYREIEQKHGTVVCPYTNRTISIYDLLGMDNRYQIEHIIPFSVSLDDSFGNKTICESNFNRLKGELTPYEFYQKNSDPSLWGARTWEEIEQRAFSLLPYKKSRKFNAKKRDKQADFIARQMNDMRYISKKAAEILSEICNDVRVMPGQLTSELRRLWGLNNILQPAYPLELPGCKVDADQSIPHYLVLDGTGSPVKIVPVLAERPEREAGYILIPGNVSSQGAFTSDRNFRHLKFDVQNVDYPTGKYWAKIKVSEPLAFSRIFAEKPETESNSLVFRGRVVKGYFTHDSIGRRIKTDKPEGSYWVKLLTKNVTYMQPEKSNQPKAGGNQVVLFGTVNNGKFTSYVYQSGVDLPAGKYWGIIDMDFENVTFTKAVIDPDQPRQNEIILTGTVAQNLNFVPECDPEHSINTNLKPGKYYTRVTVQEIEGFYPIENKIPETSKGEKVTDGNIWVNKHTGEIMFDPKKNREDQRHHAIDAITIAMTELGYLQKLSHYFGELKDKERGIGDRPVFNLPWPGFDKEVKMIANNILVSYDRKSEVMTKISKTILKSGRKFNSVGFAARGRLHREFYFGKHPNPILHATDPKKGGVVIETDKQGNIIYYYHIRKAVTSLKNSKHVKKIVDHGIRELIEKRLRDRFNVDTSKPYNIPADFFFDDNKQPALFLHNKNGDPVPVKKVRMRESIGNAVQLKDNLNQWVNPYNNHHVVIYKDVNEALKEQVVSFWEVVERINQGEPLYKLPEDGMAIVSTLQENDMFLLGLSQEQIGKLETNAISNAELSPHLYRVQKISSMYYTFRHHLASTILNDNEEVRIVSMAAWFKSEPIKITITNTGLFKMIK

SEQ ID NO: 123 - protein, 1145 aa, unidentified
  REGION 1..1145: note = Description of Unknown: Cas Enzyme sequence
MAKTLGLDLGTNSIGWALVENGSVIKGIGVRIFPEGVDNLGEGQNEQSKNSARRAFRQVRRQIFRRKLRKRILLKQLAQYNMCPLNDEQIKRWYKTGSFPDTKEMHDWLKENPYTLREKSLKEPITLMQLGRVLFQIAQHRGFLTNSRSAGNDEKEEGAIYTGDEKAGKTGISETEKYIGDATLGNYLSSIYHTENVSYKDGLARIRNRYTTRQMYINEFEKIWECQKQYHKELSDEMKEALGGRKKEGYKKDGILFYQRPLRTQKFLVGKCTFEPGKTKCPASAIPFELFRAYQFVNQIECNGKRLTTPEREIAVELLLSKEKPKFKEIRKRLKKLDANFNYEDDDTCPGTWTISNLSNKKFFDTKWFEFSANEQEDIWHVLHFFEDRDKLKEYAINKWGFDEERATKISKFNLQDGYASLSRKAILNILPFLKIGMPYDVAVTLGGIKNIFGNQWNKLDDKNKDFIITNVYEIVRAGIKGGYIDELKTFLKNEFGLSDLQLGKLYHHSAEINKAEVIAKLPMGQEADKEISTLRNPIVSTALFELRKLVNALIEEYGNIDEIKVELARDLKVSKEKRNKVRLEQKRLERQNDEMVKRLRDYGQVITHENILKLKLWEECQHTCPYTGDEISIQQLFSGDIQIEHILPWSRSLDDSYLNKTLCFSETNVEKGDRTPSEYFSKKGEKAWEDVKNRALTLFYTTKEFPMRYEKFKRFASEKFDEDFVTRQLNDTRYISKQAKSYLEKICDDVKVAPGTMTANLRSKWGLNSIINTESEEKTRDDHRHHAIDALIMACFKQGHLQEISKWNRYNRQYDLKDFPMPWATFRTDAEKAINAMFISHKQTHKVLTSRKYRVKKAGKIHVNTGIAARGQLHEATVYGLRKNKQGETAFHIRKPLQSLTEAMIPKIVDDKVKTLVYLRLVERGLEISSKNGKPITDTKEKEQIFRAAFDKPVYLPNRNGDPVPVRKVRIQEDLTKLERLKEDTNQYVNPKNNHHILIYKTHGGEFKHEPVSFWIAIERKKQGTPVVTLPEDGKEIIATFQKNDLYLLELEKEDFERNINNYNYLSKHLYRVQKVAGADYFLEICFRHHADSRPDKEAKSDYRYIKGFGDGRTGWDTLKPIKVTLSTIGHLKIVSHAQTHTVL

SEQ ID NO: 124 - protein, 1156 aa, unidentified
  REGION 1..1156: note = Description of Unknown: Cas Enzyme sequence
KEALLKLINKRENLGVVKGGIADLTKLREEANCETLGQYFYLLYLKKEKIRTRYTSRDDHYKKEFTKICAVQGLSNEIIAELERAIFYFRPLKSQKGLVGKCTFEKDKARCPVSHPAYEEYRALQFINSIKATDENGKLVFLTDGERKKIWSKFIRKSKSNFDFEDIKKELTPKNEIRYFNYKDNTPVSGCPTIAQLANILGENWKETILNSLPPESKNKCKRIKIGKSKSAQVKYKKSDEIIGQKNIDDVVNDVWHVLFTFDKKEKLQEFAKSKLGLNDVKAKKFSIINLKKDYASLSLKAINKILPYLHQGLIYSYSVFLANIESVVGKEIWNKLENQALIKNALKELIDNYNEIKKREGIVNDLMAQFKEHYNNSDKDYVLDEKDKKDIQEKVIDVYGKRTFDKLSVTNQQEIIDWIETVYLTQLRKYRGEYIKSQRLDEKIADFLKDNFDVSQNSLELLYHPSDIEQFKTPKRAADGNLYLGSPVTGSIKNPMAIRTMHQLRKLVNTLIKEGKIDEETKIHIELARELNDANKRFAIKKWQDERKDKRAEYKEEIKKLYKEECKQDIEPSEDEILKFQLREEQGGICLYTGKPIKICDFIGGNPLFDIEHTIPKSLSYDNSQENLTLCQNAFNREIKKNRIPFELANHKEILSHLTKWEKDIEKYEGLYNSRKKARGLETKEQKDKRIRDKHYFKLHLDYWKGKHKRFTREDVPSGFKNSQLVDTGIITKYSRAYLKSVFPNVYSVKGDAVAEFRKLWGLQQEFSKKERINHIHHCIDAITIACMTKDKYDMLAKLYHADEENRTSEKKEFLRTLKPWATFTEDVKAIEQEVLISHHTPDNMKKQSKKKLKIRGKVKKVNGKPIYQQGDTVRGSLHKDKFYGAIKVKNSHTINYVIRKDITSLKKADIDKIVDDAVKEKIQKAIEDKTLIVTSNDQQANKIIGKIWMNEEKGIEIKKVRVFTPTITAPIFLKSQKDKSIFEHKQNYHVANDSNYLMAIYEGENNKGVVKRSYNILNVLEAGEHLKTSKRNLNIIEPLKQIGKEKNITEIPLKAVIKKGTMVLFYKNNTEEIWDLSKSELNLRLYKIVKFDKLGRVYFRHHSEARPATELKECYKIDFEKVSDQICLQVSAFTALVQEIDFKISSTGEIKRLI

SEQ ID NO: 125 - protein, 1239 aa, unidentified
  REGION 1..1239: note = Description of Unknown: Cas Enzyme sequence
MEQKQKQKRYVLGIDIGVASIGWAFIEEHPEQSKRRIVDMGVRINPLVNEKDDFKKGRAVSLNAKRTQDRGARRNRERGKQRRKKVARLLRENNMYPSEDLMHLRTYANEVYDIDKKDPVNYKLYALRARAAQKGKVITLQELGRVFLHMTQKRGYQSNRKTQGGDSEGTDYLRDIAINDAEIGEGKTIGIKFFEELKEDRDKIKTARKKGEHVPHEMTRTKSDSSNAPKPKEKKDGVKTNRENRVKSRKMYKAEFEQIWKVQKEFHGAVLTDELKKQIGERGIFFQRPLKSQKGKVSNCRFFSGNKVVAKSSPFFQSFRIWQNVNALMLEDDQLRNHPLSVAEKSEIFKQLNTAKEMKGEAVIKKILKLDYHRKYTLNQNKKQGIPINFEKIEGNRYNYELSRIFKKEKELFENIDTQKFFKFDPFVENPEAQISYKLWHVLYSVSEPEQLYRTLQKKDFGFNREQAEKLGGIYLEDDYASLSTRAIKQLLPYLIPGVETETGLVYSDACERIGFKHSDWEDNAERAERKAELKEKMELLAPIDKNELRNPIVEKILNQVLNLVNEIIEDEKFGGKNQPLDEIRIEFVRELRQNREQRAKTQQNIKKSTDRNNSIVEEIKKYNETHHTNIKISRKNIERWKLWEDSGKICIYSGEPIQMADVFSPHYNVEHIVPKALRYDDSLSNKVLAKRKENERKGARTAKDYMLEKDRNGEMSYMQYIALIKNNIKNPARIQKLQTDKDDLKNDKFVERQLKESQYIARELKKRLEKVCTNVTTTTGSITHRLREQWGLNQIMHELFPKDENGKTNKRSDHRHHAIDALVVACTERGIITHLNNLNSQGKDKSRKYKGWDIPLPWPGFTAEAKAKIREILISFKSKRRVASVNINTYTAKKGKGKRKVIGKQRVLTPRGQLHKETVYGRMKQCQKPKVKVSKIFKDNMIENIVHPAEREAVEQHLAQYEGDTKAAIKALKKTPIQIEGRKKPLTEVVVWKWVYTIRKPLVDLNKKQAGEIIAKDIREQVLPKFEEGKDLKKAIHDKPFRSNRGNGTVVKRVKIITDLKDPQALGENENGEPINFVHLRNNHHAAVYRDEKGKYYNDVVSFWEAFLRYKEKWKEKQELPHGIEKEPIDIIKKDNLDEGHEFVVSLSINEMFVKDLDPNAIDFKDSKNHALISKYLYRVQKLANKDYTLRYHLATTLDNKHEEVRITKLSNLENYTKVSINRLGMITDVQKITPTEK

SEQ ID NO: 126 - protein, 1171 aa, unidentified
  REGION 1..1171: note = Description of Unknown: Cas Enzyme sequence
VISLKLYCKYISLKRQNQIIMKKILGLDLGVASIGWAYLEENNEKSRIVRAGVRIVPVADQEDDFRAGRSVSINADRTRYRGMRRNNQRWKGRRDKIVTLLESIDMYDEALINLHKTDLYALRARAVDEKITLSELGRVILHLTQKRGYKSNRKTDASPDETTEYLDKIKENSEALETKGQTIGQYFHEKFKTEPHTKVRQQIFYRHNYQDEFEQIWTRQHKEYPDILTDELKHEIGTRTLFYQRPLKSQKGLVSRCQFEQNMRVAPKSSPYFQAFRIWQNINHLKITDDETRKFDLTLKDKQKLFAFLNKKDSSKKSGILKELGYSSKKFDLNFDEVQGNRTKSRLLKIFKDNDIQDTSILDFDALAKDPENQAAYRLWHLLYSIEEPEHLYKALVEKFGFTREQAIAVSKCKLEKDYGNLSAKAIKKILPHLMNGDKYSDACGRVGYKHSDSMTNEENENRRLAEYIELIKRGDLRNPVVEKILNQLVHLVNEIIADEELGKPDEIRVELARELKMNAKKRQQVNKSYGERKKANDKIKALLQAPPFNFKNVSRNALDRYKLWEETGGISVYTGEPIKLAHLYDKSLYDIEHIIPKARLFDDSFLNKTICESSINKDKDASTAHDYMEKKGEKAYQSYVQRVKQIKSKPKRERLMMAEKDIPEGFIERQKKDSQYIARTAMKMLETVCRKVNSTTGSVTDVLRHQWGLTDMMKELNFEKYKKQERIIWRERPSGERYFVIEDWSKRDDHRHHAMDAIVVACTKQGYIQQLNNLNKTFVNDKTQRVLRTSSRKFALPWTNFRQDARKALSDALISFKSKQRVATKNKNKIKHRDKNREPQAVLTPRGFLHKETVYGKMKRYAENRVALNGRFSLETIENIAHPIEKQAVIQRLAAFDNDPKKAFKGLDKNPIIVEGKRKPLTQVVVWETIYTIKKTLNMLNKKQIEKDILDVRISRLVNERLAEHGGDLKKMVASLEEQPIWVNEAQKICVKSVKLKTDLKDLKPLHENEQGKPIDFVNLRNNHHFAVYEDEKGKFQFEKVSFWEAFERKKNGFSVIKTQHEKGWRFVVSLAINEMIVFPKGNEEIDENFILNPDNYAVVSEHLYRVQKLSSTAKGAPNLSFRHHLATTLKDDNQLIHVQSLGRLYNIYKVSINRLGMITDVQKIAPAKK

SEQ ID NO: 127 - protein, 1180 aa, unidentified
  REGION 1..1180: note = Description of Unknown: Cas Enzyme sequence
MTMKKVLGLDLGVASIGWAYLEENGAKSRIIRTGVRIVPVTDQEDDFKAGRSISINADRTRYRGMRRNNQRWKGKRDKLADILKANQMYPDKELLTFKEIDPYNIGKEYPNRKKRKDGEDANLPVSLKLYHLRARAVDKKIELKELGRVLLHMTQKRGYKSNRKTDASPDETTEYLDKIKENSETLKANDETIGQHFYKKFKTDPHTKVRQKIFYRHDYQDEFEQIWTRQQKEYPDILTDELKHEIGTRTLFYQRPLKSQKGLISRCQFEPGYRVAPKSSPYFQAFRIWQNINNLEITDDELRTFDLTLKDKQKLFAFLNKKDGSKKSGILKELGYSSKKFDLNFDDAQGNRTKSRLLKIFKDNDIQDTSILDFDPFIENPENQPAYRLWHLLYSIEEPEHLYKALIERFSFTREQAIAVSKCKLEKDYGNISAKAIKKILPHLINGDKYSEACERVGYKHSDSLTNEEKENKELLPHLELIKRGDLRNPVVEKILNQLAHLVNEIIDSEELGRPDEIRVELARELKMNAKKRQQVSKSYNDRKKTNQKIREILQAPPFNFKNVSRNALDRYKLWEETGGISVYTGKSIKLTNLYDKSLYDIEHIIPKARLFDDSFLNKTICESHINKDKDASTAHDYMEKKGEKAYQAYVQRVKQIKSKPKRDRLMMAEKDIPEGFIERQKKDSQYIARTAIKMLETVCKNVHSTTGSVTDVLRHQWGLTDMMKELNFEKYKKQERIEWRERPSGERYFVIKDWSKREDHRHHAMDAIVVACTKQGYIQQLNNLNKTFVTEKTQSALRTSARKFAPPWASFRQDARKALSETMISFKSKQRVATKNKNKIKHRDKNRKPQELLTPRGFLHKETVYAKMKRYAEKRVPLNGKFKLETLDIIAHAIEKQAITKRLAEYDNDPKKAFKKLEDNPILVKGKRKPLTEVVVWETIYTIKKPLNALNKKQIEKDILDVGISRLVNERLDEHDGDLKKMIASLEESPIWVNEEKGICVKSVKLKTDLKNLKPLHENEKGKPIDFVNLRNNHHFAVYEDENGKFQFEKVSFWEAFERKKNGFAVIKTQHENGWRFVVSLAINEMIVFPKGNDEIDENFILNPDNYATVSEHLYRVQKLSSSGNAPKLNFRHHLATTLNNPNTEIFIQSLKHLNGIFKVTINRLGMITDVQKITPTEK

SEQ ID NO: 128 - protein, 968 aa, unidentified
  REGION 1..968: note = Description of Unknown: Cas Enzyme sequence
MADQINNSKYSSKLAERIREFNSAFKLGVDLGTKEGGIALVKDNQVLFAKTFLDFHKENLKDRRTHRRNRRSRLAKKRRVAILRSWLLRQKVNGKQLPDPYKIKDTPLFKRTNAKNWIDAVVSKQDTSPEAFVRALTTVFRKRGQSYEETAKQIEDMDYRELKDYINSLGSITEEEFNALSEEIKYRSESSETSSEKNRYAGLVDILKTKLSNKENIKNRREREKELEQIVKAFCEANNLHESDKWISQLKSLLNKPIRKARFANRIVIRCNICDRPTPKKSRPDIRELLYMDVIRNFLRAGRIEPNEEAINYYKTLYKKAAEIRKSIIKKAPLTEEQKKLKKELSKQLKKYINKDYGASAQKKMLEQIKVLMFEKLSGRSRYCIEHLKARANGEDVEAGYHGHVQKRHDMNIAQKNHDKRVINLIEYMLFRSDESLAMELKNKGIMYITIEAPEPDTKKAKKGETTKKDERNIKEKLLDEQFDVEGQRFVCIYTGQELSKDRLNEYEKDHIFPESRDGPSIRDNLVITTKEINKEKGDRTPWEWLHDDPVKWQEFKNRVMRLYSSGKITERKKGILLNEGSEFPMDNPTELARAGARVNNFIADLNEMLKKHGLPEAQTLFEKGKPIVQIVRGSETQRLRRQWNAIDPSFIPLKDRAVSFNHAEDAVIAASMPPTFWRSQIYRYTWHFAPGKERSDFALPDIAPHWNDFIAKRNSPIIAVLGKTKYSWKNSGSIFDDTLYKKYNSRAFFKEIYKQPGSKENDDDKINQPTKPIPIDEHKMDPNYKYYHVKVGNKRFLIKSQKGGSLITIKPKHTLWPRTIQVNPTYGSVVLTKGDKGEIELHYTPISPIMSMYKQGIILDMDERLKRALSDKMRYEGPKKELRVHDIIYLPATKRHGEGYFLVTKLGRSGVKVVPEDKLKIRYTKQNSKDLGSESGKDKAKDKSVEIGLNEEDLLYLYNNPDSIRIK

SEQ ID NO: 129 - protein, 1354 aa, unidentified
  REGION 1..1354: note = Description of Unknown: Cas Enzyme sequence
MIKDYYLGLDMGTNSVGWAATDAEYNLIRKSGKDLWGVREFDEAETSAERRTHRVNRRRLQREQARVGLLKGFFADAIKKVDPNFYQRLENSKYFQEDKDAEVNGPNGIFDDKNYRDADYYKQYPTIFHLRKELIQNANAPYDPRLVFLAILNMYRHRGHFLNVGLSGDGNEITIEEAYSSLLNAVQDYFGLSLPEGKAKDFEKVLSDKNLSRTGKYEKMAEICSTQKTDKIKAAILKCICGLKVDAKQIFTEFESEEKVEIEFSRYTEESSLILNEKLGDDYFEFIEIMHQIYDLGSLVNILKGETYLSYARVEEYAKHHKDIQVLKALYRKYKTKDEYDEMFRSDTKGTYSAYVNSYNTEKYNINGKPVRRNMKERSKDDLYKTIKSALKDIKDKDVDYVLEEMEREAFLPKQLTAGNGVIPNQVHARELKAILKNASKYLGFLNEKDESGLTVAEKISAIFSFQIPYYIGPVSEKSEANGGNGWVIRKEKGMVLPWNIEEKIDSEKTSQRFIERLVNNCTYMSGEKVLPKGSLLFEKYCVLNEINNIRIDGERISVELKQKLYNELFITGKKVTRSKIEKFFVSEGVIKEKEQISGIDNQINNSLSSYGKLMDILGDDIKTDKGKKLAEDIIYLATIYGDARKMLKDSLKKKYGDILSENQIKRISGLRFKDWGSLSKEFLEMKAWDKNTGEEVSLIGELWDSNNNMMELINSPDYTFKAVLQEKQTKLTKVLSDFTVEDLQEYYFSAPVKRMIWQTLGIIKELEKILGCAPKRIFIEMTRTDEEKGDKGRKDSRAKTLLELYKNLKDESRDWKKEIEEADKDGKLKIKKLYLYYIQNGRCMYTGEPIDLDDLFNDNLYDIDHIYPRHYVKDDNLGNNMVLVKKTCNAYKSDDYPLPAMKPDVYELWKRLFRTGFINEEKYKRLTGKQPFTDEQKAGFIARQLVETGQGTKGVADLLKQLLPDTTIVYSKGRNVSDFRNQYKLLKSRIVNDFHHAQDAYLNIVVGNVYYVKFTQDPLNYMRKLEKEKKAFSYHLGKMFEKNITIGNENAWVASEKNGESGTIVTVKKVMARNTPMITRLNFENHGRFSKETLYSARVAKKDNYVPLKMNDAKMSDVTKYGGFTNVYGAYFFLVEHEEKGKKVKTLETVPVYLAEKIARGNGALVKYCIEDLGLVNPRICLEKIKIQSLLKIDGFWYHLSGKTGNRIVLRNAVSLCLSQSWINYIHAIEKYNESKRIPDEIKREKNIELIETLAEKHIEGIYKKRQNPISELIKNAKEVIESLSLVEQCNLIIELLKLSCIGLTSADLRCIKGAEKSGVMLFSKGISKANEFKIINQSITGFYENEIDLLKL

SEQ ID NO: 130 - protein, 361 aa, unidentified
  REGION 1..361: note = Description of Unknown: Cas Enzyme sequence
  MOD_RES 200..319: note = Any amino acid
MKNILGLDLGTTSVGWALIKVDDNNNPIDIQDMGVRIVPLAENEGDKFTKGQDITINADRTRARGQRRNYDRFQIRRQALTEKLRSLNMLPDEHLIKLPIMNLWQLRANAVTQKISLNELGRILYHLNQKRGYKHSRTDTKDSKQRAYVKEINNRYGELIKSGMTIGQFFAKKLSETAVTVEGKTFYVYRIKDKIFPRKXXXXXXXXXXXXXXXXXXXXXXXXXXXXXXXXXXXXXXXXXXXXXXXXXXXXXXXXXXXXXXXXXXXXXXXXXXXXXXXXXXXXXXXXXXXXXXXXXXXXXXXXXXXXXXXXXXXXXXXXNVVFTMPKVTSNEINRVRLSMMVQKWFLAHRLYFKSLRTGNQ

SEQ ID NO: 131 - protein, 1124 aa, unidentified
  REGION 1..1124: note = Description of Unknown: Cas Enzyme sequence
  MOD_RES 486..1113: note = Any amino acid
LVDEETGEVLVRIKSTYQEEPLYRLWHIIYSIKNDDERFHAITKFLREFCIEDDSIANALKDLDFVTPGYANLSAKAISKILPYMMEGIDYSDSCAYVGYNHSDSITKEENKRRELLDQIPALKKNELRQPTVEKILNQTINIFNQINANLKKNGERIDEVRIELARELKQSKDERKETENGIRKQQKMNDEYANILKEEGIRPTRNRVLKYRLWRESNETCFYCERPINFNEFLKFSDIEREHIIPKKLIFDDSFANQVCSCRKCNKEKGGRTALDYMQTTPNLQMYLDKVDKMFQEHKISGKKHLHLLASYEDYLIRKKEGKETKDDIKIWETPIERQLRLSQYISRKAQELLRTACRDVIATSGSITDLIRHTWGYDTILHELNFDCYKKAGLTEFIKDEKTGKNREVIQDWTKRLDHRHHAIDALAVACTSRSIIQRINTLHASREDIRKEIKSTRKEWQENDLLQQWIKEKIPFDRKYVLXXXXXXXXXXXXXXXXXXXXXXXXXXXXXXXXXXXXXXXXXXXXXXXXXXXXXXXXXXXXXXXXXXXXXXXXXXXXXXXXXXXXXXXXXXXXXXXXXXXXXXXXXXXXXXXXXXXXXXXXXXXXXXXXXXXXXXXXXXXXXXXXXXXXXXXXXXXXXXXXXXXXXXXXXXXXXXXXXXXXXXXXXXXXXXXXXXXXXXXXXXXXXXXXXXXXXXXXXXXXXXXXXXXXXXXXXXXXXXXXXXXXXXXXXXXXXXXXXXXXXXXXXXXXXXXXXXXXXXXXXXXXXXXXXXXXXXXXXXXXXXXXXXXXXXXXXXXXXXXXXXXXXXXXXXXXXXXXXXXXXXXXXXXXXXXXXXXXXXXXXXXXXXXXXXXXXXXXXXXXXXXXXXXXXXXXXXXXXXXXXXXXXXXXXXXXXXXXXXXXXXXXXXXXXXXXXXXXXXXXXXXXXXXXXXXXXXXXXXXXXXXXXXXXXXXXXXXXXXXXXXXXXXXXXXXXXXXXXXXXXXXXXXXXXXXXXXXXXXXXXXXXXXXXXXXXXXXXXXXXXXXXXXXXXXXXXXXXXXXXXXXXXXXXXXXXXXXXXXXXXXXXXXXXXXXXXXXXXXXXXXXXXXXXXXXXXXXXXXXXXXXXXXXXDEIKLSENRDS

SEQ ID NO: 132 - protein, 1362 aa, unidentified
  REGION 1..1362: note = Description of Unknown: Cas Enzyme sequence
MSKVIDFDKANNKSKSRDIRKNTEYFIGLDIGTSSVGWAVTNTKYKVIKFNGKKMWGSRLFAEASTAEERRVHRTNRRRLQRRVDRINLLEEIFSEEMSKVDPEFFIRLKESKFHLEDKVIDEKNIIFKEKEDGDKKFYEKYPTIYHLRHALIEGCDDIDIRELYMAVHHIIKYRGHFLFKGDISDSGSSINDKIVEIIDFMSSVADMKRLEYNDNLINEIRNIVSNRDKTINDKKKDINKVFGGNDYKAYKSIFALSVGAKVKPYDIFLEEEYKDLDDIKGIVFKNTEYEEVRDTYEQAFEDRIILIDAAKSLYDMIILLSIKPEGKGLSENKVEIYNKHHEDLEILKEVLRKDKDLYNRVLREDKDKGTNYINYIKKSKYGKGCSREDFYKFLKKALGEMESNEKIEYILTEIDLERFLSLQRVKENSIIPYQAHRDELKKILTNASTKFEFLNYESEGYSNIEKIIKLMEFRIPYYVGPLNNHHSVENKSNSGFSWVVRKEKGRVKPWNFEKLVDKRASSMRFKENLTNKCTYLTRENVLPKESLLYSEYCLLNELNNIMYDGKKLSLEVKNDLIEKVYKKEKKKLTKKGIKDFLKHNNYADGKGEVTGIDIDIKNDLKSYRDMVRIFGSDFNHKMAEDIILWVTVFGESKDILEAEIKESYKDMVNDKQLKMIKNLRYKDWGKFSRRFLTEIRSDVLIDQSTGQGQSIIEAMRTRDHILMELLRNEYDFAKKVEDINREKQKNISEISHDLLDDLYCSPAVKRSLWQTICIVEEIKKIMGHEPKKIFVEVTRTNKAEKRRTDSRKKRLLELYKNIKDDSRNWVDEIEKTEDSKFNSKKLYLYYTQMGKCMYTDTIIDIETLFTDMYDIDHIFPRSKTKDNSFENLVLVTRESNGKKGDNYPIEPSVQRDKLDLWRYLYDKKLIGDIKFERLTRTYGFTDDEMSGFIARQLVETSQASKAAAEMLTMINKKSEVIYVKAENVSEFRHDNEFIKVREINDHHHAKDAYLNIVVGNVYNEKFTKNPYNFIKDGGRKYSLNKVFDFAFSKGGKTIWDPLTSMDTVKKMMKSNDVRVTKRSFVKKGALYKETICKASVTKNGSYFPLKMSDERLLDLKKYGGYSSIRIAFFTIISYDEISKKNKKNIVKVVPIPIYISESTESFNDIEKYIKHNIIEDSKKRRENFKVIYKKLLINTVIDVNGFRYYVTGSKPDEIHIKSATQLLLEEEITMLIGKIVKFCNSNYLRKNSKYITEENTLKVYEYLIKKLDSSYYRNKRFSKNVCKLKEQTTKDNFKKLSLEEQCSVLLEISNILVDANEYNLNKLGFSMNKSTISTNITTNESFKVINQSITGLFENEIDILG

SEQ ID NO: 133 - protein, 1169 aa, unidentified
  REGION 1..1169: note = Description of Unknown: Cas Enzyme sequence
MTMIQDNSIITLGLDIGKASIGFALIDRANNYKIITDGIRIFDAPENPKDSTSLNLKRGEYRRARNSQKNEFHRTKQVVKTLLKYKLLDAKVIQAYNKSPKVKNCPKSKKKRLFYIKTAEYLFYKKSSANDVLRLRVKALEQKLSHIEFARLLYSMNKHRGVTYDDIVEVKNAKAKGNKLSDDQKKLRDGFEKYNKEFGIHKEAYKTVGEYLYKNYKNKFRNTKKDYLFSIPQDDLKEEIGIVFEKQRELGNSFATKEFEREYLEWFLWEEQSPDYDILVAPCFYNKDEKSAHKNHFVSQLYISLEKLYNLRFRNIKDKEYQELSLEQKRQILDKSFSKKSGISYTDIKKILNFKDIEFKGVVDEKAIVVKFDIFYSINKILKLDFNPLEEIKQDNNFFDTKYKKVIEILAYKPRDTDKRKELEALSLSSEEIEELLNIKIRGHLSYSYDVVKKLCSYMLEGLTPHKAKEEIENEYGTPYIEKSSYLPPILDTDFPLTNNHTVIRALSQVRYVVNDILKYYRKQTGNSNWTFDEVIIELSREMNTKKQQSAIQKEINNNEKTNKEAKEFCEKYNIYNPTSDQILKAKLWLLQGGIDPYIWIKNDENLNVEQYTLGRLEASKLFDEDYCQIEHTLPIRRSLDNSQSNKTLVLTRTNQNKGNQTPYEYLNEEEFKRFEAYLKEKKVYEKYGSARVRKLLTKDFKGVDGFVQKDINNTQIISKYAGLYIDKYLRFWNNPNFKGKRRVYANNGKITSILRNAWAIGKKNRDNHLHHGEDAILIACSTPSLVKNISTFIGLQTELTSSNITKERFEKILKGHNSLKTYIIKELDKQNISFDDKNITSYIFKIIAKKNYPYDGFIEDFKKAIQNAPVTHFVKRKTNGAIHDETISSMTKAKSGIEIRDGLARNGEYVRYDVFEIKNSKGKITYNFVTITAQHYGKSTEELPTPILKPNESATFMFSVYKNDLLSYNLKDSSKIVGNFVKVDSSIILKEPKNLENNLFKKQLKGFNINILSSDDISNFEQLRNEILELSIQKTSKQKKTSNWKLTKLCNFTKLTTLEAQKNRIVEIIEAIKKLLPNINFIFYMGKATSNQTQSLKSILIDNKLIENNMKENINLYNTIFITFSEIGYLEALRTDGKTDIKDLIKIKVNCMGEIIEKITYERREPLL

SEQ ID NO: 134 - protein, 1075 aa, unidentified
  REGION 1..1075: note = Description of Unknown: Cas Enzyme sequence
MIRFAFDIGTNSIGWAVMEPNENDTKVFMLDMGVRIFSDGRESSTSGQPGEPLNQTRRQKRMMRRQLERRKRRKLAMYKFLKSGGYVPSDSESHTLWVQLDPYKLRAEALTRPLNALEIGRVMMQLAARRGFKSNRKTDSSKEASEYKQKINAFERELGNRTLGQYLWEKKQAIEAKFKTRTGSGPATVTETIRFRPGTPFYPNRAMYEHEFAAIRNAQSAVHPQFDWDRAWRIIFFQRPLKRPERGFCTFYENEYRAYLAQPSSQMFKALQDINNLEYLADRPTKLTAAQKEILFEQLQKKGSLSFDRIRSFLGLPASAIFNLEKGSKDKLEGMATDLAFSKHIKNWFELNIAERDALVETFIVEDDEDRIVAAFQKYGIEPDETRKALAAIDLKVGVGSLSAKFMRECSALMRSEWIRYDEAVDKMGLKHYAPRTSEVFEKLPYYGQVLKYATIPASSSSRHANAAELSDEMRYGKIANPTVHIALNQLRKLCNVLIDRYGKPDEIVVEVATELKLGREKIRKIIQEQKKNREKNEEIKKEIRALIKNPDGKVARTYILKYRLWEELGEHSAGRYCIYCGKVISAHQLFNGDAEIEHILPFSRTLRNNRNNLTVAHRSCNAFKGNRTPYEAFGSNPNGFVWEDIEARVKDIFRYNFAKKNAFLKKDLEEELLENSEFLESQLSDTAYIARATREYLSCLYPSQNGLLPSAVRVVPGRLTSILREKWGLNSILSPNREIKNRADHRHHAIDALVIGLTTRAILQRFATANARGNAERIMRPPFPADRAWIERRLQNMLISFKPDHGIEGALFKETAHGFQYDPANPDKEQTEFFQKIPLAKLSWANIKKEKKQGIFSAKTRAIIKDFLAQKGLTPDNSDNTKLSLALQELSSKTGIKTVKIRAKNVEGFIPFLPGKNGRKGHKAYPQGDMLFVDIWRIPEKKGGYTFKGVYVSRAQAHAQGGSIKTERPNPAAKRIMRLYKNDILALQFADRIVYCKVAGFSGTDDRIDLRPIYASGDIKTWIEQTNYKYRDSLWKPKISDHNYFSINSLVNKNKGLQLKHVNISIDGRLLCRK

SEQ ID NO: 135 - protein, 1055 aa, unidentified
  REGION 1..1055: note = Description of Unknown: Cas Enzyme sequence
MLRFAFDMGTNSIGWAVIDANQDDSEAKILDMGVRIFGDGRQPGRKGEPGDPLNQTRRMKRAQRRQLERRKRRKQAMYRFLKSSEYLPLDKDDYEKWRLLDPYQLRAEAINRELNRYELSRVMMNLSTRRGFKSNRKTDAKSKDVSIYKDKIKAFAIELGDKTLGQYLYEKRQTDPNALIRFRPGTQFYPDRSMYEKEFQAIRDKQSIYHPAFDWDRAYRIIFFQRPIRRPQRGNCTFYPDEARAFFVQPSTQLFKALQDINNLSYLTDREHMLEPSQKETILEAIRVKKKLSFSQIRNMLNLPNDAVFNLEKGTKDVLEGLATDIEFSKKLGSRWKELNLETRDNLVELFIVEDDDQKIKEGFAQYGFSEQTIHEAINTIDLRAGVSSLSTRFMRDCIELMQSKWIRYDEAVTQLGLRHYRPFEQDELLEKLPYYGKVLPYMTFSSRPINRSNIENQDETKNDEEKYGRISNPTVHIALNQLRKLCNILLDLFGKPEQIIVETATDLKNSRKKIAQINAKQRENREKNTRIRGEIASIIKCSPDEIGSSDILKYQLWEELGNNSASRNCIYCGNPISAHQLFNGEVEIEHILPFSRTLKNNRNNLTVAHRWCNNIKGDRTPYEAFGSSPNGYTWAEIEARVSDLFRSNFQKRANFLKEDLEQNLSEESSFLESQLSDTAFITRAVKQYLSSIIVNSNIITTPGQLTSILRSKWGLNGILSQYDDKNRCDHRHHAIDALVISLTTRRMLQRFASANARNYAYKIMPPPFPVDRQDLKERLLAMLISYKPDHGLEGPLFDESAYGYNLNEKPPQEFFIRKPLASLTWKIIQDEDVLSKSIRKKISEFLQEQGLSKANSDDKALQRAMLVFMDQNHLHPRSVKIRAKNAEGYMLLEPGKNGRTGHKAYPKKDVLCVDIWQIPVGNKKYKFVGDFKKRADVHSMGGIIEKNRPHPAAKFLMRLYKNDIIRIQNGQIYTYALVAGLPASNKKLDLRPIYASSDIKSWLQYTRKEFCGSFWRPIETTQNFESINKLFGTQGNNISHVNITIDGKLSCRKI

SEQ ID NO: 136 - protein, 1091 aa, unidentified
  REGION 1..1091: note = Description of Unknown: Cas Enzyme sequence
MYRLALDLGTNSIGWTALELKTDSKAKSPALTGKILDIGVRIYTDGREAQKGTPLNEARRNARQMRRQRDRKIRRKKAMLKFLVNNKLMPFDREEQQVIARLDPYALRAAALERKLKPFELGRILMQFSIRRGFKSGRKGQQSENTSEREGMLGGIQYLESELQGLTLGQWLLEQRVAGKPVRFKARLEKSKATYPFFPSREMYEHEFAGIRNKQEKYFKEINWDRLHWLIFFQRPLKRPERGRCQFYTEEDRGYRAFVSAHRFRILQEINNLRYYNEKNIEEKIPVELKLKLFEALNSQKSLTFNKIRKLLGKNYTGSFNLEDSKRSELKGNETSVDFRKPEFFGQLWDELEIRKQDEIIEELMIEDDEKVISDMLKILGLSNEQIKKISGHHFPVGTTMLSSRFMIECSDIMLKEWLSPYKAIEKMGLHHSKGEKREIGRSLPYYGKILVGQVSGAKGENYEGKKGEHFYSIEEKRYGRIANPTVHIAMNQLRKLVNALIRRYGNPDQIVIEVNRELKQSKARKDEILREQAKNQKANERIRNELTELGLLKISSEDIKKYKLWEELASEGIARRCPYCGKTISAKQLITGTVEIDHILPYSRTLLNSRDNLTVAHRECNQKKKDYSPFEAFGNNPKGFDWDKIIELTAKLPFNKRRKFYPDAMKHFRDEEGGFIDRQITDTAYLSKAGKDYLSAICDSKAIWVSTGRLTAMLRGFWGFNTLLNRGHDTWFKNRSDHRHHALDALVIGLCDRRIIAEAARINSGRLYGEINAPPCPIKRQDIEERLKSIIVSYKVDRGKEGKLYAETALAKHSYLEQIGPADLEEKEINRIVPKTIQEDITLLVKKESFRKAKVLIKSKYKYLRVFRDKWVTRAPLTSLSERDLTNISDPVIRTEILEFVESHPPKSGQKLQDVLAQFSEEKKIYSIRFFHKDQVPVHIEDNFNKAYMPSDYYKVDIWRIPQQNGKYKYEGVFISRPEAMRQLSRRHEHPAAKLIVSLCKNDIIHLSKKTDQEFCRIAGFSTTQNKIDIRPLYASDTIAAWKKDTHINLCSSFWPSEIEGQYFKSINALFNEFEIKLVKITVDGRLIYR

SEQ ID NO: 137 - protein, 1319 aa, unidentified
  REGION 1..1319: note = Description of Unknown: Cas Enzyme sequence
RVLFTINKKRGYKSSRKAKTEDEGKAIDGMSIARQLYDENLTPGQWVFASMIKGHKHIPDFYRSDLLNEFDRIWHVQQKFYPEIFSDEFREEIRGKGQRATSSAFWNKFNFNTADIKDADDSLKNQYTYKFSTRELKKLQAYKWRSDAAQVQLSREEAAYVIADINNNIYNSSGYLGAISDRSKELYFNKETVGQYLYRQLKADHHTKLKNQVFYRQDYLDEFEIIWEQQARHHPQLTPQLKSKIRDTVIFYQRKLKSQKGLISFCEFEKKVVEIVIDGKKIKKTIGARVAPRSSPIFQEFKIWQNLSHLEVRRKGISKSKKSRAGLDESSGDKLMWMDFSQDVREALFEELNLKGNLKAKTILNLLDLNDEEWEINFTAIEGNHTNKALYNAYLDILDLEGYDVKELLHVKSNKDEVELDDLKVPARQIKDMVRDIFGALNINTSILEFNGEMDGGDFERQASYRLWHMLYSYEGDDSKTGNETLYRLLQEKFGFALEHAKILANVAFLEDYGSLSTKALRKIFPHIKELRYSDACGMAGYRHSENSLTREELDKRTLKPRLEPLRKNSLRQPVVEKILNQMVNVVNTLIDKENDKLEAEGKPRDFHFDEIRIELARELKKNADERAEMTTNINNAKANHDKIVKILQKEFGLINPSRNDIIRYKLFEELKNNGYKDLYSNKEIPRELLFSSAIDIEHIIPKSRLFDDSFSNKTLAFRDENLKKGEQTAYDYIESEKGEDSLNQFLLRVENMYKLGLKDREEGISKAKYQKLLKRESEIGDGFIERDLRETQYVAKKAKEMLFEITRSVISTTGSITDRLREDWGLINIMKEINLPKYRALGLTEVQERRTGQKIEVISDWTKRNDHRHHAMDALTIAFTRPSHIQYLNYLNARKNEQNKHHANIMAIEKKELEPRNGTERSGNKQFREPIPNFRHVAREHIEGILISHKSKNKVVTRNKNKVAGNSVVQIALTPRGQLHKETVYGRYRYYDNKEEAVGARMDRETILKVCKPAFREALLKRLEENDGDAKKAFSGKNAPAKNPIYINAEKTEKVPDKVLVSRLQEDYSIRKDVTPDNFKDDKLIEKILDVGIKRIMRNRLAEYGGDPKKAFSDLESNPIWLNKEKGIAIKRVTISGVNNAESLHTKKDHHGRPILDTEGNEIPVDFVSTGNNHHVAIYKDENGNLQEKVVSFYEAVSRVNQGLPAIDKEYNHDLGWSFLFTMKQNEMFVFPNEKTGFDPADIDLMDPANKKAITQNLYRVQKIATKNYMFRHHLETTVEEIAELKGITYINLRNTGALSGIQKVRLNHLGDIIALGE

SEQ ID NO: 138 - protein, 1036 aa, unidentified
  REGION 1..1036: note = Description of Unknown: Cas Enzyme sequence
MSIILGLDLGPNSIGWALIDSEQEKIISSGVRIFQEGVNNLNKGKEESKNATRRTKREIRVQNRRRRIRRQKLIPFLKELNLMPNDNETEFFKINPYEIRKKALYSQLSNFELGRVFFHLNQRRGFRSNRKTEVLAETAKDIEKEKETGKVKTSISNLEKEIKDGGFITLGEYLASLNPHEKRIRDRYTNRDMYLNEFDIIWEKQSKYYPDILTQENKSILRDQIIFYQRPLKSQRNKVGKCLFEPNHRRAAKSNPIFQEFRMLQQINSLTIYGGNRIEEHEQKLTFEEREKLIEYLSENYSINLDKPKTLIEVLGLDKRIKYRINLESYGKVDGLKTYCSIKKALGKELFSKYNDLELYKMWDVLYFATDREWLKTHAIKKWHFNEETAEKFSRINLEDKFGNLSTKAMRKMLPYLREGKLYHEAAELAGYKHSFWDKEVEIMDLLPEPEQVANPIVMQTLHQVKKVVNELIETYKKPDIIRVELGRDMKQPLKKRLEIEKINNEIRKKNNTIRDILIKDFNIERPTRDDIIKYKLWEECKFTCPYTGRSISKEQLFDSKEFEVEHIIPYSHSLDNSFMNLTLCEKRANEEKGNMTPYEYFLTKNIPESVIKQRVKHFPQPKARKFFAKEIEIDFINRQLNDTRYASKLAKDYLKHITPEVTCSTGSSTALLRYYWGLNSILSKSKGDNETDEIKNREDHRHHAIDAIVIACTDHSKLQRLSTYHGTDSTRYKDMKEDEKLKKHFPYPWKDFRNDIVNTIQNIIVSHRLNIRVSGALHEEILYGKLKDAFGNERMSESGYPVFAVRKTLKRLTQAEIHKIIDPEVKATIIERLEELGIDVSEKKFNIPKNAFAEPIYLTGKKTGIKTQIKSVRVERVTNAAFNIRGYNLWVEPGNNHHIIIFSENGKVCGKVVTLFEAYQRRSKKLPIIDKNLGPDKEFLYSLRINDLVIMGDIPNGFETLDQSTYHLIFDKVYRVRSIDRNNIIDFRKHFISILETLDKNGKKVYPGRLFAVPSTLNCKKIVISPIGIIEFSND

SEQ ID NO: 139 - protein, 1123 aa, unidentified
  REGION 1..1123: note = Description of Unknown: Cas Enzyme sequence
MGNILGLDIGTNSIGWAIVNVEKKTIYTNVHVFPQGVTEKTGVPRNIQRRAARGARRNNFRYKQRRSRLKNLLSQAKMLPQSTEKHPYTVYELRAKALDKPIQLEELGRVLLHLNQRRGFQSNRKEQANADKDKEKELGKVKEGIKELESLLQEKNSRTVGELYWQLLQQRKHDFTADQAVRNRFPTEKRFTSRELLKAEFEKIWEKQRQFYPQILTDELKKEIGEKTIFYQRKIKTQKGTIARCPFEPNSSCIPKAAIEFQEFRIWQSLANIKVSIPDKNRISDELTLEEKQKIAYELDRLTNKDMRLTFKQIKTLFKKEWGKEVYFNYRDDDHIKGNTTAIKLRRVLGEKYDEIYQQYNEAFEYEEKRKTLFYKMWHALLYADNNKWLKKYAIEKLGFAEDQAEEYAAQNLEEGNGSLSYKAIRPILAYLKIGENYTNACNLAGYDHALLPDKHRKLLPKIDKLKNNELRNPTVQRALTETIKLVNRLLKEYTIDAIYVETARELKKTKEKRDEIEKELKAKTENRRKLAAFLSEKYQLLFGVRREFDLNNKSDMEDIRKYELWLELAPADKELHELGLKKGFAGFNFIQKASKEDLEKYVLWREAQRISIYTGKVIPLQRLFSKDYEIEHILPYSRSFDDSIKNKTICEAWFNADKRNLTPYEYFQNKSKEEWIAFKHRIQILPKEKKERLLRQKEIDGFRNSQMTDTAYITREITKRLQTVCRDVQTTQGAVTSMLRGYWGLNSLLNTTGNNEKDRNDHRHHALDAIVIACTNRAKVQLINWANAKDIDWRKQRKKIDLPWSNFRYDVQQKLHAILVSYRQDNGILIKRRAVIKTKNGKKKTGIQIGIRGELHEATYYGKHILPKGAPPAKDKKTKTAYFVRKKLSSLTENEVKQIVDKVVRETVQKAIEEKGFKKALAEPIYMPDTRNKGWQMPIKKVRISVNKDDDTMIPLYKKEADQDYPRNLYVPSGSNYIMGIYQDPRSGEKEVYIASFYEAVQRKIKKLPVLEPMLGNKKLVLTARQGDMFVIYENHPDEIEKHINWDCIDHQARRFLFDRLYRVRKMDKSSGRLYLAQHHLAKVDLDRDPFPLKIYPNGKNFNGIPVEIDILGNIKRKKAYN

SEQ ID NO: 140 - protein, 1041 aa, unidentified
  REGION 1..1041: note = Description of Unknown: Cas Enzyme sequence
MKKYRLGIDLGATSLGWCMIELNEDNSPKDLIELGVRIFPDGRDAKTNEPLNVKRREHRSMRRNRDRYLQRRAYLMDILVKYGFMPENEKERKQLEHLDPYFLRVKALDKKITLYEVGRIIFHLNQRRGFKSNRKLDNAEKDSSRMKEAIKELKQKFKEDGARTLGEYLFNLNITKNREQNRRIPIRIRDHGKEYNLYTERSMYENEFDMIWDKQSEYHSELMEQKKEHLKQIIFFQRPLKPQPKGKCRFELDQPRCPVAFPVYQQFRIYQEVNNLILLDFDRNEHELTSAQREMITQILLKQKSATFKSLRKKLGKEFAGDYVFNLESEKRKDLKGDETSFIMRKADYFDEKWDSFTELEKDEVITRLINEDNDLEIENTLVSWLCDKFKITKENAEKIKDIRLPQGIGSVSKKAINKILPFLKEGTRLYVSQIKAGYTVGRTGEIFDEGNLPYYGKIIPHAVAFGTDDPNDIDEIQYGKIANPTVHIALNQMRKFINALTKKCGAPSQIVVELARELKLGQKRLREIENEQSINRKHNEEIADEIKKLGIENTYQNRLKYKLWEDLDSDPAKRCCPYTGRQIPLNAVKGLFSNRFEIEHILPKSKTFDDRPANKTVSYYQANRFKGERSPFDAFGENPENYNWKKILDRGEKLPRNKRWRFYPDAMKNFQDQGELISRMLTDTQYMSRVAKEYMSYVCGDKNVWAIPGKLTAKFRAKWGLNELLSENKEKNRADNRHHAVDAFVVACTDRAMLQKVARATERTRERFIEEMPSPFYDFSFQDTSEKVDKIVVSYKPDHGNAKAAILRDQTVGQLHDETAYGFVSEDEEKGKITLSIRKPLTSLDSIKNIREIASTKIRNELIKLTDAIPQNEIKAILSQYSEKTGIKRAKIHVEKDAKTVIAIRNKKGEVYKYYLSGSNYCADIYCPSKGKKADKWQVDIIPMFKAHQSNFEPEWHKQNPTAKKVMRLFINDYVAFDEDGERKIRRVRKMTGNIVYLRELNIALKEKGKEDIGEQFRPSTFQAKNARKIGIDILGNVCD

SEQ ID NO: 141 - protein, 1209 aa, unidentified
  REGION 1..1209: note = Description of Unknown: Cas Enzyme sequence
MVQNQIVFGLDLGTNSVGWAVVDLEQNIVLDAGARIFSAGVAIDPKTKKESSLNEQRRLSRQMRRQHFRRRLRKHRVLRRLSEMGLAPTDQAELQRWIADDPYALRAKALDHELSRWELGRALFHLTQRRGFLSNRKGAAKEDGTIFEGKKGSSIIPINLTQESMEGFRTLGEYLHSISFKPGEASDASRPRLRNRYTLRSMYLTEFEAIWERQQEFHPELGPDIKRELGDPEKGILFFQRPLRSQKSLIGKCTFERGRAKDPVLDKWVESGKPRCPISHPDFERFRTWQFINSLRAGGEKLSHTDRTTLFEEFLRKDGELTIKDLAKKLKHLSDKKFNYEDNDKRPGCKTIARLSGLMGQQAWDAGGPEKQHELWHAFFSIQNEEQLEKYILGKGGLSSLRWKEFCYPKKTKKDDGKPQRKRTLQLEDGYANLSLKAIRNILPFLEEGYEYDHAVMMGGIRNAFGAKAWDALSDEQQKDLKDACFRFRKEVPDRETGEIRKPQEGEVIRELRDYLRTSYKLSHKAVGKLYHHSQHQRASGTAAELPQVPNLRNPIVQKALGQARKVVGELVKRYGRPAQINVELAREIKVSAKVREKMELENRDREKLNAEARKVVREYGLAPSRENIQKYLLFKEIDRKSEGSIVTPYSMDGKAINLDKLFSRDSSIQIEHIVPRSVSLDDSLANKTLCEANINRAKGNKTPFEFYTSIGADWKSIQKRAFQLLPYPKAKRFVSETKLGLDDFISRQLNDTRYISKAAAAFLKEICPKVQVSSGGVTARLRKIWGLEAILGGNILLEEPWNEAEEGEYLAWVSQGKVLELIAVDDPDYKKKNEQFLKQGAALRGYVKNQRFIPEKNRDDHRHHAVDAIAVACVKPQHVQLLAKISSHDDSSQPKPEFKALDPWEGFFHQAKERVQKILVSHEIRDKVFQKDRKKVRKDGKVILSEGVSARGQLHLESVYGKRSVFGEEAFHLRKPLESITKAAQVNKIVDPAIRRVVEQAILRAHPAIKLDDKYDVPKDAFFATDPKTGAKRPKVFLRSQNGIDIPILKVRIKENLGNARPVNPKATQWVNPKNNHHAAIYKGTDDKLIDEVVSFWDATQRMRDGKPAILKVKPDGSRLVAAFQANEMFLLGVPDREIEQVLESPVLLAKHLYRVQKMSDSYYVFRLHKAATIENDSEMVRIQSMKAWQEHNPVKLRMDVLGKLVRD

SEQ ID NO: 142 - protein, 1095 aa, unidentified
  REGION 1..1095: note = Description of Unknown: Cas Enzyme sequence
LVVFLLIEEVTMWRLALDMGTSSIGWSALDIENPENVKILDMGVRIFPDGREPKTGTPLNEARRDARQMRRQRDRKIRRKKTMLNFLVNNGLMPKEREEQQTVVQLDPYTLRAAALERKLIPFELGRIMMQFSIRRGFKSGRKEQQAENTAEREGMLGGIQSLETELRGLTLGQWLCKQREAGNSVRFKAKMEKTKVIYSFYPSRDMYEIEFAAIRKKQEKYYKEINWDRLHWLIFFQRPLKRPERGRCQFYTEEERGYRAFPSAHRFRILQDINNLRYYNEDNIEEIIPVELKLKLFEALNAQKSLSFDKIRKLLGENYTGSFNLEDNKRDKLKGNETSVEFRKLEFFDTIWDKLDFKKQDEIIEKLMIEDDESVIYDFLKPFGLSEKQIQKISGYNLPVGTTMLSSHFLIDCSEIMLKEWLPYSEAVKKMGLHHSKKDKREMQHSLPYYGKVLTGLVSGAKGENYKGNDEERYGRIANPTVHIALNQLRKLVNALIRRFGNPDQIIMEVARELKLSKTKKDELFREQTKNQKENERIEKELKDLGLLKISSEDKKKYKLWEELAVEGIARLCPYCGKTISAKQLISGDVEIEHILPYSRTLLNSRDNLTVAHRKCNQAKKNQSPFEAFGNNPKGFDWNRIMELAAKLPFNKRRKFYPDAMVRFHEDEGGFIDRQITDTAYLSKASKDYLSAICDSNAIWVSPGRLTAMLRGLWGFNTLLNRGHDTWFKNRSDHRHHALDALVIGLCNRHLIAEAARINSSRGYSEIDAPPCPVKRNDIEEQLKSIIVSYKQDHGKEGKLYAETALAKHSYVEQINPEDLEEKEINRIVPKKIQVDIALLVQKEGFRKAKTLIQKKYKHINIFRDKWVTRAPLESLSERDIPNIADPVIREQIQKFVKSHPVQIGQKLQDVLVRFSKKTGIYSLRYFPKDQIPVSINSCNNKAYMPGDYYRVDIWRIPQPKGKYKYDGVFVSRPEAMRQQLHGDDAVSLQKPHPAAKFIISLCKNDIIVLSNETEQELCRIAGFSTTQNKIDIRPLYASDTIAVWKKDTNINFCSAFWPSNIEGQYYKSINVLFGEYKIKLVKITVDGRQIYRS

SEQ ID NO: 143 - protein, 1084 aa, unidentified
  REGION 1..1084: note = Description of Unknown: Cas Enzyme sequence
MWRLALDMGTNSIGWSALEIEKSENVKILDMGVRIFSDGREPKTGTPLNEARRNARQMRRQRDRKIRRKRAMLGFLINNKLMPKEREEQQTIAQLDPYTLRAAALERKLKPFELGRIMMQFSVRRGFKSGRKEQQTENTAEREGMLGGIQSLETELRGLTLGQWLCKQRENGNSVRFKAKMEKTKIIYSFYPSREMYETEFTAIRKKQEKYYKEINWDRLHWLIFFQRPLKRPERGRCQFYTEEERGYRAFPSAHRFRILQEINNLRYYNEENIEEIIPSELKLKLFEALNSQKSLSFDRIRKLLSENYTGSFNLENSKRDKLKGNETSVDFRKPELFGSAWDELDIKKQDEIIEKLMIEDDESVIYDFLKPFGLSEKQIKKISGYNLPVGTTMLSSHFMIDCSEIMLKEWLLYPEAVKKMGLHHSKKEKQDIQRSLPYYGKILTGLVSGAKGENYKGNDEDRYGRIANPTVHIALNQLRKLVNALIRRFGNPDQIIMEVARELKLSKTRKDELFREQSKNQKENERIKKELKDLGVVQVNSEYIKKYKLWEELAVEGIARLCPYCGKTISAKQLISGNIEIEHILPYSRTLLNSRDNLTVAHRACNQAKKNQSPFEAFGNSPKGFDWNRIIELAAKLPFNKRRKFYPDAMVRFHEDEEGFIDRQITDTAYLSTASKDYLSAICDSNAIWVSPGRLTAMLRGLWGFNTLLNRGHDTWDKNRSDHRHHSLDALVIGLCNRHLIAEAARINSSRGYSEIDAPPCPIKRNDIEEKLKSIVVSYKQDHGKEGKLYAETALAKHSYVEQIAPKDLGEKEINRIVPKKIQADITLLVQKEGFRKAKALIQKKYKHINVFRDKWVTRAPLDSLSERDIPNIADPVIREQIQKFIKSHPIKTGQKLQDVLNRFSEKTGIYSLRYFPKDQVPVSINSCNNKAYMPGDYYQVDIWRIPQPKGKYKYEGVFVSRPEAMRQQLHGDDAVSLQKPHPAAKLIMSLCKNDIVALSNETEQELCKIAGFSTTNNSIDIRPIYASDTIAAWKKNTNINLCSIFWPSNIEGQYFKSINVLFNEYKIKLVKITVDGRTIYRS

SEQ ID NO: 144 - protein, 1344 aa, unidentified
  REGION 1..1344: note = Description of Unknown: Cas Enzyme sequence
MRKNYSIGLDIGTNSVGYSVIFDDNYKVPVKTAKVLGNTNKKSIRKNLMGSVLLDSGETAMARRMKRTNRRRIERRKNRIRYLQEIFAPYMMQVDENFFARLQDSFLWEEDKPHSKYPFFGNVEQEVAFHDNYKTIYHLRKELADGKEKADLRLVYLALAHIVKFRGHFLIEGNVDVENNDIQQLFDEFLAVYSAYFEDVSVLEKKMEVRGILIEKISKTAKKDKIVQTYTIDKKSPLIEFLKLIVGNSGEFKKIFDLDEKSTLQFSKESYEDDLTALLEQVGDEVADVFLAAKKVYDSVVLANILSIKDKNTKAPLSAAMIQRYENHQEELAELKQFFKATLERETYKEFFNDSKKDGYAGYIDGSTTQEAFYKQLKKLFEATEAPELFKEKLEREDFLRKQRTFDNGSIPHQIHQKEFEAIIERQGAFYPFLLENKDKLVKIFEFRIPYYVGPLAKNQESPFAWATYHKDEPVRPWNFEEIVDTKVAAEEFIHRMTNYDIYLPDQKVLPKHSYLYELFTVYNELTKIQFVDDQGNASYFNAKSKKDIIDNVFKKERKVTEEKLMNYLKVAYADFRIIRIEGLSEHTKAFNASLGTYHDFLKLKVNKEFLDNEANLLIIEDIILTLTIFEDRKMIRERLSQYASYFDEKVMKRLERRHYTGWGRLSKKLIDGIRDNGKTILDYLKDDPAGNRNFMQLIRDDYLTFKKQIAEAQVVGEADSLVEQVQSLAGSPAIKKGILQTMKIVDELIKIMGYKPTSIVIEIARENQTTAQGLKQSRTRFKKVYEGLKLLSSKLLEEHNITNKELLSEKLYLYCLQNGKNMYTGEAIDINRLSEYDVDHIIPRSYWPENSIDNKVLVSSKDNREKSDDVPSLEIVNRMDTYWKVLLNAKLISELKYKRLTKARHGGLTDKDKEGFIRRQLVETRQITKHIAKMLDEKWNSSVDNSGKKIYEVKIVTLKSSLVSNFRKMFDIPKIRDLNHYHHAHDAYLNAVVGNLLIKKYPRLAPEFIYGQHLYINRKVSSEGKANQKVNIYSNVLKFLQDDGEQKDSQGNIIWNKDQHIGMIKKVIFNNQVTVVKKTEIQSGGFTNETVEKKGTSDKLIPRKNGWDTNKYGGVGSPKNAYAIIFECEKTKGKKVVKGKEIVGISILNQKRFEDNPITFIEELGYKKVQEDSIRVLPKYTLFEMEGGKRRRLASHRELQKANELTLSDTFTLLLYHALHRDDEENKEHREYLNQHRSEFKDLFDVIIEKSEQWVVKPKVVERLKKAMEIHFEKSNIDEISASFLSLLTFMRAGASSAFNFFDEQIKFENQRYESVTECLTSVLIYQSVTGFYETRIDLDIEK

SEQ ID NO: 145 - protein, 1094 aa, unidentified
  REGION 1..1094: note = Description of Unknown: Cas Enzyme sequence
MNYRLSLDIGITSVGWAVLEHTFEEEPFHIVDLGVRIFDRAEHPKDGSSLALHRREARSARRRLRRHRHRLERIKHLFENIHLISVEELNYLYHNNHKLSDIYELRAAGFDCLLTREEWARVLIHLAQRRGFKSNRKSDTKDKETGKILAAVKENHSLMEEKSYRTVGEMLYLDKKFFEHKRNKDKDYSHTISREQVLNEISMLFEAQRKLKNVFAAKDFEEKYTNIVSSQRSFDEGPGIPSPYAGKQIEKMVGNCTFEKEFPRTAKACYSSELFNLYQKINNLRIIDINSVSRFLSKNERQIIIALAHKKADVKYSDVRKSLQLSKDQKFNSLSYEHKDMDEIERETKFNYLRTYHEIRKALDKVNKGRIKQLTIEQLDIIGETLTLYKNEEMVIEKLIKAGLTEYDIDELLSLSFRGFGHLSLKAIKNILPHLQEGHIYSEAATLAGYNFRAHNNQEKYMYLPASSEQLQDITNPVVRRAISQSIKVVNAVIRRYGSPQLICIELSREMGKNFSDRKKIEKQIKENTDLNDAIKNKIIEYGHLNPTGQDIVKMKLWQEQDGRCAYSGDPIPISQLFEPGVADVDHIIPFSISFNDSYSNKVLVKSSENRQKGNLLPCEYMKNAPVKLERFEVWVKTSVKNHQKQQRLLKQSITEDDRTKWKDRQLNDTKYISRFMLNYIRDYLQFAPAENLGKRQVIAVNGNITAYMRKRWGLKKDRLAGDLHHAMDAAVVACVSEGMIRKITRYSQYHEANYYRNRFIDYETGEVIDPLLGRSGFKFVEPWEYFGIELESRLSDDPGSRISAYNLKNYLNPQDIEPVFVSRMPRHKNRGSAHKETIRSGRLVDEGLAISKIAINKLKLDKNEEIKNYYNPHSDIKLYEALKTQLQKHGGNGEEAFKEPFYKPAALGKPASQVKKVKIIDKSNLNVKVGNGIAANGDMLRIDIFKRSDGYYWVPIYAADTVKPTLPNKAVAHSKPYELWPEMQDEDFIFSLYPNDLVRFIHKSSVAATCWDKSKINLTDSYVYYIKANISTASISVESHDRSHSIPSLGVKSLVLLEKWNVDVLGKRNLIKKKESRLYFPEQTKRGETYSLS

SEQ ID NO: 146 - protein, 1330 aa, unidentified
  REGION 1..1330: note = Description of Unknown: Cas Enzyme sequence
MEEKKTIRPHSPYYIGLDVGTNSVGWAVTDPEYNVLRFKGNSMWGARLFEEAKPAADRRAARIARRRLERRKQRLFYLEEFFSAEIGKSDPLFFRRLHESALFPDDKTTGSGKYTLFNDPDFTDRDYLRRYPTVYHLRSELVHSSEPHDPRLVFLALHHIIKHRGHFLYETSENGDECPTVDAAMQELTEYLSAEMNVELGLEPEYFTILTDRNMRISQKKAALRAALGRSVQTEESGADIQALSDLLAGAKVKLAALYDDESLKNAEPASVALSDDLDAVFDALSSALGERVELLLAAKKVFDAARLSEMRGGEAYLCDAKVRQYEKNHADLRALKDYVREAAPNKYRSIFYKNAKFPNNYAAYSRYRSESGDKTCKQEDFCAFLKSVLPKPAAEHPLAPQYAQIEEKTFLPRLTGSENGIIPYQLHRQELRKILDNASAYLPFLLEEDEDGISVREKIEVVFSFRVPYYVGPLKGRWAERTEEAKRTGEKAYPWNFEKVVDLDASAAAFLKDLIGKCTYTGAPVLPKDSLLYSEFMLLNELNPLRLNGNELPVSVKQQLIEDLFKKENRRVTKKRILDYLVMHGYAAKTDEISGIDDPVKTRLRSYHDFAPLIPALGEEAVEKIIEGTLVYSDDKRMLRRWLKKNFPALNEDDVRKICRLKYADWGRLSKEFLTELYSGADEQGEAQNIMYFLRNTNLNLMQLLNDPEHANLPAAAEERRRARFGSNSLRSQLDEMYISPAVRRSIWQTLKIAEEIAHVRSGAPEKIFVEVARGEDAAKKGKRTKSRKEQLLELYKACEEDSGKLYDQLAATDESNLRKDKLFLYYTQFGKCMYSGEPIDLEAALRNDETYDIDHIFPRSRIKDDSIENRVLVKSVLNREKTNTYPISQDIRSRMLPFWSMLHDKKMIGDKKYDRLKRNTELTDDELSAFVQRQLTETQQSTKALAQLLQEIYPEAEIVYSKAGNVSEFRQEFEMLKCREVNDLHHAKDAYLNIVVGNVYKTEFTDRFFLNIRKENYSLKKVFDGDTPGAWKADGTSIATVKKYMAKNNPIITRMPREENGLLFKQTIMPAGKGQIRIKADKPIEKYGGYTSRFASHFIVVEHQRGRKRVRTIEPVYIYGKTLFKNNPVKYCTQILQLTNPSVVYSPIYIDSTLELDGERLTLTGGTASSGDGRDLYNHTVQLAVDDQKTKWIKSILKYLERCSEQRKEIPVTPFDGVDSEKNKALYDFFLKKLSSNCYGKLFTKEGQVLAKRRDDFSMLPVAAQCRIIAEVLKLFTCTAELPNLKELCGSAIGERIRKSANISGLNSAYLIHQSPTGLYEYRTDLLH

SEQ ID NO: 147 - protein, 1089 aa, unidentified
  REGION 1..1089: note = Description of Unknown: Cas Enzyme sequence
MQNPIHLAFDIGHSSIGWSVMEVAGSAPNILGCGSVIFPKDDCLASARRTHRRMRRNIRSTRKRIENMRRLLSHLRVLTDEDLSAPGHPAPHVLAAKALVSDAPCLSWLEVWHVLRWYAHNRGYDGNARWSGHEEDSDDTDKEKVAIQLMLDHDTQTMAETICAVLGLDPSGAKISSDAPFKTHSAAFPREVVRDEVLRILRLHESVLPALNADFISSLIALDLSNEHRAWETIKVPAIQLPRRYFGGLLFGQLVPRFDNRLIGTCPFSESEKGDKLPNKDSVAFRNYRWAMILANLRANGEPLSCDARKELHQIMEAKGKLTPRQLREHVEEITGTEATNCKSYFEITPNAGDALILDPVVSFIQAAEGKPRKNTITMSHFWPHLSAVTKKRAPGRWRKKRRVDLTWMLDECRRENHDPAPLNEAADVIYAADQKKSRSNFSRKEELLRRPFSPKLDSGRAPFSRSKMKEVFEFVINSNQHPAEDGGPIYRDEAQMDRMREKKIDDQTNNHLVRHRIRILRRLLDDIVEEFCGGKKLLVADVVVEVARDLQEFSGITAKEMAGELGKRLSHFRQAVKRLEERLPGVQLTGSLIRKCRIATDLNFTCPFTGDVYDEAALSRLEWEHIIPYADRPTNALDSLVLTWREVNDFKGRRTGLQFVQDDGGSSVPGRSQLSILPEASYRELVEKLKVARKDSYPDDFRRQSSRKKWLLVESYERADREFTAGSLTQTSHLNRIAAREVEKYFFDEGHKKSTASVISIPGQVTAEIRKGWDLLHTLTLACPEVENESKTKVRELTNLHHALDAVTIALTQFYLPGTSRLRRANEKGAIWQALLKRRKSEAEINLLVGTGIFKKCLSKNRDGRERADVSMIDLNSGIKQMISERLAEKRVAQHIPADQSGAVLEQNPWRVWRVDGNPENPKTEVHLKQRSFEVKEGRRIFKHKKAKEKAGKLVGLKPGKLAKNKSVLVIAENYGIALDPVPVVVPFHNVPKRLDAIRLENGGEKSRVLRKGMLIEIQNWPGKEGIWRIFSAKSPAHLDIARVDAVTMESKGEGYWRQVSVASLLKKDALNLLDHSLTGISGRRENP

SEQ ID NO: 148 - protein, 1007 aa, unidentified
  REGION 1..1007: note = Description of Unknown: Cas Enzyme sequence
VLLVWMLGLIRLGFLISITIRKKFYKSAVAYSKPPNIQKQGHPWRYPDQRRRLYRKTQKVAGVRAILKDHHLPIEKHIALIATDLSPWQLRADALTRRLDDREFARVLVHFAKRAGFESNRKSAPSNEDGPLIAGSKALASAMIEQGYDTIGSYLNSLPKQRNDPESYGRTVLRDDLRAELQRIFQKQRMLGNEKATQDLLNAVQDKAFFRKDPPSSLRLVGNCTLEPTQKRAPKRAYHAELFVALSRLTSLRITTRGGGKRILSAEDIQRLEQQAHTSPKVTFAQARKLLSLSEDETFNLASYRKIKEGDNTWEAIRTQAEKATLIELTGFHEMRKALSKLSKIDWASLAQKPDVLDQIAFALSFFEAEDQIRTQLDGLPLDEAQIIALLGISSAFSKTIDLSLKAVKQLIPLMREGQTYGELAPVLFPDSVAKKGTAHLLPPLAQSTRNPIVDRALSQIRKVVNALIRTHGMPDHFYIETGRELGNNWKKRKDIERDNKKREQFKKDTYAHATEIFGREPNGEELAKFRLWKEQNHFCFYSGERIAPALLTEGTQTQIDHILPYSRSFDDSWSNKTLCLARENQRKKNETAYEYMDRKGELHILEDFANTQEPARTKKLLLADFDEEKQKSWKSRHMNDTRYVARALSAYLEENLQAKDGIKKLVQTRTGGLTAKLRHLWGLPNKDRKNDHRHHGVDALVIACSTQSMVQKVARWSRYERGQKDGSDFYAAVPWPHFREDAMAKIDAMFVTRQPARKTGGRLHEDTIKRLKQHEDGAWQAIKRVKVLDLKPADLANLVDVTIIDGTPTGRNAALYQVLKDRLEAHGGDGKKAFSDPIYMPTGPNAKEKPQIRRVRLYDKSKSGFPVRQGIADNAEMAWTEVYEKGGKFYLLPIYTHHVATKNWPNRLITANKEERHWDELSDHRYLFSLFKNDYVVLESKKGEITEGFYKGTDRANGSISFEEHKGAQTYRSGVKMMKAIRKYDIDLFGNRTEVRGGSPWRGDQS

SEQ ID NO: 149 - protein, 1111 aa, unidentified
  REGION 1..1111: note = Description of Unknown: Cas Enzyme sequence
MDWRLGLDLGTNSLGWAALRLKPLATTDDVADRQDTRREPDGILAAGSRIFSDGRDPKSGASLAVDRRDARAMRRRRDRLQQRQRALMKYLVADGLFPADVAERKALEREDPFALRARALDEALPLPLLGRAIWHLNQRRGFKSNRKTDKPDEDAGKIAIGIGRLREKIAEDEAACDAEPGSWTFGKWLHERRQPTEDHPDGRSVRTRLRPEDGADAKGTGYDFYPDRALLEEEFDAIWTVQAPHRLGVLTREVHDRLYEIVFHQRPLKAPVVGTCTFGSGETRLAKAHPLFQRRRLLEEVNALKIVRAGEIAERLTPEQRDLLVLKLKDKNEVSFESLRKTLRLDPDARFNKESENRTKLKGDEVAAVMGAKTRFGTRWQHLSPDEQWTVVSKLEAAQSDEDVAAFRAWIVDTYLFTQEQAKAVSAARLPQGHGRFGETATRGLIEALTFERDSQGRVVVYSEAVTALGSGRHHSDFRTGEIHDSLPYYGTVLERHLLPGTGNASDPDEKRIGRLTNPTVHIGLNQLRRTVNRLIERFGPPAEIAVELARELKLTDEEKKKRNRENNENRLAAEMRSRKLLEIGQPDTGANRALLKLWEELDGNALGRQCIYTGQVISPTMLFSGEVEVDHILPFQATLDDSNGNKLVCIREANRLKRKRSPFETWGHTDQWEDIAARAARLPRGKRSRFEPDAMERHKEDGGFLARQLVDTQYLSRLAREYLSSLYPGSGEGSSKVWVSPGRLTEMVRRKLGLNDLLPDHNFAGGADQPKNRLDHRHHAIDAIVIAIVDRGMLNAIARASGLEGQEGRERIKIPAPWEGFRDAVSETVRAITVSHRADHGTAGHGNSSTAGRLHNDTAYGLTGATDAKGNTIVVRRKPLGSIKPADIPTIRDPDLRAELHKWIDGLDGKALDQALAAFSGTGPLQFRGVRRVRVTEPLSVIPIRDREGRIYKGYKGGSNYRYDVWEMPDGKWITTWKDCEGVIRSSVVSMFDAHQPGELARPHPAAKYVLSLMQGDMIAIERQVGVREIMLVTQFWQNGQVRLVAHNEAGKLDDRNKSPDDPYKNFSPTCGGLKKLRARKVGIDEIGRVRDPGFPARTRRRPTRPKAAA

SEQ ID NO: 150 - protein, 1331 aa, unidentified
  REGION 1..1331: note = Description of Unknown: Cas Enzyme sequence
MKENGNDRRQGTYYIGLDVGTNSVGWAVTDENYQVKKFHGNAMWGVRLFEEAQPAADRRTSRVARRRLARRKQRLMLLEFLFAEEIHKVDPNFFRRLHESDRWEEDRATRCPYSIFHDAGFTDIDYHRNYPTVYHLRSELLQSTQPHDVRLVFLAIHHIMKTRGHFLYETGDNGDEILTVAQAFDQLNQYLQDEYDQMLEPVDQNAFLDLLQNNGMGITAKKKALHGAYGLVSDISILKFSALIDLIAGASVKPDVLFGDQTLKDLTSINLKNGLDELEQYREALGERFALLEFTKTLFDAARLSQIRKGYTYISQAKVAQYQENASDLRKLKQYVRAQIPDQYRMIFSEKKKGLDNYAAYSQYKLTQKDYRCDQEKFCKFLLGKQVGLPEPQESDREMCEIYRKIKDGAFLPKLRSSENGVIPYQLNRQELVQILKQASLYLPFLNHVDSDGLSVSDKIIKTFEFRVPYYVGPVSDQAGHHWAVRFQGKENEKIYPWNFEQVIDLERSAAGFMEDLVGRCTYTGEPVLPKDSLLYSEFMLLNEVNLIKINGKSLPVNVKKQLVQDLFYHSSKKVTKKGIVHYLTSKGLMTQSDELNGVDDRIKSTLRSYHDFKDILKRTGDRDMVENIIRSILVFGNDLTMLQRWLKNNTHDLTEEEIRRICNLRSKYKEWGRLSRTFLTEIYSPDEWGEAKSIMDYLRDTSCNLMQLLSNQYQFADQAKAHFDALMGNGQTLSQKLDDLYVAPAVRRSIRQTLRIVDEIVDIEHGVPKKIFIEMARDNAQEVKKSRTESRKDKLIALYRACHEDSGELFQQLEQEEDSRLRSDKLFLYYTQFGKCMYSGEPIDLESLLRGELFDIDHIFPQSKVKDNSLDNRVVVINTLNREKSNIYPIQGEIRRKMQPFWAMLKSKGMISEKKYDRLVRNTELTEEELSSFVARQLVETRQSTKALATILQETYGDQVRLVYSKAGNVSDFRQQFELVKCRDVNDLHHAKDAYLNIVVGNVYDTKFTEVFFRNIKKEKYSLKKVFEFDTPGAWDKTESIKTVKKYMAKNNVLVTWMPQEKHGKIFDLMLVRAGKAKVNKKQGLDQEKYGGYTMRYCAYFCLVEHRIGKKRVRSIKPVYMYQKVAYEQDPLEYCRNILMLHEPRVIVQKILVGALMELNGKRLTLTAGEEGRIKLNHTYQLIVGEKYNQYIKNASKYYDRCTAQKAELPVTQFDGISDKDNIDLYHELIRKCKTSIYSSCFGAFNIIAEEMEKCEDIFTGMSTLDQIKILLEVIKAFRCNAVYANFKQLSGQQVRGRIRINDKISELNTAYLINQSVTGLYEHRIDLLK

SEQ ID NO: 151 - protein, 919 aa, unidentified
  REGION 1..919: note = Description of Unknown: Cas Enzyme sequence
IRPWNFEEVVDKARSAEDFINKMTNYDLYLPEEKVLPKHSLLYETFAVYNELTKVKFIAEGLRDYQFLDSGQKKQIVTQLFKEKRKVTEKDIIQFLHNVDGYDGIELKGIEKQFNASLSTYHDLLKIIKDKEFMDDAKNEEILENIVHTLTIFEDREMIRQRLAQYNSLFDDKVITALTRRHYTGWGKLSSKLIKGIRDKQTGKTILDYLIDDGKNNRNFMQLINDDGLSFKEIIQESQVVGKTDDVKQVVQELPGSPAIKKGILQSIKLVDELVKVMGHAPESIVIEMARENQTTARGKKNSQQRYKRIEDALKNLAHGLDSNILKEHPTDNIQLQNDRLFLYYLQNGKDMYTGEPLDINQLSSCDIDHIIPQAFIKDDSLDNRVLTSSKDNRGKSDNVPSLEIVQKRKAFWQQLLDSKLISERKFNNLTKAERGGLDERDKVGFIRRQLVETRQITKHVAQILDARFNTEVTEKYKKDRTVKIITLKSNLVSNFRKEFRLYKIREINDYHHAHDAYLNAVVAKAILKKYPKLEPEFVYGDYQKYDLKIYISRTKDPKEVEKATEKYFFYSNLLNFFKEEVHYADGSIVKRENIEYSKDTGEIAWNKEKDFATIKKVLSLPQVNIVKKTEVQTHGLDRGKPKGLFNSNPSPKPSEDSKENLVPIKQGLDPRKYGGYAGISNSYAVLVRAIIEKGAKKQQKTVLEFQGISILDKINFEKNKENYLLEKGYIKILSTITLPKYSLFEFPDGTRRRLASILSTNNKRGEIHKGNELVLPEKYTTLLYHAKNINKTLEPEHLEYVEKHRNDFAKLLESVLDFNDKYVGALKNGERIRQAFIDWETVDIEKLCFSFIGPRNSKNAGLFELTSQGSASDFEFLGVKIPRYRDYTPSSLLNATLIHQSITGLYETRIDLSKLGED

SEQ ID NO: 152 - protein, 1345 aa, unidentified
  REGION 1..1345: note = Description of Unknown: Cas Enzyme sequence
MGQDYFLGLDMGTGSLGWAVTDDLYQVLRRHGKSLWGVRLFESANTAEERRLHRTARRNLDRRGWRIQVLQELFAEEISKVDPGFFLRMKESKYYPEDKRDADGKCPELPYALFVDKTYTDKEYHKEFPTIYHLKKRLMETETMPDIRLVYLALHHMMKHRGHFLLSGDIGQVTDFTNTFHQMIENIHDEELDFNLVFGDEELAFVKQTLKDRNLTRSAKKTQLIKRLKASTVCEKAILNLVSGGTVKLSDIFGREDLDSIEKPKICFADAGYDDYIAGVEGDVGEQFYIIASAKAVYDWSVLTDILGDSVSISEAKVKTYEKHKKDLAFLKKVIKDNLTQEDYKETFLITDSSIKNYSAYIGMVKKNGKKIDLESKRCSREEFMDFLKKRIVAQLPDGEEKDYLMEEIEKDSFLPKPVNKDNSVIPYQIQLYELKKILENLGAKSEFIKENTDKIIQLFTFRIPYYVGPLHAAENDEQNKFSWAVRKSNEKIYPWNFEQVIDKEESAQRFIRRMTNKCTYLYGEDVLPKDSLLYSKFMVLNELNNLRLDGEKVSVELKQKLYNELFCKTRKVTQKKLRSFLVREGIAEKNVEISGIDGDFKASLKAYHDFKEKLTGVALSQADKEEIILNIVLFGDDKKLLKQRIRKKYPDLTDNQMKALMTLSYQGWGRLSKKFLEEVTAPAPGTDEVWSIMNALWETNDNLMQLLRQEYKFTESVEMINSGQGEKTLSYETIQNSYASPSVKRQIWQTLQVVKEIQNIMGDSPKRVFVEMAREKQESKRTESRKKRLIDLYKVCQKEEPELQRELDELTRTLNLHEENQLRSDKLYLYYTQMGRCMYSGDVIPLEDLWDNTKYDIDHIYPQSKTMDDSLDNRVLVKKEYNAKKSDTYPLSAEIQKKWGRFWKMLWNKGFISKKKYDRLMRREELTATELAGFIERQIVETRQSTKLVAEILKEALPDTEIVYVKAGTVSRFRQTYDFMKVREMNDLHHAKDAYLNIVVGNTYFVKFTKNAAWFIRENPGRTYNLEKMFERDTIRDGETAWKAGNQGSIVWVRKMMDKNNILVTRRSYEVKGGLFDQMIMKKGKGQIPIKGSDDRLQDISKYGGYNKAAGAYFMLVESQGKKGELQRTIEYVPIYLKTVIESSEESALEYLQKDRGLVCPRILLKKIKTDTLFKVDGFYMWLSGRTGKQLIFKGANQLLLTKDDQAMLKKVLKYVQRLKENKNLKITDKDEIVEQDLIKLYDTFIDKLENSVYARRLKLQGDTLIKKRDSFIALTMENKSIALSEILHLFQCQSTAANLKLIGGPASAGILVLNTNISNCKSVSIIHQSITGIYEQKIDLLTV

SEQ ID NO: 153 - protein, 1091 aa, unidentified
  REGION 1..1091: note = Description of Unknown: Cas Enzyme sequence
MWRLSLDMGTNSIGWTAFSLTKHKSNNEKPQISKILDMGVRVFTDGREAKTGTPLNEARRNARQMRRQRDRKIRRKKSMLNFLINNKLMPKEQNDQLAVAFFDPYQLRVDALERKLKPFELGRIMMHFSVRRGFKSGRKDQQAENNAEREGMLGGIQSLESELKGLTLGQWLYKQRKEGNSVRFKARTEKTKIIYTFYPSREMYETEFNAIREKQEKYYKEINWDRLHWLIFFQRPLKRPERGRCQFYTEEDRGYRAYASAHRFRILQEINNLKYFNDDNREEEIPSDLKHKLFEALDSQKTISFDRIRKLLGESYTGSFNLEDSKRDKLKGNETSVDFRKLEFFGSVWDNLSIQKQDEIIEKLIIEDDENVICEFLKTFELADNQIKKISGYNFPTGTTMLSSRFMIGCSEIMLQKWLSYSDAVKEMGLHHSKREKQEIQRSLPYYGKVLVGQVSGAKGENYEGNNEKKYGRIANPTVHIALNQLRKLVNALIRRFGNPDQIIMEVARELKLSKSKKDEIFRKQTQNQKDNDRIKKELTDIGLIKISSEDIKKYKLWEELAPEGIARCCPYCGKTISAKQLISGAVEIDHILPYSRTLLNSRDNLTVAHRECNQAKRNQSPFEAFGNNPKGFNWNHIMELIAKLPSKKRQKFYPEAMVRFHEEEGGFLDRQITDTAYLSKASKDYLSNICDSNSIWVSPGKLTALLRGFWGFNTLLNRGHDTWYKNRSDHRHHALDALVIGLCDRQVINEAAKINSGRGYSEINAPQCPIDRKDIEKLLTSIIVSYKPDHGKEGKLYAETALAKHSYLEQIDPVDLKENEINRIVPKTLQVEIASLVQKEGFRKAKPIIQKKYKYLRVFRDKWVTRTPLISLSDRDISNICDPVIREKVLVYVKSHPIKSGEKLQDVLTRFSEKEKIYSVRHFPKDQVPVPIISCNNKAYMPSDYYRVDIWQVPQQKGKYKYEGVFVSRPEAMKEQLNSDDSISLRKPHPAAKLIMSLCKNDIVKLSSEIINEFCRIAGFSTTNNCIDVRPIYASDSINTWMNETNINLTSTFWINNSGSQNFKSINVLFNEYKIKLVKITVDGRPICRS

SEQ ID NO: 154 - protein, 1094 aa, unidentified
  REGION 1..1094: note = Description of Unknown: Cas Enzyme sequence
LKIRYENLLYSFDIGTNSIGWCVFSLDERGVPIRIVDAGTRIYSDGRDPQSKTSLAVARRDARSMSRRRDRTVRRRKATLRVLTAYGLMPEDKAARENLLRETEDRKPGSERPLSDPYNLRLRALGEKLPPAHIGRALFHLGQRRGFKSNRKTDRKDNEKGAIALGVEQLTAEMREAGAPTLGAWLTMRRAEGHVVRIRAGSEAFDEDGYAFYPERGMLEDEFHRIWDAQAVFHPDLLTTERREHLFRVMFYQRPLKRPRVGKCSFNPLETRLAKAHPLFQEFRLYKEVNELEIVRPDLSQDKLTLDQRNALVNLLRQKKKVGFATLRRQLRLNPDESFNKQSDSRIDLTGDEIYAAFVDKKLFGPQWAAFSLERQWEIVRRLGDEESPDALFRWLETDFGLTGERALAIVNCRLPEGYGRLGETALAAMLTEMQAAVIPEAEAAKRCGYDHSRLALEGGGLDSLPNYQEILERHIPPGSGEPDDIYDLRKGRITNPTVHIGLNQLRILVNELLTRHGKPVEIAVELARDLQLSERQKAEENRRIASNTRAAEARSTKLTELNQIDNGYNRLLLKLWEELNPKPEDRVCIYSGKPISVEMLFSGEVDIDHILPWSKTLDDSQANKLLCLKSANRQKGNRPPADVPEWAGRYDEILARAARLPKHKRWRFATDAMQTFEKEGGFLARQLTDTQYLSRMALEYLSALYPAEEADAFGVLRKINHVRIVPGRLTELLRRNWGLNTILPDHNLGGLAQEKNRKDHRHHAIDAAVVGVTGRSLLNRISHAASRLEGADFEDLVKRTVKDNPPWPGFREDLQAAVNRITVSHKPDRGTVSRSGYADGKGQTAGKLHNDTAYGITGERDARGNTIVVRRKPFLSLEPKDLPAIRDTDLQAELYHAIGGLTDKKAIQEALRRFRAYHRLYKGIRRVRMTETLAVIPIRDAEGKTYKGYKGDANFRYDVWETLDGKWTAEVVSMFDAHRPGWQSAFHASNPTARRVLSLQQNDMAAYEHPQDGYTIGRVVKFNTAGMIYFSAHKESGSLKARDADREDPFKYFTKSANGLKEARCRQIRIDATGRVYDPGPQDREARNTRKSG

SEQ ID NO: 155 - protein, 1360 aa, unidentified
  REGION 1..1360: note = Description of Unknown: Cas Enzyme sequence
MSDEILQYFFGIDIGTDSVGYAATSKEYDLLKYRGEPVWGVQTFEAASAAEDRRVNRTARRRLDRRQQRVRLINEIFAPAICKNDPNFFIRRKESALFKEDAQNGVHLFEGGISDKQFHKEYPTIHHLIVDLMRSDAPKDVRLVYLACAWLVANRGHFLFAADSGNVDDFSVPYQEFADICHNDYECGLPWPDATTPDTVLEVMQAELGVTKKTALFVEKVCGGKKPSKKLEEGCPFRKDLIITLLAGGKASMKDLFANEEYGELDSLSLGMDEERFDEILAELGDDGVLLRALRKLYDCALLKKTLRGYTYISDAKIAVYEQHAKDLKWLKQFIRKYKPGDYARVFRRAEAGNYVAYSYNVKNCSAPQEIKKKANKTVFCDYLKKIVEKTDVAPEDQERYDDMMSRLSLYTFLPKQKDTDNRVIPQQLYRCELAQILSQAKRYLPLLTEKDADGLTNEQKILSVFDFRIPYYVGPLNPASSHAWIVRKAGIIYPWNFEKMVDLDASEQAFINRMTNTCTYLPGEDVLPYCSLLYSRFMVLNEINNLKINQQPIPVEVKQAIYTDLFENGTKKKITKKAVCDYLKRRGYLKPSDEISGVDNTLNANLNSYHCFKRLLESGTLTEEQVESIIDHAAYSEDRLRMSRWLEREYPNLSAADRKYILSLKLKEFGRLSRKLLTGIYGCKKNGTGEAFTIMDALWQTNDNLMQLLSENYTFKDQISDFAENYYADPKNKKTLSERLSDMYVSNAVKRPIIRALDIVSDVVKAVGCAPQKIFVEMARGGTPDQKGKRTVTRKQQILDLYKQVKHEDLPKLKQQLEDMGEMANNRLQSDKLFLYYMQLGRCMYSGESIDLSRLTTDTYDIDHIYPQSKVKDDSINNRILVRSSANGVKSDRYPVEASVRAKMGEFWDYLHKNDLISDEKYARLTRMTGFTDDELHQFINRQLVETRQSTKVVAQLLKERYPDTEIVYVKAGMVSEFRQEFEMLKCRTVNDQHHAKDAYLNIVVGNVYHEKFTRRWFDTTQKYNVSVKKTFDREQKPYGNLVWRGAEDLSKVRKVLGKNAVHVTQYAICKHHGQNGGFYDQNLLKARAGLIPRKDGLDTEKYGGYNGLTTTFFTLVSFTNGQKKELMFFPVDLLYCERFVSDPAFATAYVAKTLNEANKKADDIVFPLGSRVLKVNTVLSLDGFLVCLASGSVKDGRVGFLPLTQFVCGYETERYIKRLERVDEKVKTYPKYTASAEYDGVSAEQNAKLFDLYIEKLTDSVFSKRPGVNVAALAEKRDAFLALPLEQQCTSLLKMHMIFARQPNDVDLSDIGLGSRVFKSRKSMYLSGWKKEYGEVRIIDQSASGLFSSQSGNLLDLL

SEQ ID NO: 156 - protein, 1016 aa, unidentified
  REGION 1..1016: note = Description of Unknown: Cas Enzyme sequence
MPSKHKTILGLDLGPTSVGWSLLSLLVNDEGNVSRNDDGQIVEARIIDSGVRIFPATTEDKTNAPKNHKRRSARLQRRQIRRKAARKMELKRILQKADLLPEIKDTDSAKVLNSLGDPYQLRVRALSQRLEPFELGRALYHLSKRRGFLSNRKSAKSKEDGVVYDGIKAIRAELESGKFRTLGELLSTKEKKRKYFTHRTMIEEEFEQIWAAQKPHHPNVLTDQLKSEIRKIIFYQRPLKLQRGLIGRCTFETDKKRCDLARQDAQRIRYWQDINNLQLQDPQSLDWRPLKDTEKELIANECEKVKEITYKRIRKLLRVGEDVRINLEANDKKFYGNRTGFVMRKALGDKWDAFNAEEQDRLIEEMIRIDTETALRKRLSGFWGFSDEEVESLERAWFDLEDGYSKLSLKAIRKVLPLMQEGMRYDEAVRLIYDDHRRQYGSEEFQKLSLPPKELRNPIVFKALCEVRKVVNAIIREYGRPDEIHVEMARDLKLTNKQKEAATKQANLNKKANEEADRFFYEHFGIGKEAVSGNDRLKYRLWKESDERCPYTGKQIPADALLDDGLVDIEHIIPYSKCFDDSYMNKTICDARFNREVKRNRAPAEIFDHESPEYQELLLRIKSLPFAKQRKFKMTAAEIEHPERFSKNKKDWIGRQLSDTRYICREVRGYLRQLYPPSPDENKYVQVVSGGATANLRKVWGINSILADGDVDEKNRWDHRHHAIDAIVVALCDRGLFQYISRLAARNREMMKRALSGIPEPWEGFRNDVNDAVQKIIVSHAPLRRKRGQLLEETAYGPTGTEGIYVTRKPLESMTHAAIKNIVDPVVKGIVELRLSQYNGDIKKAFSEPLFHKDGKTQIKTVRIFVTMSPETLVGINDETGKAYKFYPLARNHHVDILENCNTGIRVPVVVSRLDVNDIRRSVKYPDGNWKKIFTLYKNDYVEFLGNDGQLRLYRVQKFSRGKNGKGFEITLRDIIDAHKKTQQGNRVRVRSNRDLKSIVRKLQVDPLGRLTQARD

SEQ ID NO: 157 - protein, 1054 aa, unidentified
  REGION 1..1054: note = Description of Unknown: Cas Enzyme sequence
MNIDSALSKWSGHPFYREQVVLGLDIGIEGIGVFVRKGLTPIYARTFIVTLPESAPMAGRRQKRAMRRSRTSARHRDYLFRLWCKEFGLPVVDGDAKARTDAWAIRYRACTKGVASAEAVSVALRHCLSRRGFSYHRDGDAQFPWGDEMEYAPIAKWLNNAFFDLKYANELKWKLDGLDWMSSEKKRQAILEAINACVAKYDSGPLVAHIKAHLDAPIHRRPRAWGIDLPRDLIEQHTADIIMKHARFFGGPEKAETAKGAYFKILNYARNKPGALAERKVKKCPYLAKLEEGHVGKVLCAIASSPLVRKLNLVEFLAQRGFVDAGGSKLKANAEVFAALDKHLSDDAEAIASSGTGDRKPRPKLGLVQLKKIFTEAHGLKLEKDSEGLNGHYFEQLKDIISPRISALSGRANLSEKAAKILLERALSHGWDGLDLKDTWGDFFVWRRDVDRGIGLYPQVEFLMGRRSKKGVQAVQGVIRKIFAKLAPKLGQDRPDVVIAESVRDVPRNADHRKDRERKMLERREVRKELFERYGLADGGSDQDRRRVSLYEQQKGLCPYTGKELGSPLNPSLQVDHIFPRERGGVSEMDNLVLTLSEVNRKKAKRTPHEARSDFPEFSKFAQSCRWGTKKLDLFLRKEADIPDWKNLTRTSQIARELREEIAQWLGIKGDAEKVRARIGAPSGLQTAICRRSKAWRAKLPEVDGKKDRTNMRHHLWDAAVLSHIPPGEGTQSVAFGGIFYQEKEDKPGDLGWQALDLGPDLIAFEEATAQQCLVEKPRQRRSKQSRTEETIYGMNDQGRLTVRKALIDGLGMVNKNAAKWLEHSGIPAAQLPKKRLEKFLEQEADAKPLELNSGSIVDKVRIVAPEESPVSMLPHRNRQGDVIGWKIMGSPYTRMEIWKAPDLDKKGLPLFQRRFVPNPRGLAALNRLAKEGKGPWWKQKPSADTASLRRKVIGAPMAKFSKKLTSVQLGDLLFVPYNGLGESMRPAWNPKTVKFEKPKADHWVWLRVSSINSSGQIETIISEKPSVDTIKAVKPSSVSVIAAYRQFALEQKG

SEQ ID NO: 158 - protein, 1368 aa, unidentified
  REGION 1..1368: note = Description of Unknown: Cas Enzyme sequence
MNLRKAENYDIGLDIGTGSVGWSVSDEEGELYKFKGKTTWGSRLFPSAETAEGTRLNRGQRRRYDRRRQRLDLLQRIFSVEMEKLDPEFFIRMNQSRLLPEDRDPHHQDYRWPLFNDGSFTEMDYYDKFPTIYHLRVWLMETEEKADLRLIYLAFHNIVKRRGNFLHQDNPKLSAKTANMKESVTRFCDALEDWCELQEIDCDPRRQQIEAVLSDKGRSARQKQEVLAPLFGFSSEDKKMATALSKVLVGYVAEFAEIFLIDPNESRFKLSNDEKVEEFSSLCPDAGFELFEAIQAVYSSFVLAGILSGAAGETISYCKVREYERYANDLKILKRLIRKYHPSEYQRFFRGAKYPGTTLYDPSKANGYTLYDLGSGKISYEDFIKEIIKLFEDTPPESDADYQSMQKSMDNGTFLRRLKTSDNGSIPYQLHLEEMQLIIDRQSKYYPFLKENKVKIESLVTFRIPYYVGPLTQKNASTDTQGNTRFAWSKRLPGKESEKVYPWNWKEVIDKDASAEAFIKRMTGTCTYLQGEPVLPRCSLMYEMYCVLNELNGAKLSIDGDKQVRLCVSDRIGIVDDLFKKKKTVSYKAVEDWLRQKHGPSVAQPHVSGGQGERGFESKLSSYYDFCKILAVDELSISDIPMIEDLILWSTLFEDRSILRQRIKDIYGDRLSDPQIKEVCKTRYTGWGRLSKKLLSGLKAQTDNGPKTIMEVLEEGDPNNGKALNRAMNFMEILHDDDLGFNKLIDDFNAKKIAEEKEFSLSELQGSPALRRSVNQAVRIVDEVVGITGKSPANIFVEVTRDEDERNKGKRTKRRYDRLEEALAAFKKEDPDIYQELKGLKPAQLDERLTLYFMQRGKSMYSGASLSINRLSEYQVDHIIPQSYIKDDSYENKVLVLPEENQRKLDSMLLEDNIIKKMRPFWKSLLGADLIGQKKFDNLTRASFKDDQLKGFIKRQLVETSQIVKQVQQILKARYEGTDVLPIKAGFSSQLRKERGLVKCREINDYHHAHDAYLASQIGRFIQYRHKDVFDDPLKMAAIVRKYIAMQGEHFRKTRKMPGSANFIVSSFLTSGFDKETGEIFQDKWDADAEVDRIRRSLNFKDCFISRMPEETSGAFWDATIYSPRDTAKNLSLPLKKGLDPQKYGSYSREQFAYFFVYEVKNKKNGIEIKFEPVPVSVAAAVKDNPCMLEQYATQNAYDAGLEFVTILCRRILKYQQVIIGEDKLYITGLKEARNARQFSFSQNETKQFVQLLNGEDLSPEEFDNLLSVLQKKFALYAPRLGKNLKVASLSEAFRAADDEDKKSVLLALVSIAAAKTNVANLVAVGGSKFSGVIRPTFAKEISNPKIEFWFVDQSVTGMFERQYRLGL

SEQ ID NO: 159 - protein, 1084 aa, unidentified
  REGION 1..1084: note = Description of Unknown: Cas Enzyme sequence
MRLGLDIGTNSIGWWLYSTHDDAVTSVVDGGVRIFSDGRDPKSKASLAVDRRIARGQRRRRDRYLRRKAALMKRMAMVGLMPADPVVAKELELLDPYELRANGLDQSLPLTHFGRALFHLNQRRGFKSNRKTDRGDNESGKIKDATARLDQAIMANGARTYGEFLHMRRCSATDPKLVPSVRTRLSVARRNHSEKEESGYDFYPDRRHLSEEFEKLWAVQSKYTPDVLTDELHDEIVTIIFHQRPLKEQEVGLCLFSGHHGIPQQDKRIPSAHPKNQRRILLETVNNLRISARGKPARRLTREERDQIVHALDNKGHTKSLSGMSIKLKALGKIINLRSDQSFTLETANRDAIACDPVRASLSDPDRFGPRWSTLDCDAQLDVVERIRKVQSDSEFASFVDWLIATYTLDQNNAEAVANAPLPEGYGRLGLTATSNILEALEAEVVTYSAAVAACGWHHSDGRTGEVLDNLPYYGEVLERHVIPGSYDPQDDAVKRYGRITNPTVHIGLNQLRRLVNKIIEVHGRPDEIVVEVARDLKMSEDQKAEATRNIKKNTEAAKARGLKLEEIGVPDNGANRMVMRLWEELNDDVMSRNCPYTGQRISAGMLFDGSCDVDHILPYSRTLDDGFANRTLCLKEANRFKTNKTPWEAWGGTDQWDLIAANLKNLKANKAWRFASDAMERFEGENDFSARALKDTQYLSRIARSYLDTLYDGGDGKSHVWVVPGRLTEMLRRHWGLNGLTALTDSDAQTVKAKNRTDHRHHAIDAAVIAATDRGLIKRISVVAQRDEVGGAEQVARSVVPPWENFRKDVGAQISKIIVSHRADHGSIDPTARKFGKDSTSGQLHNDTAYGIAQDSTVVSRKPLTSIGPNVIASTTGGINIRDKDLQQHLARVTRNLEGKAFEAALVAFAASPKLPDHSDNPYFGLRRVRLEETLQRSARIEVTDKSGQAFKAYKGDSNYCYEIWRLPNGKFEAQVVTTFEAHQQDADKKPHPAAKRLMRVFKRDMVMLERDGEEIVGYVQSLHVKNGLLIAPHTESNADARHRNKLDSFKFIQMSAGTLLKANARRVYVDELGRVRDPGPAI

SEQ ID NO: 160 - protein, 1055 aa, unidentified
  REGION 1..1055: note = Description of Unknown: Cas Enzyme sequence
MQNPKETKTVLGIDLGIASIGFSLIDDVEKSIIKAGVHIFEGAEAPKTGASLATPRRTARLTRRRLRRKRQRIKQIKKLLSSNGFSEAVKRLDDLTGTCCQTTPWELRAAALNRKLDDFEIVRVLLHIANHRGFKSNRKKDSALLKSAPEETGAPEETGDSAAKEAKKMLQATRKLSEELEKSDHETLGAMLASRDAQRNKKGVYKHTPLRDLLQEEVNIIFERQKEFGNTRLNTALRDQYSDLAFSQRPLRSTLDMVGYCQFYPQAKRAPKHAYSAEMFIAWSRLHNLRIVQPGDAEGRKLTQAERQEILSEAHKKKSGVTYKAVRKIVLEDDPGYTFNFVRYGKTKDPEGAKFIVLPGFQAIKKALSGADLPEDDQKKILNDADILNHIAYAFTFFNDEAEIHKILRQGGVDEEIIDPLLDGGLDFKGTINLSIRATKELLPRMERGVPYDKACLESGLNHSPKSSGGYKRLPPAPKTKNPVVDRALAQARKVINAIITRYERVPDAIHIEMARDLSKSRSERDKIDKRMNQNRKKREQLEKEAKEKEVHPDTGMLKYDLWKSQGGLCIYSGKYIDIKNLDDAEIDHALPRSRTWDNSYYNKVLCLASENQDKGNNTPYEYLGGGEAWEAFKARIEKLPHPKKKKLLIENLDEAMQNKWKSRNLNDTRYMARALKSHIESSLGTEEGNPPKVLTVNGQMTHMLRNMWGFKKIRSEGHKHHALDATAVAFCSRSMVKKVNEWNRSERRKDSSISFPTPWGATKEQRKDFRQYVSGVIEDIFVSHQPQRKVTGTAHESTALSKRKDKDGNRIFVKRVKLDKGFGPKQLKRLYGVELVDGVPRGSNAKLYNAIKERLERHASEAKGKHANPFSEPLYMPTNTPGKKGPVIRSVTINDGKANNVLRLPNGAYVKSGHLIRTDIYYKENKKGKRRYFMAPIYLGSHAAGEEPKILVPGEPRENWIPIDDSYTFMFSLFKNDYVVLEKSSGVKTEGYFCGIDISVETVALTDHDEIKKKTRMGIKTLKSIKKYDVNVFGEKHEVKREKYRVMAHPSNSK

SEQ ID NO: 161 - protein, 1332 aa, unidentified
  REGION 1..1332: note = Description of Unknown: Cas Enzyme sequence
LQLLIDEHLCPMTQAQLDQWSRYDKTKGLKRQYPVDAEAFEQWVRLDFDGDGKPDYSSPYQIRAELMERQFDFENQEDRYKFGRAIYHIAQRRGFKSSKGETKEDQEEKANKSQTIELVDTETEVDLADTLQKSELKKAKNITDYMDEHSLKTVGSALASLENEGIRVRGMVYNPIRVQYKNEIKEIFKFQEGLSSDSDLYRRLTSERKNDGTIFYKRPLRSQKGNVGPCTLEPNHKRCPISHPDFEEFRAWSVINNIKYRTDVESKWQQLPLELRKKMFEERFMLSRSYFKFEDLRNWMEKELDLKLSYGDETVNYPDRTSISGCPVIHRLKKILGEEWRTAKIETAKERVNHKTGETHRVTYDYEALWHVALTYEDPEALRLFAENAGISFNEMSKMMGVIRQGYSSLSLKAIRNINRFLRKGLKYTDATLLAKIPDIIGEDRWKQCESLLLTHVEGISTNNRKKKQLLNIVNDLISRYKTLNIEDQHAYRNSDYRLTESDHADIERCIKDSYSPKLWTSMTEQQRKEVCDFVADHYQAFFASSRQEYFKMPKLGEEIRSLLAQWTNDISDEDWSRLYHPSKIEHLAPVEAQNVNVDDRVMSLKLLPSPSLGSINNPMALRVLNVLRRQVNGLLKAGLINKNTKIVIETARELNDANMRWAIKTYQAKNEDANKEIEKQIKELLGIEATKDDIRKARLLMEQPPKEETKSQKVKPIALEYEKEMTDIVKKYKLWLEQGRRSIYTGNIITISDLMDGNKTDIEHTIPRSISFDDSLSNLTVCEADFNRGIKKNRMPSQLDNHADILLRIEPWIRKVAHLEDQVEQWKLQSKLAGDKERKDKCIRQLHLWRMELDYWKKKVKTFTLKDNELEKGFRNSQLVDTRIITKYAYHFLKSAFNNVEAQKGEVTATFRKILGLQIQDEKKDRSRHSHHAIDATMLTVMPASAKRDQMLRLFYEISELWRIGKNTEAGQKRKELGQMVRECGVGHADGLAEWIESRILINHVSKDQSLTPARRLRDNQGKKVIATGSCIRGCLHEDSLLGAITQNNGDEIYYVKRRPLIPKKGLVGEFKDWEDLRKSIVNKDLVDMMISQFPAGTSFENACKEGIFMLDKTGSKVNQIRHVRCYSSVKNPAIIKKQTYRSEKDYKNYYYAKNGEISAYALYWDGVIGSPRSFDTVSLLDLAKIKTSMPIASKQEAFAPRDKEGLPLYATITPGKTHAILFRNDEFKNGADRKEIQSFARSLGVDELSKRLYLATQAFSADGRMRFVHHLEARDDKSLEKEYGKAGKNGFSDLDINNPHPKLLLSKGNLTMLVEHIDFDFDEIGKIILL

SEQ ID NO: 162 - protein, 1278 aa, unidentified
  REGION 1..1278: note = Description of Unknown: Cas Enzyme sequence
LQNLFIVLPMKTILGLDLGVSSIGWAYINLADDNDTKPSEIINLGARVIPLSSDENDEFTRGNAQTHNAERRDKRSARRNLQRYRLRKTLLTEQLKKSGMFPDEKLFNLNNVELYGLRSKAVSQQISLQELGRLLYLFNQKRGYKSNRKANNSEEKEKTSEKPNEENEEQITSKTGKPKVKGYLELIADREQIIKLENITIGQFFFQQLQKNPHFRIKENIFTRASYIAEFDKIWETQQGFYQDVLIHDLFQTIRDRIIYYQRPLKSQKALVSECRFEKHHKVAPKSSPLFQIFKICQELNNIEIISFKGIKGIETDPTFNQYGRRELDLSEKQKLFKELSFRDKLTKKDLLKILGYKSGYNEYGLNIEKDIEGNRTAASFVKVFSKMNINRNDLLSLELISEETGQEMVDASTGEIKILQRIKSDFEKQNFFTLWHSIYSIEEPEVLINLLVDKYAFTIEQANALSNLDFHKQGYGSLSTRAIRKILPFLIAGMKYHEACLNAGYRHSDYKTTEENLNRQLEDRLEILKKGSLRNPTVEKILNQTINLVNDVMDQYGRPDEIRVELARELKQNAEERKKTYKRITALDKRHKEITERLYNELKFARVSRNDVERYKLWEEFGGISPYDPSKTISLSELFDGGYDIEHILPKSRIFDDSFNNKAICPRSLNSGQYGKNQMTAYDFMKSRGEHVFNDFVEFVTMAYKKGNISRSKFERLMMPEEKIPDDFIERQLVETRYISREVIKILTKICRDVKSTTGSITDYQRYIWGYDLITQRLNWDKYDKVGQTTIVDDKNGNPRHLIQNWNKRDDNRHHAIDAIVIACTRQSTIQRLNNLNQIVKTKNGQNPQDALKESDLMGVEEYVKNVCPFPEQQVLNAVGKILISYKAGKRVAIQNRNPYKYKKGDKPQQFGLTPRGYLHKEFIYGKINIYEQVKVSSYFNRINDVVFDHAREILINHLSTNSDNPKLAFSSAGINKLLKTLENESTQGLIVKENALMAICFKHEYVRRYPLSEVKPKDVEFIVDEKIKAIVLKRIEELGAKDAFKNLDTNPVWLNQEKGVCIRNVRMFTGLDGLVPLHKTMNGRTFAAKNNQSGKDVDYVSTRNNHHISIYRDPEGKLCDNTVTFWDALKRKCLGLPIIIKNPKSVWDYVLSKNISDRDVVEGLPKDNWEFVTSVQQNEMFVFGLDLPTLTQAVSDKALALISQHLFRVQKMSKKSSGSIEIVFRHHLETSVDDKKIGGEIISRDLGKVVSVKSLGKMTGIKVKIDRLGRVVKIGE

SEQ ID NO: 163 - protein, 1046 aa, unidentified
  REGION 1..1046: note = Description of Unknown: Cas Enzyme sequence
MSEKSERLVFAFDVGTGSLGLAARRGNKMLEARSLLLDENYGKRDEQRKIIRAFRTRKAHLAREKYLQAVCEEVGIPVLKGRENGKKGDPRLEREFPRRGDSTVYNSALLRIMLLQGKKLEPWQVYKALHSAIQRRGFDKSVPWKNRPSNRKGSEEEDSKTAESASAYRQELIAAVGEDTQYQYPCYFAAYKMGLWDPKTHQLKQRINHHADTVRNYIIPRDLVVKELVDLLKAASRQFPRLEGSEMRIIYGPSARAYASYYPDARAEYNLKEGGENDWQGLLGQKIPRFDNRLPAPCALIPRFNVARSNDIAIYEATFLMKLKNIRFYRDHLQNKDFNESSLTVEEIHQLLKEARQRAKEARQNGETEEHIAAAYSLNKTEWKKWLKKNCHAPISTHPCIEAPSTTGRSRYSRPAARLIRELVLSGQSPADFYKDAQDLCGKKGTPYYKLSKDDLVFLRYIKGEWQNIYIPVLPLSGDWSGKSTEMDLIREQIKKLIGIQRNVLVVHRIGLFYEQLERMISLYGVPDEIIMEFIREDFMGEEAKKKLQKFQNENRKAWDQARSQARELNLSGGGNVRKLRMLREQNFICPYTGDTLSENEVDTLEVEHIVPRARGGSDNQYNKVVTRSRTNREKGDHTPYEWLTQKGEFAAFCERVEKMGLSRKKKEILTAKDPFTLDQKWDSLAETAYIARVARDVAALRCGWQPGEAGEKRHIHIINGANTAKVRGLYHLNSLLASDQGGLEPDKFMKKVRENKKHHALDAMVLSFIREWIRNPKTRQYEFPAGIDREYFRKCLENVVPYNCILPKASLQETFYGTRLLEGSAGGKTVVVRTKITELGVTFNKFDQKKALKEAASIIDPFLRDAVSEALKTRDFKLNEWQEWCQNFRHPRTGARVLKVQITAQKPDTKEYVNMAKEGEENGFRGQYKLGAQHQGYFVYLEKDKKGNDVPKVRPVYAFHSRRKVEEELKTQGCEVIGFFQSGCLVEFLNDYEHGSIVIPAGKYILSTLRKDGWFVLESLPGKPVPLAKIKDIRHSFRRVDDSDQ

SEQ ID NO: 164 - protein, 1026 aa, unidentified
  REGION 1..1026: note = Description of Unknown: Cas Enzyme sequence
MNLKYRLGIDLGTNSIGWCMVEIDENGIPFKVHKMGCRIFSDGRDPQNGVSLAATRTLARGQRQRRDRFLKRRSKLLIKLKSVGLFPSDRKIGLNLASLNPYELRSKAVIEKLEPFKLGRALIHLAQRRGFKSNRKSGNADEAKITGPAIESLDNILKDKTLGQFLLNRMNSGQSTRFRTDNNNAYELYPTRRMYEDEFKAIRSKQEPCHNVSSEDWDIIFNIIFHQNPLKQQERGGCRFLKSNDGKPLPRANVALPSFQEFKILSDVNHLAYRDGINNEYSFLAEPQKVILLNLLKTQKAAKFSKLRAKLNLPDTALFNLESDKRDGLNGDIVGYTLSKEKYFGEKWHELSIESKDEIVAYILDDTTESQNLYNKAKNEWHLSDDNATAISVLTLADFPKGMAPFSGEFIRRVIEPMRNGMKYSEAVTALGFKHSDFSQDGNEDALPYYGKAFPDACAPALKSKVADEQKYGKIGNPTVHIALNQLRIVVNSLIAKYGKPSEIAIELARNLKLPKKRLDELDKEQNKNKKINDLIREQLAELKVEDSYENRLRYKLWNELKNDSGIKLCPYSGNVIPQSILFSDRVEIDHILPFALTLDDSPANKIICLRETNRAKRRNSPFEAFGSDTEAYAKILDRISVLPGNKRWRFEADAMKKFRDTQGFLTRQLSDTQYLSKVASRYLTCICAKEKVRVFPGRLTALLRHYWGLDTLLADPESDRIVKNRADHRHHAIDALVVALSDRYYLEKIQLANKLDYLSKIQVPLPWGTMRTEANQQVKNIIVSHRLNHNPSGRLHEETAYGEVRKERRRDSQKWEIENGYNLVVRKSILNLKSSDIETIRDVTLRTKLVSFLGTTNSNDVNEWNTKLLQYKNLTGTKTIRLLKKDKSAILLASADGLHVKYIIPGDTYSITFWLLPDKKIEFSALGLFEAAKGNYVQKRHPAAKKLFTVRKGDALRTIHKGELKVVTVLGISPSETNRNLSVLHNTAANRTQKFTIQFSRIIATKTRLISIDSIGNIQDSGPRV

SEQ ID NO: 165 - protein, 1103 aa, unidentified
  REGION 1..1103: note = Description of Unknown: Cas Enzyme sequence
LTSANVNYRVGIDVGSYSIGMAAIAIDDDGKPTEILSAISLIHDSGVDPDSAKSAATRLATSGIARRTRRLYRRKRKRLAKLDKFISSQGWPLKEFEEYEDPFYPWRVRAELATTPITDKQELGEKLSIALRHIARHRGWRNPYSKVTALYAVAEPSDALVSIQEQCATELGRPIPPTTTVGQLVASMNLGKTRLRGKAKLANKANPHGKEAGLFTANKLQQSDYANEIHTIAKVQGLSNELVKQIIDHVFAAESPKGSAAERVGKDPLQPTKKRALKASDAFQQYRIAALIGNLRIRDGKENRRLTAEDTRLVFDYLRSLPAKQEPTWQLVAEQLKIDRGNLVGTAIMTDDGERAGAKPPVHETNRLMESTNIKPLAGWWKSADADARAAMVKALSNAEVDDFDSQAGVQVQEFFFGISDKDHEELDKLHLPIGRAAYSEDTLVRLTKRMIDKGMDLYEARQAEFKIPNDWAPPAPEIGERVGNPAVDRVLKATARWLNAAERQWGTPKSVNIEHVRDAFMSESSARELDRDNQQRAKRNVKVVTEMQEKLGIEGRPSRADVWRFQSIQRQNGKCAYCGTQISYMNSEMDHIVPQAGEGSTNTRDNLVAVCRECNSSKSNIAFAVWAENTSRPGVSVQKAVERTRHWVTDSGLRKPEFDKFRKQVCDRLRRKATDEPIDARSLESVAWMANELRSRIAQKFKDGDTKVRVYKGALTAEVRRASGIAGKLEFVDGKGKSRLDRRHHAVDAAVVAFTSNYVAETLALRSNMKFDQELRRKAPQWREFSGSDHVHQVEWTKWKYRMQALAELLNNALVQDRIVVMHNLRLRLGNGAAHEDTIGKLTRIKVGDAISTTDIDRASSEALWCALTRDPDFDPKTGLPENPNRMIRIHGTHLAASDEITVFPVAAASIPIRDGFAKLGSNYHHVRLFRVPNGKKYNYFLMRVYTIDLLKFRKEDLFTVELKPQTTSVRKCLPKLREALANGTAEYLGWLVNDDELLISASASIEKPIAKLQEQYGPTKRWRFAGTDSESRILLRPLQLSAEGLPSDVEKDIREIVEKRGWRISINNLFNGARVTIIRRDALGRPRLHSAAHLPTCWEVK

SEQ ID NO: 166 - protein, 1338 aa, unidentified
  REGION 1..1338: note = Description of Unknown: Cas Enzyme sequence
MKKILGLDIGTNSIGWALIDSENGFLNNIVDLGCRIIPEQDEHRDFEKGNDISKNAQRRQKRGSRRLNQRYKQRRNNIIKLCKILNIIPSGLEPLFLKTEYSGNAVILPVNAFNKGDFQHKPQELYELRNRALTDKISLQDLFRIIYHFNQRRGFKSNRKTNKEENSRDDIVDDKNNLTEISFEKVRIISVIPTGEKKGKRGKEELLISLNDGRIAVSDKFQFKNFVDKEIILEIKKEFIKSKNDFKFTFSFPSNWQKSRNELNDLIIKNGGYPGKYFFGEFLKAQQENKLFNFKVRENIVNRELYENEFQAVWNKQKELWRYENVDIDFLPGFSECIERIIPCNNKEQKQLFMSKGLGAFLKNYIIYFQRDLKSQVKSIGDCQFEEKYLEITDLKTGELKLIRNGPKCSPKSHPVFQEFRIWQQIHNLKCLNEKVEEIILNDELKIKLFDYLNERESAKKEDVEKLLKKILVGFDYSNISEHSTWVGNKTRHFFKKLFKKFDYDGENIFNDSDKYFRLWHLIYSVSDEKGIKTGLKRIDVNMPEELITALTKSIFSEEQYASLSLKALNNILPLMRCGKLFKQENVSKFAESRIKSFLNDDSDSDFDAKTLETLKKKKSYTEFCGLSYYESASLIYGKHSAKQLDLYSSPDEMIPVKQNSLRNPVVEQIVNETLMLVKDIWKSYPDLKDGEIKIELARELKSNKEERKELSRLQYENYQANEKLIEEIKRHFGDSYNPSLSDIEKVKLWNEARKQSVYTGKTLDISEVLSASTEIDHIIPRSRFYNDGLVNKVVCESSINADKGNMTAYEYMNTGTKLKKLNYNEFLSLIKYLPRGKKNLLTLKEIPDDFIQRQLKETQYITKKVKEELGKIVGNLNVSTTTGRITDYLKDQWGLSELMRNLIAPRFERLQEQFGINLIKKVDVLNRENKPSGKKRTIIKGFSKRYDHRHHAIDALIVSCTRQGIIQQLNLLNQINNNRIKPKEDMFNGSPRKFIPPTGKEDKGASIFYSLSEDAANSIIVSYKNKKRLLAKGNNWYQIFDAASNKIIKVKQTESSTIKKNWSIKGQLHKETNYGLIKYNGVLRHSSRCSLSSLTSNKISNIADNTLKNQVLTHINKSEYSGDLKKAFSPEGLMEFNSKRIIPVYSVRVIEDGLIDKVKGKTPLYDFNRKLFVEKGGNYCVAFYEHPETKLRKFDVVSFFDAAHLKVNGENPYQTEMGHGYINEGYKLIFTLSHNDLVYMPQENTQVDKINWKDKNTLFSRIYRVVKFSDDDFYFQPHFFSKEITIHKGMPKTSKDYKGEFNKGTNGTIYLMDTKRKIRNNCIKIIVDRIGNVIPLL

SEQ ID NO: 167 - protein, 952 aa, unidentified
  REGION 1..952: note = Description of Unknown: Cas Enzyme sequence
GFYPNLTIELEQTVYKAIFDDAPHAPYAVGNCALEPKDKRLPRMHRLAEKRRIYEQINNIRYATPEGECFLSRELRDHLVALAYVQGQTLNKTLLKKEISNVTDQKILHVNLHDEETSIKGFCHVAAFSDIPAWGDMNEAEQDAVIDFIAEPAMNPADPASELYSEDDFLKKLCAMLHLEGPNAESDASRAISRLAKDRSNLGITATVRVLEHLIAGYEAEVHETEGETQTIWRAHTHRTAAEACGFTAEEERIRGLQGTYSFLPYYGEILRHDVTPVHPWHKKNAAPEEAGGRIPNPVVHVALNQLRKVVNEIVGLYGKPDSIHVEFARELGMSAAKREERIKEMRKNEQENERARNALVELGLTPSRNNRIKYKLWKEQGERSLYSLKTIKASDIAACEIDHLIPQSKGGTDGMMNLCLVFEDENKAKGDMYPYDMIQKTAPEKWKEISNIIRAKNFPKAKARRFSSDAATLYPPNVPHGDSEEQAGSALADTGYTAKMGARYLRALCSDVVAVKGRITSDLRRLWGLDGLEYELFGLPISKYIVDEQTGEVTLDPDTGHPARNPLWVRKPRIDHRHHALDALVAACTTRSMVARLVREEKSGRRQADFPIPFGGCAADFRAQTLQALRRVLPSPKAEHGKAGQLHDATKYRILQPKNPAQPSEGDYLIRYRRSLNNIANKNAVANIMFNTSTIHLDNQATQTAYHQCKTIINTIESHYPAAEQALRAAEQEAAQSGRLNRSMADKAKEEAIVRRAIQLAQREGKLGASYPCLDYKRLVAVNTRLQFGYEPRNNYCMDFYETPDGKVGWECITRIEAGSSGFAPKWKQAGGRHLWSLRIGDVIEVTPNGAFRQELDSLCSATGVYLVVQQMSDGKLQCNLLHDVRPKNGRNPAIQAGLTAYVEYTRWDTGEKGLQNYCKLAARKVDISPFGKILRKHKRLWSGKKMAKKT

SEQ ID NO: 168 - protein, 1172 aa, unidentified
  REGION 1..1172: note = Description of Unknown: Cas Enzyme sequence
VQHYRYRLGVDMGIASIGTALVQIDSEGVPLKILDLGVRTFSTPEGAAERRAKRLERKHIRRKRQRLAKVRRILQEHGLLPTDTESLKQLILKEPYSLRALAAINRVSRLEDMGRCFLHMAKFRGAGFLTQQEEQQASGDEDASVPSNKDKQKTANVYRKLEDAVRDKKQTLSQYLVELLEKKMPVRRRKFLVDQNKIEHAVPRFLVKEEFRRIWETQRTFYPELTKAMEEAVYREIFQDFPHAPYATGNCTLLPRNEDGSENKRLPRMHRLAEKRRIYEQINNIRYTTPEGECFLSRDLRDHLVTLAYDKGQTLGKKLLKSEITVATGLKVLSVNLSDDDTSIKGFCHVAAFADIPTWHTMSDAEQDAVISFIAEPVLNPADPTSELYPEDEFLEKLCAMLRLEGPNAEDDASRAIALLAKDRSNLGLTATNRVLEKLTVGHEVDVPTAAGETQPVWRAHTHRTAADACGFTAEEERIRALQGSYASLPYYGEILRHDVTTIHPWHKKNAAPEEERWGRIPNPVVHVALNQLRKVVNEIVGLYGKPESIHVEFARELGMSAVKREALIKEMQKNERENEHITNELIALGLTPSRTNRIKYKLWEEQGKRSLYSLQEIKASDIDACEIDHLIPQSKGGTDSRMNLCLCFADENKAKGDTFPYDMIQKTAPEKWKEISKAISEKNFPKAKAWRFSPDAATRYDLHGDEDQTDSRLTDTSYMAKMGARYLWALCSDVVAVKGRITSDLRHLWGLDGLEYELFGLSINEHIVDEQTGEVTLNPATGYPALNPLWVRKPRIDHRHHALDALVAACTTRGMVARLVREEKSGKKGKERSNFPVPFGACAADFRSQALRALQQVTPSPKAEHGTAGQLHDATKYRILRPRPAKGDYLIRYQRGLDKIKDKNAVTKIMFNTNTISLDDETVKKAAAQCQAIISTIERHYPAAEEALAAQQAEAQSGRLPRAKEGKAKEEAVVRKAIDLAQKAGQLGSSYPCLDYKRLVAVNESLQFGYEPKSNYCTDFYETPAGKVGWECITRIDANDSGFVPKWKEAGGKHIWSLRIDDVIEITPTDELRQELDSRCPPGKVYLVVQKMGKDYLQCNLLHDARPLNGRNPAVQAGLEAHAEYTRWDTGGIGLKSYCELSARKIEISPFGKILRKHKRLRSGKKMAKKA

SEQ ID NO: 169 - protein, 1101 aa, unidentified
  REGION 1..1101: note = Description of Unknown: Cas Enzyme sequence
MKPESKKPYRLGLDLGTNSLGWFIVWLEKDGDRWRPASLGPGGVRVFPDGRDPQSGTSNAVDRRMARGARRRRDRFVDRRKELMDALVRHGLMPADIKERKALEALDPYELRAKALDRPLPPHHFGRAIFHLNQRRGYRSNRKTDRPKSGKENDSGPIKQGATKLRQAMQDTGANTLGEFLWGKHQRREGVRARNRSSGLKAEYDFYPTRDLLLAEFDAVWTAQENHNPSMTPEVRKEIEQIIFFQRPLKQPPVGKCSLDPATKPFESDPEGYRCPWAHPLAQRFRILQEARNLEIRETGKTASKLTKEQGDAVALALLQSKEVKFDKLRTLLKLPEEAKFNLESERRTVLDGDETAARLTDRKRFGKAWRSFPLERQIAIVEKLLDTEDEADLIEWLETECSLDRETASRVADTALPDSHCRLGLRAITSLLPHMEAGLGYHDAAEKAGYDHAKLPDGVLSPTGRLPYYGEWIPDAVVGSADPRDPNEKRYGRFPNPTVHIGLGQLRRVVNELIDQLGAPTEIAIEFTRALKHSPKEKVEIKREQQRNQEKNDERRKELAKLNQPANPRNLLKVRLWEELNPRDPLDRKCVFTGEQISLTKLLSEEVDIDHILPFSMTLDDSAANKIVCMRYANRHKRNQPPAKAFGSSPMIDGHAYRWDDIASRATNLPRNKRWRFDADAQEQFEKRGGFLARQLNETGWLARVAKQYLGAVTNPYQIWVVPGRLTSMIRGKWGLNALLPDHNYAGVQDKADEFIAATDDMEFSGVKNRADHRHHAIDALVAGLTDRSLLWKMANAYDEERDKIKIDPPWDSLREDLKQVLDRMLVSHKPDHGRQGKLHEDTAYGLVKEPEKEGANLVYRKGIEALNENEIERIRDRRVRDRVQNHVDAAKAAAEKKKGTPLDKKEKAGVVTEALKNFRDSVRDPHFKEGLRRVRLLKPEKAEYLVPIQSRQNGKTYKAYSAGENFCVEIFQSGNGNWDGEAVRRFDANQTDHVPNWRNGNGQARLAMRVHKGDLLRLDHEGQSKVMVVHRLDAAAGRFKLAPHNETGNLDRRHATDNEIDPFRWLMASYGTLQRMNAERVRVDELGRIWRVQPAQLTK

SEQ ID NO: 170 - protein, 1347 aa, unidentified
  REGION 1..1347: note = Description of Unknown: Cas Enzyme sequence
MPPTPPNQPDLQLAFDVGHSSLGWAVLQNSGSKTESINILGCGAVTFGADDCLASKRRIARRQRRHYRSTRQRLERIAKVLLCVLANETREDAPRLYEQLRQYLDRAPDKRAALQGAGDSFPWRLAARGLRGENSKPLTWSELWDVLRWYAHNRGYDGNQRWSSREVVTAFSSDVATQASASAASADDEAALVAAAERADEEAGVQTEAESDAKKVKEAFRWMRAYGTKTMAETMSAHVVKFEKEAVEHQQGERKEKPTRFKGLGAAFPRRSIRIIAGHRTLVRGVEWEVRSILRAHFGKLPGCDEKLEQVLCGGLPELRDDWAAIPCSDIKNHKRFEGGLLFGQLVPRFDNRIIAECPVTGGKVPGKHCHEFLEFRWAMMLSNIRVGSGSETYRDRDGQENKLRPLKADERRKVDARVRRLGFLKVEPDKAGKDGHVRAGKNELRQILIDETKCDRHNLDTLLLHPDAKDGLKLLPVKGDTTAFRVAWGSFGDPTDRKVRLKEKGEWIEKDCYLDDVLRHRFTTQLLRQKNLSLREVLRQLDRLGKLEVAARMRAEAEAEAKGKKPKLDPAKLDELLDAEFYCDKLKGRARFSREKLAEGVQQVFRKSDPLHPLEKGGCLCIDPEEQERRDAQLRQRYDCEAEVQAKVAAQAETEGKKGKRWIAWRRNLREKLRKEMTGFACPPGIAGETNNHLVRHRLEILNRLQQHLVEDYAGKDKRRIARIIVEVARDLQTMSGKTNKEKAKELNGKIKNHHFLAAWLAKELKDQRDENGRPFVIGAGLIRKARIADDLDWECPYTGKKFEPAHLVHRAFDKDHVIPRRDRLSDALEALVITPSNVNAAKKRRTALQFIKDMNLPENKTERDRLSIRTEAQFRAFVDKLKTKGHPDDSRRRKRRKELLLVEKYEEKEFTPADLAKTRHITKLAAQQLAAAFREFPELERPPVISITGSVTAAFRDKTWRLLPLIGTANAEVTRLHEEKQKANAEGRDFNLKKAVRDVTHLHHALDAVAIGIITALLVPPGYAGRAGLNGELARLIHKGKLTAEERKRFEELRHQLGLPKFYRWAAGRYDDGNQQSLQTNQGGTLCIDDLPESIKQQIRARLAEKRVVQHIPADMTGLGRRLEENTRGVVVDSSGSPVMADGAVKLRQRSREADGKLTPSEESYSYEAPKKLLGFRPQGPGKMKAHRGVRVIRDNFGLAILDHAAEGAPRFRVIPWHKVWHQIHRGMNGQPSLVELNGGKVPRILRNNMSIRIGKFKVLKPARTLENSEWTVDSIGDFEGTVKVDLKPRDVVDTRYEVPDPNDATGKKKIRKTTEGCKLGIDFERVYEGGLTILPQRLTGISVR

SEQ ID NO: 171 - protein, 1227 aa, unidentified
  REGION 1..1227: note = Description of Unknown: Cas Enzyme sequence
MKKTLGLDLGSNSLGWAILDDITGDILDKGVIVFPEGVDLDAKSSADTPAAIRRSARMARRMKFRRKLRKWHLLNILIDADMCPLTHAELDEWKKTGRYPLGNKAFLEWLKATDTSNPYCDRAAAASVKVPPLTLGRALYHIAQRRGFKSSRKDETDLADETAGQTKQLDKELGAVKTDIAALTKEIDAAGCKTLGQYFFKLLQDEKGKLNKTRIRCRYTGRIEHYEKEFAVIMDVQGYSSGDGLRTKLYKAIFSQRPLRSQDHLVGPCPLEPRNPRVQIGHPAFEEFRMLAFVNNLSLEDSDGNCRDEQGNILYPLSAKDRAVICSALMKAAPSIKFGDIVKLFKKDPRFKTQGLKFHYYRLDDSVATCQTRHKIKSAFNGVPYDEQMVFDALTFFDDNDKLNAWFRKHFPALDDAAVKKLVSIHPKEGNASYSLKAINKMLPFLRKGFELSQARFLAKLPDVIPDFAANEQAILQGLDEARWAFREERRRYGEMDSAERRQVKAPLLFDFYQRYLLNNWNVTEEKWNRLYLHGEGTYVKETEYKVKGKIVQLERPRLPPVQLRMIRNPLVQRAMTTLRRLVNYLGDHGKLEETDTIRIELARTVNDFATRKAWQDWQKARQCLRAEAAAEIAKLGVAVTEDAIDRYVLWKEQDGVCLYTHKTISLSDLFVGNKFDIEHTIPRSLSGDDSLANKTICEAAYNRQTKQGRIPRECPNWDEIDTMLRPWREKIEQLEKTYRSQTRSARAKTDPAQRSQARVKALVTKFELSYWRDKLRRFEITSDKLQSPESGLSGFKKRQLVDTGIMCSHAVELLRSVYPATFAVNGAATAFARKAWGIQNDEAKDRTEHTHHAKDAMVIAALTPARFTSICTALKDDGAEHRRECDVCPPPYEGFAEKVRHACDEILIKHVMRQTTLRQSSKRNVLAKAHPPKDNPEGPLIKAVLSRGDTVRGALHKETFYGCIQTPGQNGRQFVVRKSLLGPVKDAQAIVSKIIDPAIRDIVNRRLKELVASEVKNVSAGDIRMPSGVPINKVRIAAKTTNPSTLRDHAIPSTSPYKTPYYVTFAEGSNFRLGLFNDAGRMFVIPDNSLVWAQNHKRPDYIPLDQRPGFIGYVRPGTMALAYHEGHSEELEVMPSTELFKRLYKVVKFRDDGRVTFRLHIEARASTVLEGELASTGFNKKGESKINYDVPYRLLCLSPSTYTKQMFFEGIHFRMMLDGSIQFIRK

SEQ ID NO: 172 - protein, 1221 aa, unidentified
  REGION 1..1221: note = Description of Unknown: Cas Enzyme sequence
MKKTLGIDLGSNSLGWAILDDITLDVVDKGVVVFPEGVDLDAGNLLETPAAVRRAARMGRRMKFRRKMRKWHLLKVLIKAKMCPLTLEELEDWQKHGSYPLSNRAFLDWLKSTDTSNPYCDRDAASRGKVAPFVLGRALYHLCQRRGFKSSRKDEAMAYDEETGELKKPDKETGKVKGGIAALTDEINAAGCRTLGQYFYKCLEAEKGKFAKTRIRCRYTGRVEHYENEFAVIMDVQGYAESDTLRENLHAAIFKQRPLRSQKHLVGNCPLEPRNPRAQIGHPAFEEFRMRAFVNNLTLEDEDGNWRDDDGDFLYPLTQADREAICEKVSSVGKATFKTIKPLFKKDSRFAEKKLHFHYYDEDDAIPSCPTRLNIAKNFGEIAYDEQVVFDALTFFDDTERLMAWFRKHYPALDEKQVAKLASIHPKEGNANYSLKAINKILPFLQRGFELSHARFCAKLPEVVPDYAARGDEVLLHIEETCRQHKREKSERAAMARQIRDKLPKLPTLYDRYAGMLERDFGVTPEKFNELYLRNDETYEPETCYYPHGKNRECVKLAHPRLPPVQLGMIRNPLVQRSMTTLRRLVNYLAEHGKLDADDTIRIELARSVNDFATRKAYQEWQKERKELRDKAVSEITKYGKSPTEDAIERYVLAEEQGWMCLYTGKKISISELLDGNLFDVEHTLPRSLSGDDALANKTICDSAYNRQVKQGRVPLDCPNWNEIDVRLRLWREHLEELEKTSRNQLRKVRGVSDPAAKSRARVKALVTKMERDYWRDKLRRFDMTMDKLTAHAGEGLGFKRRQLVDTGIMCSHAVDLLKCVYPMTFAVNGAATAFARKAWGIQGDEVKDRSEHTHHAKDAMVIAALTPARFTAICTVLKDDGAERKRECDVCPPPCEGFAVKVRNATGEILVKHILRQTTLRQSSKRNALAHAHPLGGVKGAKTVKYVLSKGDTVRGQLHNDTQYGCITNPITKEKVFIVRKSLVGPISGQTGCDKWIAKIVDPVVKSVVEDAVFKMKEQGIKNIEPGMIRLPSGVPVNKVRIKARIAAPYVLRHHERPSKHGYKENVYVSSSPNFRLALYLRNGKHVYETESALVWAQEHKKTSYQPLESKTGFIGYVYPGAMAIAYDEGEIDALRTMPARDLRLRLYYVRVLPSAVDSHVELQYHLEARIKKDIPKPPSSIDIKKPSGLIRISAGKFMSNFLFEGIHFRMMLDGSIKFI

SEQ ID NO: 173 - protein, 1371 aa, unidentified
  REGION 1..1371: note = Description of Unknown: Cas Enzyme sequence
MKRILGLDLGTTSIGWALVNEAENDKEKSKIIKLGVRVNPLSTDELTDFEKGRPLSVNADRTLKRGARRNLQRFKQRRKNLIDILITNNFITAKTPLTEIGENTTHQTLLLRAKSAKEKITKEEFARVLLAINKKRGYKSSRKAKNEEEGSLIDGMSVAKELYDSNLTVGKYVYQLLENGGKYIPDFYRSDLQNEFDLVWNFQKQFYSEILIDELYKQLQGKGKKQTWAICKEPFNIVGEKRLTKGASLKLENYKWRVNGLSKQLTLEQLAIVLQEINNNLNKSSGYLGAISDRSKELYFNNETVGENLYKQIQNNSHTSLRNQVFYRQDYLDEFEKIWETQAKFYSELTNELKEEIRDVIIFYQRKLKSQKHLISECEFEKHHKAIPKSSLLFQEFKIWQRLNDVVFTPKNKFQNDKIQKFELSLELKEQIFEELNLRGNLKIADIFKLIGGNPKEWNCKFKELEGNRTNEVLFNTYQKIAEYEGYGFDWAKKSALEIKEELRIIFSEIGVSSKILDFNSDLEGNDFDKQENYQLWHLLYSAEDDSKVSEEDKIIYGNSNVALKKKLHSKYGFKSAYGAMLANVSLQQDYGNLSARAIKKILPFLKAGHEYSEACKLAKYNHSHSLTAEELAKRPLKDKLELLKRNSLRNPVVEKIINQMVNVVNQVIETHGEINEVRIELARELKKSAKERAEMATNINASKTKYEGFRKLLKNEFGIKNPTRNDIIKYRLYEELKDNGYKTIYTNEYIPREKLFSKEIDIEHIIPKAKLFDDSFSNKTLAYRKVNLDKRDTTALDFINDKFSDDIDNYKLRIETLFNKGKGDLSKAKRNKLLMEEKDIPNDFIERDLRNSQYIAKKAKQLLEEVIRDVNTTSGSITSRLRDDWGLINVMQELNLPKFKAIDENLIEQVEKKDGTFKVRIKDWSKRNDHRHHAMDALTVAFTKRSHVQYLNNLKAKSDKKGAIYGIQELETFINSSGKRKFIKPMPNFREEAKTHIESILISFKAKNKVVTKNINKIKIKGKDKFIKKIQLTPRGQLHKETVYGKIKDIIVKEEKVNAKFDQEKINQVTKPSYRIALLKRLEEFDGDSKKAFAGKNMLIKNPIYIDDTKTKIVPEKVKIQFFEEIYTIRKEISHDLKIDKVIDKGIQQILQKRLDEFNNKPKEAFVNLDKNPIWLNEEKGISIKRVTISGVTNVEALHTKKDHLGNEILKEVKEQAVDFVSTGNNHHVAIYKDEKGKLQEKVVSFYEAVANVNADSPIINKEFNKSLGWEFLFTMKQNEMFVFPLDNFDLKGIDLLDSENSNTISKHLFRVQKIATKNYMFRHHLETTVDDIKMLRDITYINIRSTEPLRNIVKVRINHLGEIVQIGEY

SEQ ID NO: 174 - protein, 1360 aa, unidentified
  REGION 1..1360: note = Description of Unknown: Cas Enzyme sequence
MKQILGLDLGTASIGWALVNEAELENETSEIIKLGVRVNPLTTDEQTDFEKGRPLSINADRTLKRGARRNLQRFKQRRNNLIKVLIDNEFITKDTPLTEIGNETTFQTLALRAKSAKEKIAKEEFARVLLAINKKRGYKSSRKAKNEEEGSLIDGMAVAKELYDNNLTVGQYVYQLLEKGGKYIPDFYRSDLQSEFNKVWGFQKQFYPDVLTDEFYKVLEGQGLQNSRKRFLAIHQVYTAENKGKRDAVKKQHYKWRSEAINKQLLIEEVAYVLVEINNSLNKSSGYLGAISDRSKELYFEKETVGENLYNQIKSDPHIRLKNQVFYRQDYLDEFEQIWETQAKFYTELTVELKETIRDIIIFYQRKLKSQKHLISECEFEKHHKAIPKSSPLFQEFKIWQNLNSLEFKNKENKEKVFFKELDEDIRQVIFEELNLRGGLKATALLKMLNLDKKEWALNFKDIEGNRTNEVLYNVFQQILEYEGYGFDWSKKTAIEIKDELSNVLPEIGIRKEILDFDAEIGGNEFDKQPSYQLWHLLYTAEDDIQLKNKLQEKYGFKSEYAGMLAGVTLQQDYGSLSARAIKKIIPFLSCGNNYYEACALAKYNHSHSLSKEEQENRILKGKLELLKKNSLRNPVVEKILNQMVNVINQMIEIYGKPDEIRIELARELKKSSDERKRMTEGINKATALNDGIRKLLIKDFGIKNPTRNDVIRFKLYEELKSNGYKTLFTDTYIPKNKLFSREIDIEHIIPKAKLFDDSFSNKTLAYRNVNLDKADTTAFDFMSVKHANDLDNYKLRVETLYKNKEISKGKYIKLLMPEKELPDGFIDRDLRNSQYIAKKAKQILQEVVRTVNTTTGTITSKLRDDWDLINVMQELNLPKYKAIDKSLIEQVEKKDGTFKIRIKDWSKRNDQRHHAMDALTVAFTTYNHVQYLNNLNSARDKENSKLYGIRNKVTKVYEYSNGRKKRKFVPPMPNFREEAKTHIESILISFKAKNKVVTRNINKTKVKGKDNFKTRVQLTPRGQLHKETVYGRIKEIVVKDEKIGGKFDIPKINRITKPIYREALLKRLAENDNNPKIAFTGKNALSKNPIYLNVSKTKTIPETVRLQFFEDNYTIRKEISPDLKLDKIIDIGIKRILENRLIEFNKDKKKAFSDLDKNPIWLNKEKGISIKRVTISGVKNAEALHTKKDHIGNEVLKDGKEQAVDFVSTGNNHHVAIYKDEKGKLQEKAVSFYEAVANVNAGFPIINKEFNDWEFLFTMKQNEMFVFPAEGFSLSEIDLEDEKNASLISEHLFRVQKIATKNYMFTHHLETIATTGEILKNKKQLSGHSYNFIQSTEPLRDIIKVRINHLGQIVQVGEY

SEQ ID NO: 175 - protein, 1208 aa, unidentified
  REGION 1..1208: note = Description of Unknown: Cas Enzyme sequence
MKRVLGLDIGVSSVGLAIIKEEGGKKSIEKLSVRIVPEDPNFHGKFYSGNTASKNFDRTIKRGTRRNNQRFKARRDKLYKVLKENKMFPNQEFFDLTALKLYGLRAKAVTEEVSLHELGRIFILLNQRRGFLSNRKSISDEENSSEYKERIAILEKELDRKTIGQKLFLELQDGNNVFDVLLRERTYQRNSYIEEFDRIWDEQKKYHSILTGGVNEDESKGTLYDLLRNKTIYYQRPLKSQKGLISECPFEKYHKAVAKSSPYFELFRIWQKVNDLYWKTSDGESFEPSIKQKQQIKDALWFGNELNPKYKLTVSKIKSILGYGRNDKVYLNFTELDGSRTYSILKNALEEAGIENSEQYLFFNLDKNDEKGGLFELWHITYSLPLEKEVVDTLMKRFGFSEEQSRIIAKRVGYPSDYGSLSTRAIRKLLPYLEKGLGYSVACDKIAYDHSGYKTEIELQKKLKHLKKNKLRNPVVEQILNQVVNIVNTVIEEYGEIDEIRVELARELRNSAKTRKNISQLNTRNKKNNDRIRRVLKEEHGFKLVNGRDVKRFILWEESNHKCLYCNSSITGTDMLTGNADIEHILPKSRSFNNAMNNYIIAHKKCNTDKGQSTAYDFMDSKGTDVLHQYVLKVNDLYKDGKGSLTKVKFENLLCKGEDIPSDFVERMKKDSQYIAKETVKMLRTICPNVYTTTGQVTDFLRDEWELKNLLQELTFDKYRAIGQIEEKTIKTNGEQTKTYKRIKDWSKRDDHRHHAVDALICALTDQKIIFKLNNLNKIYQFKKSTLNKDEIENFEEFLESKFSFKEFVEHQENVINCSIPNIRTEAKKHLENIFISFKKENSKVLTRNINQPRNGKEQTTWVPRARLHEDTVMGSVKRIAKRKMKINDKISINDIEMIVNPEIKELLYQHLAKFDNNPKVALATKVLKKELIVYKGNELKEVVVYERVNTKRVKVSENITDAQIEKIIDNESKRAVKQRLNVGKIKEAFKNLSENPIRLKNGMVLKKVTVSDESKVIEIATKKDRFGNKILDKYGREIPIGYVKTGGNHHALIYKDENGKYNDKVISFWEAVAIGLQNIEEHKKPYPIINRNNDIELGDFQFSMQINDLFVFDLKHSEHPQDEKEVDFFDENNRKLISDKLFRVQKLSKNNSGVFQVDFRHHLETSVTRNDNELRTVSWERFQSNSYLERITKIRLNHLGQIIKIGE

SEQ ID NO: 176 - protein, 1369 aa, unidentified
  REGION 1..1369: note = Description of Unknown: Cas Enzyme sequence
MKKILGLDLGTTSIGWAFVNEAENTEETSSIQQIGVRVNPLSTEEQTDFEKGKSLTLNADRTAKRSARRNLERFKLRRRNLIALLIEAGIISETTELSENGKGTTFETLALRAKAANERIEKNELARIFLSINKKRGYKSSRKAKNEDEGQAIDGMAIAKRLYEEDLTPGQLCLKFLKEGKKILPDFYRSDLQAEFVKVWEFQKRFYPEILTEKIKLEVEGKGQRATSAILKKEFDIYTAENKGTREEKRIQAYEWRSKAISEKLDISEVAFVLAEINNNLNASSGYLGAISDRSKELYFNKETVGQYLYKQIRQNPHTRTKGQVFYRQDYLDEFESIWETQRNFHPELTEKLKSEIRDVVIFYQRRLKSQKGLISFCEFESKQKLVLVDGTKKLKTIGARVAPKASPLFQEFKIWQNLSNVIIKNKKTKELFEFGLETKELLFEELNLKGNLKKAEVLKLVTDNPQEWELNYSELEGNRTNQVFYEAYQKIIQSEGSEDFDFKKLTAREVKEVVKSFLESIGVNSKILEFDPMIEGADFEKQLSFQLWHLLYSYEGDNSTSGNERLLQKLESKFGFKREYALVLSNVVFQDDYSSLSAKAIRKIFPFIKESKFSEACELALYNHSKSLTKEANEKRSLKPILDLLPKNSLRNPVVEKILNQMVNLINTIIKDPTMGVPDEIRIELARELKKNAKEREEMTQQINKAKDNHDKYRKIIQSEFGVSNPTRNDLIRYKLYIELESVGYKTLYSNTYISKDKLFSKEFDIEHIIPKSRLFDDSFSNKTLESRQVNIEKGEDTAYDFVSQKYDGSRLNQFTATVELLFKDGKISKAKYKKLLMQGNEIGEGFIERDLRESQYIAKKAKEMLFEICRSVLSTSGSITDKLREDWDLVNVMKELNLEKYRSLGLTEFVELKDGNKKEQIIDWTKRNDHRHHAMDALTVAFTKHNHIQYLNNLNARKNENSKNHAVIMAIEQKEVERDENNKKRFKAPMLNFRSEAKKHLENTLISFKAKNKVVTRNKNKVQGSKKIQLTLTPRGQLHKETIYGLSKKGFVKEEKVSGKFDRVMIDKISNPIHKMALAKRLEEFGNDAKRAFTGKNAPDKNPIWIDQEKTKKLPEKVKILSFENQYTIKKEVSPDLKLEKVVDEAVRRILQQRLSEFENDPKKAFVNLDLNPIWLNKEKGICVKSVTITGVNNAEALHTKKSHLGEEVLDEYNNPIPVDFVSTGNNHHVAIYRDASGNLQEEVVSFYEAVARVNQEMQIINKNHKEGWEFLFTMKQNEMFVFPSFAFNPKEIDLLDPKNYVLISPNLYRVQKFTIKDYFFRHHLETNVDMNGSLKNIAWRREGLNGLNGIIKVRLNHLGQIVKVGE

SEQ ID NO: 177 - protein, 1370 aa, unidentified
  REGION 1..1370: note = Description of Unknown: Cas Enzyme sequence
MASKTILGLDLGTTSIGWALVREGENADIIKTGVRVIPLSTDEIQNFDKGKSITTNADRTLKRSMRRNLQRYKLRRENLIEILIEKNLINETSILAEVGNASTFETYKLRSQAVDQRVELDQFARILLMLNKKRGYKSSRKAKGEDEGSAIDGMDIAKELYERNLTPGQLINERLQLGKKSIPDFYRSDLQSEFDIIWNHQKQYYPDKLTEELYQELLGKSKTITASILRKQGFDGLELKGNLSEKKVARYSLRAKAVNSKCSLEEISEILPEINNNINQSSGYLGAISDRSKWLFFNQLTVGQFLYQQIESNPHAILKNQVFYRQDYLDEFNRIWEKQREFYPEILTQELKQEIRDVIIFYQRKLKSQKSLLSICELEGKIIEIDDNGIKKKRKVGSKVCPKSSPIFQEFKIWSQLNNITYSNEGSRKSLGISLELEQMQLLYQELNWKEKLSANEVLRLLNLKGYQLNFNEIEGNRTNASFINALNDFFVKEGHDELVLSKMNSAELLDTLKKLFPIYGIDVSLLNFDSNLGGQHIENQAFYNFWHLLYSFEGDNSKSGIDKLKTALEAKFGFPFESNTPIANIKLSDDYGNLSVRAMRKILPFLKEGNRYDLACTLAGYNHSHSETKEDLSNKVLLDRLEILPKNELRNPVVEKILNQMINVINTIFETYGKPDEIRIEMARELKKSAKERENATKAIRQITDEHIKLKRELQAEFGLPNVSRNDLIRYKLYLELKDNGFKTLYSNQPIDRSKLFSSEYDIEHIIPQSKLFDDSFSNKTIELRSYNLKKGNDTAFDFISKEFGEEGLKEYEARVKALFGNQLGKKSKYRKLLMSETDIPKDFIERELRDTQYIAKKAKDILSTVVRHVSTTTGSITEKLREDWQLVDILKELNWNKYDKLGLTETKVNRHGQKVNRIVDWTKRNDHRHHAMDAITVAFTKREYVKYFNNLNAKSEKDGEIYKILKTETYFDKEQKRRFNPPMPLSQFRARAKEHLENTLISFKAKNKVSTKNKNAIKTTKGKITTVQDTPRGQLHLETVYGSSQYYSSKVEKIGANFDLEKINKVANSKYRKLLQKRLEENGNDPKKAFTGANSLSKRPIFLNALETYTLPESVKLVEFDTRYTIRKPITPDIKIDKVIDKGIQLILQERLNQHHGDAKKAFSNLEENPIYLNKEKGLILKRVTIQGVNNAVALHNKKDHFGKEVRDAKGNPIPVDFVNTGNNHHVAIYKDEKGNLQEEVVSLFEAIARKNQGVEIIKKQHELGWEFLFTMKQNEYFVFPNEATGFDPAEIDLLDPSNFSEISPNLFRVQKIGKGDYWFRHHLETELIDRIELNGSAYKRIRNPKSMNISIKISINHIGRIVNVGEY

SEQ ID NO: 178 - protein, 1465 aa, unidentified
  REGION 1..1465: note = Description of Unknown: Cas Enzyme sequence
MSSKTILGLDLGTNSIGWALINQDFNEKTGKTLGMGTRVIPMPQDILGEFDKGNSVSQTAERTRLRSARRLRERYLLRRQRLYRVLNILGFLPDHFAQKIDFGIRPGQFKDDSEPKIAYDKTGFIFQTSFAEMLEDFKINQPELLNRTNRNGEPVKIPYDWTVYYLRKKALTHKIEKAELAWVLLTFNQKRGYYQLRGEEEEEIANKLVEFHSLKITEVKADQHPVKTKDETWYSLTLENGWVYRRSSKVPLEDWEGKTKDFIVTTDLNEDGSAKRDREGNEKRSFRAPGEEDWTLLKKKTERDIEKSQKNVGEYIYDTLLQNPNQKIKGKLVRTIERKYYKEELEAILKKQIEFHPELQQEELFVDCIRELYRNNENHQHNLNSKDLQHLLIDDIIFYQRPLRTQKSSISNCSLENRKFKDANGNEQVAPVKVVPKSNPYYQEFRIWKWIWDLNIYRKEDEGNVTRQFLKSAEDYGFLFEELAKRKEIKQEALLKFLVERTGLKGKPASAEANKYRWNFVEDKVYPMNETYALIATRLERVNGLPAHFLSKTNEFQLWHLIYSITDKTEYEKALKTFARKHKLDEASFVEHFRKFPPFKSEYASYSEKAIKKLLPLMRAGKFWSWEAIDSNTRARIEKLTTGEYDETISHRVREKTKELTEPHHFQSLPDWVAKYIVYGRHAEATDLTKWNSADDLEHYLQDFKQHSLRNPIVEQVMTETLRVVKDIWQQYGNGAKDFFNEIHIELGREMKKTADERKGLSKQISENENTNLRLKALLAEMMQQGDVENVRPHSPTQLEILKIYEDGVLNSDIEIPDDIQKISKTAQPSSKELLKYKLWLEQKYRSPYTGEIIPLSKLFTPAYEIEHIIPQSRYYDDSFGNKVICESAVNKLKDNQLALEFIKNHHGEKVQTGFGNTVTVFELEAYQEFVKKHYAKSRGKKTKLLLDEIPEQMIERQLNDTRYIGKFISAVLSSIVRESENDDGVNSKNIVPGNGKITAELRHDWGLDDVWNDLILPRFERMNALTKSAAFTAFSKVHQKQLPTVPLELSKGFQKKRIDHRHHALDALVIACATRDHVNLLNNLHAKSDNMRFDLQRKLRRLEKVKYFSAKENRLLERNVPREFIKPWASFTADAKTILETIIISFKQNLRVINKASNKYESFKDENGNLRLGKDGKPKKALIPQTKGYNWAIRKSMHKDTISGQVTLPRVKMAKGKITTATRKAIDSTFDIGTIESITDTGIQKILKNYLAFKGGNPELAFSPEGLEEMNKTIEKYNDGKPHKPICKARVYETGNKFPLGQTGNKDKKYAEADKGTNLFFAVYWDNEKKKRNYESIPLNEVIEHQKWRATLPVAEQRQTPIIPVNRENGEFLFSLSPNDLVYLPDGNEDTIKLTTGPTRIYKVVSFSGNQCFFVMQTVATSIVNKAEYTTLNKMERSIDGKMIKESCIKIRVNRLGQIEANQT

SEQ ID NO: 179 - protein, 1070 aa, unidentified
  REGION 1..1070: note = Description of Unknown: Cas Enzyme sequence
MNVLGIDLGTNSIGWALVDNAAEKILATGVRIFEAGMEGNMSDGTQESRNLARREKRQLRKQHDRRARRMRKILRTLQDAGLMPVADNMAEAIVQIDAQALQRLKTEANAQTLAHVVPYRLRAEALDNRLDNFEMGRALYHLAQRRGFKSNKKADAKEDEKEAGKVKTGISELAQAMEAANARTLGEYFSRISPEEERIRGRYTARKMFEDEFRAIMAAQRSLGNAALTADYEKVLYKAIFHQRKLKSCSHLVGFCPYEKGKRRAPWYHPLAQRFRVLQTLNHLRVVLSDAERSLSPEERQTLLDILLRQRSVTIASAKKAIGLGGKKNTCTFSIEEGGEKSLPGHQTNAKMIEVFGEERWMAMPEAEQLAAIADVQSYENDAALKKRGMAHWKLTDEQATLFANTVLPDDYAGLSLAAMKKIVPRMEQGTEYMTAVTDVYGDTLRTDTVFDSLPMIKGIGRTRGIMPDLRNPAVERSLTQLRKAVNPVIRKFGKPDAIHIEMAREMKKSVKEKKNATKKMREQEKRRKDAIGELMAQLPEFQTNEPRRRDIEKYLLWRECREQCPYTGEHISLTDLFGDHPQFDIEHIIPYSVSLDDSFVNKTLCHARVNRTDKRNRTPWQAFSEDAARYEAMLARVGKFEAADHVRLEKLRRFKVEDTTEFSDFSNRQLNDTSYACKLAKGYLATLYGGTYDAEKKQRVVAVSGGITATVRNFYKLNRILGEGAANPQSDAPVRKSRSDHRHHAVDAIVVAITSQGTVNTISRAAADYEGVNTRLMYQGDTDYWDGFLNDARRAIEGIKVTHAASRKARGQLHEETIYGRVKDCEGNEIKGKVSYRKKLESLSEKDIKQIADATVKELVVEKLSELGIYDAATGKLDAKKLSSAFSNTDNYPWMMCSDGSQGPQIKSVRCHKDLATMDVGDAAHPHPVVSGNNHHVEILEVSDGKGGVKWEGVCVSMFDAYQRKKQNLPVVQRDHGEGKRFVFSLAISDIIECDIDPSNPKALYVVKAVSQEPRIEFARITDAREKGERKKEEKETKMELRKRIEPLRNLNMKKVTLTPFGEVRYAND

SEQ ID NO: 180 - protein, 1207 aa, unidentified
  REGION 1..1207: note = Description of Unknown: Cas Enzyme sequence
MKKVLGLDIGTTSVGWAVVEIDETNSKNQILGLGSRIIPLTTSEEQEFSRGNAITKNRERTNKRTARKTLGRYKLRKSELNALFAELSIEIDEQLFKLSAIELYGLRDRAVKSRIELNELARIWFHLNQKRGYQSSRKSNSEEESDSQYLKAISDREEKLFFNGEYSTIGSFFYNALVKAHKDGEQVTIKKNIFNRASYVKEFDLIFDKQMEFYPGILTEKLRDKVKNQIIFYQRRLKSAKHLVGECQFELHHKTIPVSSPLFQLFRISQDINSLKLEWNEERKKMERFLTIEEKNLLMEELQNNDKLSKSALLKLLNIPSKGYQINLKKEIKGNITRVAIASALRDAGIDKADWLRFDLIADDIRNTENYQEVDTETGEVFEYLPKIINANFEQQFYYRLWHLLYSSEDNVVLQNCLVNKFGLDIGQAKILASVVFKQDFGSLSSKAIRKLLPSMLEGVPYDKACTIVGYRHSNYETKAERMVRELIPITELKNLQKNSLRNPVVEKIVNQVINVVKAIYGTYGAPDEIRIELARELKGNIDERKRLFENNNKANKRHQEIEKTLLEHPEFRGSRVSRKDIERYKLWEELDKRSPYEPEKIISLGQLFSGEYEIEHIIPQSRLFDDSFQNKTLSTRAVNKEKGNRTAFDYMKSKGVNEFNAFLDFVKYYHDNRSKDGKVGLTKSKRDKLLYTQKDIPDNFIERQLRETQYITKKVKEILTDVCVNVWVTSGSITDYLRHHWGYDNVIHDINFPRYKEAGLTETIIVNQKEPDGKISVKKVERIKDWSKRDDHRHHAVDALTIACTKQAYIQKLSRLNQELMAKEGESKHAALRDSGELGLKKMVINGQPFETSAVKSAVENILVSFKAGKKVATVSTNPYRHSGSKNKVQQQTLVPRGQLHKETVYGKVRQYGKVKINARFDTCNIDKIADANVKQLIKDALTANGNDAKKAFKTPLLNPLTNKQVIEATVFTEVFTTKTALDDNFKAEWTKDILDKRIRNLVTERLAAFDNKPKEAFRELSKNPIQHPAGFPVKSVTLDARLNDLVSLHKDEKGNPIDFVSTRNNHHIAIYKDDEGKLHEEVVTFWEALERKKQGLNVIKKEHENGWQFVTSMQQNEMFVFGLSKEELEEAIKKDKYELISSHLYRVQKMSKKAGGEIDLMFRHHTETQLVDNNEAKKMKRFLNIRSIKNLVGIKIKINKLGGME

SEQ ID NO: 181 - protein, 1064 aa, unidentified
  REGION 1..1064: note = Description of Unknown: Cas Enzyme sequence
MQQVPYILGLDLGAASIGWALLAAGDDGEPVGVLRSGVRLFEMGSVGTLDDFQRGKEESPNAARRAARQMRRQHRRKARRRQRILVLMQKYGLLPPGNVRDTNARSAFFNALDAALLAQWLNRHTASCSPAEAKRLSCDPDFLHVFPYRLRAEGLTRPLSAHEFGRAIYQLSQRRGFLSNRRTEAEEDEDLGKVKTSINGLQAEMAAAGAETLGQHLAGLAPSVSRIRGRYTSRDMLTQEFDLLWERQRVLHPAPYPVHLREAARNALRDAIFYQRPLKVQANLVGFCDLEPGERRAPKYADEAQEFRLLQRLNDLVWYDRQLVSHRLADNPEHYARLRDAMLKVDSMTFPAMRKLLGLPQGSKFNLEEGGEKKLFGHRVNARMHAVFGDAWDGFAPEKRAAILHDIISMDDARALCGRGRRVWGLSEEKAVQFARPLPEKGYASHSLKALRTLLPAMRAGESYGTVRPRLYPPRYGDAPQDTLPPALDAMSTLRNPVVLRCLTELRKVVNAIVREHGKPVAIRVELARDMKRSRKERTDYSARNRKQESQREKMAERLMTPDAGNARIAVPRRNDVEKLLLAEECGWQCPYTGRMIGWNDLFGPHPQFDVEHILPYSRCFDDSFLNKTLCHAPENRAHKRGRTPHEAYAADPERMDAILRRVEAFQGDAATCRAKLARFRAPTMQEWEDFAARQLNDTRHASVLACKYLGLLYGPQANRHVQASRGGITAMLRGLWGLNRLLGDGGKNRGDHRHHAVDAIAVAATSRGMVQALQRAAAQAEAGRVNRLVPRDMVPLPFEGFMEQADTVVLSILPSHRVSRRVRGALHNETIYARRELPDGGVGYAVRKRLDDVGKGKPVGSDAANSFTAKLLDPGLAPSVAMLLMGSVPRRDDDDSPPPVRSVRVLQAGTPVPVGKDGRLCQTASNHHAPVYAVPGKKGEEWVCPGVVSLLEAMQRKEAWKKSAGGPVVDRRGPEGARFLFTLSSGECIRVRVDGRDEYLRVRTVYMDRGKPMVEGVRIQDARKKDDIKKAGNYFKLSMRQLQQGGCEKVVITPLGTVVPCRD

SEQ ID NO: 182 - protein, 1580 aa, unidentified
  REGION 1..1580: note = Description of Unknown: Cas Enzyme sequence
MKKILGLDIGTNSIGGALIELDDKNYGEAGKILWMGSRIIPTDTNLLRQFETGQKLNSGTTSTPAAERRAKRMARRIKERYVLRRTRLIRAMKVLGWLDTEFPEDFKKYFDSLGEQTHEGKTYRISDALSFSEATVREATKLLGVPYRENKKRTSSQKARVKVYDKLVVPEDWIVWYLRKKALSERVTKSEFARILYMMNQRRGFKSGRKDFKEQGEENVLRQWVELVTIQSVTEDSDYKPGKDGKKRYLLMGHGEEKNRDYTWDAKRYKMPDWQGKSYTLLLSEKFDGKKWKFLTPQNPTADNWSLQMVSLDNQLDKSGDHPGEFFFHHLATDKNYKIRQQVVKRKRYQDELRTIWTKQQELWDDDPSPDNPQLGDASKLEELARTLYPAQSKFGGPKYKEIVANDLFHAIADDIIYYQRDLKSQKDSVSGCRYEKLYFIKKGDTRSVGRKAAPISSPEYQEFRIWQDIHNIRAIEKEAVRTNEILPDNGQKQALFQFFETHESVSENDILKIMGLLQEKKKGAESNYKINLFANRTSLKGNETKDRFRKLFQKHSWSDGLSLLDNRDILNHFWHIAYSIPQYDTDSNTANGRANALKKWAKQNVKNSDRKEIASIGEVPVPVVKAISIMPDFPDGYAALSLKAIRKLLPLMRIGDWEWKNIDESTQKRIDHVLSIASDRTKIKHETDTDTYVDTTTGEILEKQVYQYIRKHGFTDRNQFQGLPMYMAAYVVYGRHSEQEEVPKYNTPDDIDVMKLVPNRAFNNPIVEKVIRETLCIVRDLWKSNSDWRPDEIHIELARELKKNAKEREEITRRNKSDREEKERIRVILRELLNDPHAFAGNTRPNPDAPKDVEKFRLWMQQAENKPEELYEPSGNQVQRYRLWLEQECFSPYTGKPIPLSRLFTEEYDVDHILPRSRIKMDGMDNLVVVEHDVNRPGDGDGKGNDTAAQYIKRMAGRKVKGHSILTWDDYEARCRRTYKGSKLKNLLREDVPDDFILRQLNDTRHITRKVSQMLKPIAKAQEGLVCTTGSITSDLKNLWGLNDVWKDILKPRFERLERLGMGQFIFPDDEHPGRYHFRVPDQPDFESKRIDHRHHALDALIIAATTRGHVKYLNTLNAEESDTELRQLRTSLVVDGATPRSRKFKTPWKQEDFCREAKKNLEGIIVSFKQQKPPISKPSNKRQKWIEKNGKWQKELIEQKPNSRWIAVRRSMFKQPQGVILLKMKRILNEKQFLSAFEIELAYMKAQDTPNQRTASYIYDKSARQTVRDIIFKTNGDLAAIKKHLRTNGLTNLSGEKITQVRIAEFEEYAAKRVAVDGSFTEDKIDKIPYAAAARINTDKKFTEKEMEKYATRALENPYAPRENVRTLSTKLRAHLLAFGGDPKQAFASPEGSEALTKSIGQPIHKITTFENSSSPKYGNAFIESDNNPYFIIFENRETKSRSDKGYKMHSMSIVEVVNRKLQGLPIVEEPEAYRVILLKNDDFVYVPTTDEIVNPALIPWSNANKLAPRLYQVSKFTGTDCYFIRHDISKLITQGELGTQNCLQTTMNEGEEKVYIKNVCIKITIDRLGNIAPVLER

SEQ ID NO: 183 - protein, 1231 aa, unidentified
  REGION 1..1231: note = Description of Unknown: Cas Enzyme sequence
MKKILGLDLGVSSIGWALIEENDLGEKCNILGMGVRIVPLSTDEKDEFSKGNQISKNQKRTLYRSQRRGLDRYQQRREKLKRILQREGYYPEDFLFQLSPTEIYGLRSRAATGKIQNHELGRVLLHLNQRRGYKSSRADDTAEEGRKVSAEEKGYLAEVKNRHNLIQEKGLTVGQYFFECLLGDPHFQVKNQVFPRKAYTEEYDTIMKHQGLPLQLVKEIRDEVIYYQRPLKSKKSLVSICQFAGSCHVDQNGVEKWQGPRVAPVSSPVAQVCRIWEHINNLRLKTKNNSSINLDLQAKNLLFPLFDSKEKVTLKDIAKVLKLDEVNLMADKQLTSGIRGNATKVAIKKVLQDKYPELLQFNLQVEKDPHATVIAADKKMGEVLYEGAKLTLHPALEKEPFYLLWHTIYAIPDIEECKAVLERNFGLDPETAQSLARIDFTKSGFSNKSVRAMRKILPYLMEGVGYSTACELAGFKHSTTLTKAENQERNLIDQLPLLPKNSLRQPVVEKILNQMVHVVNAIKKEYGDLDEIRVELARELRQSQEERNKTYSELKKRELQNDKIKDELQHDYQIRATRNNVIKYRLFHEISDKVTRTNATCIYCGKMFGFTDAMLGNAVDVEHIIPQQLRFDDSQSNKTLAHRSCNLEKGNNTAYDYMQSKSPQEFEAYINRVNDFHEKKVFSYTKRNNLLTPAEKLKGADFILRQLQETRFISKKSIEMLSRTCREVHVTTGKITEYLRRIWGWDDVLMRLQVPKYRAVGATTTQQRQGTDGHSYTEEIIPGWSKRKDHRHHAVDALVVACTKQGFIQRLNTLHAKETQDFMYSQTQDSRLGSGKILERYLKKNCPFSTQQVERAASKVLVSIKAGKKVATKSLLKADGKSRGKNKITGVITPRGPLSEESVYGKIKLPRMEKTKYIFENPDLVVDRHIREKVKERINAWDDDVKAALKSLKSEPIFLDVEGKIELSEAACYREEYVIRYQVGNLKLKDLPFIVDPVVREKIRERFELHGNDEKKAMQGLQESPIWFNEEKRIPIKKVRCLTGLKSVEPVRRDSSGSPYAFVKPGNNHHMAFYVDAEGNYQTHICTLWHAVERKKYGFPAVVESTSAIWENILNSGLHYSDSFLEKLPGDGWNFQFSLQQNDMFILGLSEEECKILLENTDYASLSPYLYRVQKFSLFDIYFRHHLETEIDDSLVAKKANNYLRINSLGSFLQKNPFKVKISYLGKIEPL

SEQ ID NO: 184 - protein, 1208 aa, unidentified
  REGION 1..1208: note = Description of Unknown: Cas Enzyme sequence
MLYARSEASGKDCLMKTLGIDLGTNSLGWAILDEQTVLKAGVLVFEEGVNREQSDSLETPAAVRRAKRMARRLRFRRHLRRRLILRILIDNNMCPLSVEELKAWTQTGHFPKDNVTFIDWLKSTDTRNPYCDRARSAAEKVDPLTLGRAIYHLAQRRGFKSGRKDQPEEGDEGTSARAKELGVVKGDIARISAELEKTGLTLGQFFYHEIKAGRKVRKQHTGRNEHYQKEWERIAKVQNLDKTLAERLARTLFWQRPLREQSFLVGKCPLEPTRNRAQIGHPEFEAFRALSFVNNIRVIDGEKRIPLTGEQRALAANCFIRKTLFDFKVIRQKLEKQFKELKGAQFNYEDSVSLASSRITASLVEILPDGTDSQKAFDALTFFDDNVKLNAWAQKNLGLSQEAADRFVKIRIPEGRAGYSLHAIRKINRFLLKGVELSEAIFLAKLPDIIPEFDLKENEIIAKVHEHNELYRENKRTAYHDIRTENRVGVLSLEKRLGSWLEQEFGINGNTAGMLYFRDPKADASYATLTNDERREVEKGFLPKVNLGMIRNPLVQRSMTMLRRLVNELRKKGAIDADTRIHIELARDVNSRNDRMAIQDWQKQNEKKRADARTKLQEYGFVNPADDLVLKYVLAEEQNWVCPYTGREISIKALVEGGFDIEHTIPRSRSGDDSQANKTLCDAAFNRNTKKGLMPSELPNHEEILTRLGPWLDAITELQKLKGKQSKLAKSYSKDNPEARAKARQKFLVTKLTLKYWEDKYHRFTKKPEDITPSFISRQLVDTGIMTRHAVALLKSVYASVYPVNGQAVAFARKLWKVQDEDVVKDRTDHTHHAKDAMVIAALSRDRFQKICAELKADDERKNPKIAAVAPPFAEFAQTVFKTTQDVLVKHVTRHNELKQTKRSSIRLASPKDTKIGKITRAPATGSTVRGQLHKETFYGKIKKPGETETVCVIRKELNASNFPQASALDKIIDPAVRAAIQNEIAHRGGDFKKAIDAAVQEGTFKLPGERGAVIKKVRVEATVANPKALREQIATPSKCPYKNSVWVQAAGNSNFRLAVNKQNNGVIFFVAENLLDHTQGILLPLKDDFTVLGYIFPGAMAIACKYKGEWSEDGFDYRNRLYHVVKFAQGRITLRYHCEARRMKDLQKELSATGKNQQGQSSIDFNKPHELLLISEKKAWKFFLFEGIHFTMGLDGTITFVDRGGGM

SEQ ID NO: 185 - protein, 1500 aa, unidentified
  REGION 1..1500: note = Description of Unknown: Cas Enzyme sequence
VLTFNPGVGEEKNVEYSFAAQRTSKRSIRRLYQARKYKLWETLEVLRRNGYCPISEEGLNQWRWYKKSEGYFRKYPVNDVAFAQWIKLDFNGDGKPDYTSPYQLRQELINEKLDFSQGINKHKLGRALYHIAQHRAFKSSKKVNLAEDLDSDKEKIGAERKREGELTKKLNDIGITQWKTVGDAFAQAEIIHRERKEGRIRNNLHTSVVRKDLQKEVQEIFSYQDLRFGSIFKNGKGEELEISQSPIFWQRPLRSQKGTIGKCTLEPSKYRCPVSHPAFEEFRAWSFLNNIKYRIKGQKESDWKQLDLETRRELYNEKFIGRQKPNFDFLEIYQWLMKRNKHDNWDLNYNFKTNVAACPVSAQLRAIFGNDWKNVRIPHLPHKNPERQKDYYDIEDIWHVPFSCDDEDFVQDFAENKLGLDEAQTKKYLALWNSMPVDYGQLSLKAINNILRFLRKGRIYTEAALLAKLPEVLGEELWAKKEDLLLSSITDVIEINRHTKKKLSIVNNLIAKYKVDPYFADNDFKYTLQDSDHSDVVNSCEEAYGKITWGEMPEAIKANTLHFITAEYQNFFNDSKRQFKKLPHLLDSMKLFLTDNFELTPQQVKKLYHPSQIEIYPPAKPQLIDDRELLLLGSPTTGAFKNPMAMRALHELRKLVNYLIKTDQIDEHTRIVVELARELNDANKRWAYEKYQQKRKEENAEFAAAIRELIKDSDAAGSKVNPDSVDDIDKFRLWYDMLQGEDAKIGEEKSGVFTENTIVSKTKKNKGNDEEYEEFKQNDFERLNKALYFKLKKAGEDVVKKYKLWKEQNCLCFYTGKSISITQLFKENSIDFEHTIPRSQSFDNSLENLTVCYADYNRKIKKNQIPFHLPNYREEAYGYSAILPRLEKWQQRVADLERHIEYCKAKSKRASTKEEKDKAIRQKHLWQFELDYWRGKLHRFTLQEVKSGFRTSQLVDTQIISKYASHYLKTVFNKVEVQKGSITADFRKIFGIQPLDERKDRSKHSHHAKDAMVLSAIPTTALREQILGVWNELEEQRALLKGCETFERNKVTDRINVLERELNELLKKCHVPNVNTAIEKLDDEIIINNRTTDQTLSPAKRKLRSRGKITPVKDKMGNTIYQTDENGQPKQLYKNGKVIFKNDHFGKPLLDKEGNPIPVLLPKEKWAKGDIIRGQLHLDTFYGKIRPAKWDENGRPLRDEKRDFIYGETNNGFRFVLKREVNKDFDIDTIVDPFLKNMIIKQLNGRSIDKAIKEDGGLWMLDKKGNRVNKIRHIRCFADDVTNPLAIKKQTNVSSKDYKNDYWAKSGENYICALYQNVKTDKKGNPIKKEGREVFEREIEILNLMNVAISKKASESGELIIYKKDKNGMEIINEVGSKIAPYAILKKGTKVLFYKESIDELKELQAQELNKRIYKIKKFYGSQITFDYHLEAREDTELSKAFLGHGKKGKNGFTEDFFDFEKLNGGKPWHRLLYTKGDFNFAIEGKHFEMMPDGKINWNI

SEQ ID NO: 186 - protein, 1024 aa, unidentified
  REGION 1..1024: note = Description of Unknown: Cas Enzyme sequence
HSPLSKLLTEELRKKLDTAEGDDTWRQKGIIFGQRRTYWDIATLGRCDLEPTDERCPLADMQAQEFRVLETLNNMRVEEAGKEPRGLTAEERKDVVALLRGPLGVAKKKGREVKRKTISVSDIKGVLRIKKNSGTMLNLERDKDREINTDWFYREFVHGAFTEEAWAKMKDSQRKSVNRAVLKFDPGSEEDTKRLLDGAQSWWGLSTEGAQHLVGAWKTRPNIQKRVNLSRRALENLLPYLRMEDNLSVTEARQRFAEEESSKATPIQRVRYAFTITRGLKDLLYKLLGQPQAEELLRYRTLNKAARRFMVKHPGLLPPPPVLANPVVRKAIYEVRRHLHAYLKRFKRKPDRVVIELARSARQSGKVRQAMLDLNREREGIRRDIIEKYDLGRKTENQKRKAVERVLLCRQQKFICPYSGIADAQKGVCVYTGKAIGEDQAAEGRDVEIDHIVPESRCGDSSLNNKVLCYLDANRNKGVRTPLDWLSAEQFAALETLLGHLEEPPKDGYFTRKDYQRKWANLHRHTPTLEEFKASQLTDTAYAAKQVTQWLKDVLYEGDAQLDAAGKQTRHVFTTKGAYTSILRGDWRLYEKRVQPRDKDASPEAPGPQTPKAPSGKNRGDHRQHAIDAVVVALSGPERLVELADRAEELERVRTEAKQRGAQVPDNQTRGARIRPPWGDSEGKDFRRQVLAGLFARFDALPQDQSGAAQEIGTPLVVCHRPVKRRLVGMLHRDTSYGPVPGSKTLFTSRIRAESLKPNHLRMPEEGIDPPPEKTGIVRSLRLREQIRKCLQANGLDPDSFKPTAIKKLVEEGKLRMIPSGVPIKRIILLRTNTDPILIKRKKQEGWDPITRQFAYEDNPSSVRVYDSQNNHHIEILADSRGKWGGEVVPAFLVAQRVHSPKEKNGKRPAAVNRCDRDGKAFVMSLAEGETLRMRHPDTQEVGFFVVFKLDKPQTIHFVHHWDARPTKVQVERPDGTKQRLPEAEREDIAVSASNLRALGTEQGKPPYKVRVTALGHVIPLEKD

SEQ ID NO: 187 - protein, 1109 aa, unidentified
  REGION 1..1109: note = Description of Unknown: Cas Enzyme sequence
MSRSLTFSFDIGYASIGWAVIASASHDDADPSVCGCGTVLFPKDDCQAFKRREYRRLRRNIRSRRVRIDRIGRLLVQAQIITPEMKETSGHPAPFYLASEALKGHRTLAPIELWHVLRWYAHNRGYDNNASWSNSLSEDGGNGEDTERVKHAQDLMDKHGTATMAETICRELKLEEGKADAPMEVSTPAYKNLNTAFPRLIVEKEVRRILELSAPLIPGLTAEIIELIAQHHPLTTEQRGVLLQYGIKLARRYRGSLLFGQLIPRFDNRIISRCPVSWAQVYEAELKKGNSEQNARERAEKLSKVPTANCPEFYEYRMARILCNIRADGEPLSAEIRRELMNQARQEGKLTKASLEKAISSRLGETETNVANYFTLHPDSEEALYLDPAVEVLKRSGIGETLSPSVCRLAANRLRRGKSVTPNYLLNLLKSRGESVEALEKKIEKERHQQANRKKAKKTDPDYAATPLKPRYATGRAPYARPVLKKVVEEILDGEDPTRPARGEAHPDGELKAHDGCLYCLLDTDSSVNQHQKERRLDTMTNNHLVRHRMLILDRLLKDLIQDFAGGQKDRISRVCVEVGKELTTFSAMDSKKIQRELTLRQKSHTDAVNRLKRELPGKALSANLIRKCRIAMDMNWTCPFTGATYGTHELENLELEHIVPHSFRQSNALSSLVLTWPGVNRMKGQRTGYDFVEQEQENPVPDKPNLHICSLNNYRELVEKLDDKKGHEDDRRRKKKRKALLMVRGLSHKHQSQNHEAMKEIGMTEGMMTQSSHLMKLACKSIKTSLPDAHIDMIPGAVTAEVRKAWDVFGVFKELCPEAADPDSGKILKENLRSLTHLHHALDACVLGLIPYIIPAHHNGLLRRVLAMRRIPEKLIPQVRPVANQRHYVLNDDGRMMLRDLSASLKENIREQLMEQRVIQHVPADMGGALLKETMQRVLSVDGSGEDAMVSLSKKKDGKKEKNQVKASKLVGVFPEGPSKLKALKAAIEIDGNYGVALDPKPVVIRHIKVFKRIMALKEQNGGKPVRILKNGMLVHLTSSKDPRRTGVWRIASIKDGKVGVKLDLQRAHCAAPTNKNHECNWREVDLISLLKKYQMKIYPTSYTGTPR

SEQ ID NO: 188 - protein, 992 aa, unidentified
  REGION 1..992: note = Description of Unknown: Cas Enzyme sequence
MIERILGLDITKNSIGWSLVENDPEDAFNNKIVDCGIYQFKAGEIPKTGESPNTPRANARIARNTLKKAKKRKRTIFNLFVKHGLFPKVKTEQIFNTKILSNPWELREKALYEKLSPVDFGKALYHIIKRRGYQFSRIEELDAKDGESGKLKEGGRALMLALEESPYQTIGEYIHHQERKINHPQPNKKNELESVYDRTPHRSLLKKEIEFIFEKQRELGNTFASQELQDKFMAVFSFIPEPQSTERLIGNCTLIPFEKRAVRASYSADLHVALTRFINCVIVDSSTNKEAKLTSYLSLNRLIEMAHENKEITHSDMRKLLKLPDTHLFKGLKYDTKVKKASKKKGVDGKNLLIPGIEEIEEVIDFSKSEKKVLVEMKAYHEMKNALGELFGELSAPDTLNKIAHVLTVERGDSARTQRLAKIIEPLLKDKTSVAIDALLNTSLKVFKDTHNLSIKALDIIIPQMKEGKRYDEAIEIFGKKTQTKSALLPTLDKTEIYVNNPIVKRTVSKLVTLVNEIIRYHGPFHKVHIETGKELLTKAEQELISYGNKEKEQAKKQAEKKIVEFFGESIKPSRKNIDKLRLWEAQNEYCLYTGERIPLERLFEDGFADVDYILPRSRSFDDGFGNMVVCLKQAKILKADKTPFEWFGHDEERWATFKARVAIPSLYGKMGKGKINRLLKENFNEQSASEYASRRLENSRSYACKVIQELFREYLIMPQSPNGGKIQVQTRNAWLTAELRRQWTGYQSLDLYKDRMTAINAIVVAFSTQKMVQKLSQHFKWKESPWEKEKPEFEMPYKAFFADMHTMVQYDRSHKDKNGILRNRLLIARSPIKNVTGQAHEVKADALNKFEGVGVSIRQGKAMAAHKSIARVDIFEKDNKTLMLPLFVADMKKPLPHKAYKKGLPSDLVDTNDFKFSLFNSDLISISDDEKMMIGYCKTFCRFHLQITIDDFTGKMPHPAITNRNVVKYQVTPLGYYYPIKKEKRLPALVK

SEQ ID NO: 189 - protein, 1078 aa, unidentified
  REGION 1..1078: note = Description of Unknown: Cas Enzyme sequence
MQIWGFDIGTTSIGWAVIEHEFATSTGRILGMGVRIFPEARDPKGTPLNQTRRQKRLARRQLRRRRERRKTLNQALADADLLPAFSKDQGSEWARVMALPPLPIRERALRERVELHEFGRALYHLAKRRHFKEPDLNESDISEVEDAAEKAACDARNQTIKELKASGKTLGESLSTRFPVQGDRTRGIKGAVPSSQTRRIHALRSHVVAEFERLWSAQALYHPALTDVLKTHIFDVMFVQKPVFWRKNTLGQCRLMPGEELAPKGSWLSQQRRMLEKLNNLEVASGNRRPLDQEERTAILARLQVQASMSWGGVRKALTPLFTKRGEKGLEQRIRFNLEIGGEPKLLGNPLEAKLAGIFGDGWAMHPHRQAIRDAIHHRLWSADYAEVGQRVVILPAAEREIRRATAAERLKADFDITNAQATELTGLALPTGWEPFSTKALEVILPELERGERFGTLMVSPECARWREATFPNREAPTGEVLDRLPSPARRKLPNGEWDSSEQDRIKAIRNPTVARTQNELRKVVNNLIDAFGKPDLIRIELAREVGLSKREREERQTGIRKNASKRADAKKDLETKGISQPSARDIDKWVLWKESGECCPYTGEMIGFDALFRQGAFEIEHIWPRSRSLDDSQGNKTLCRRDINIAKGNRTPFEFFQSRPDDWNAVKLRLDKMIAGKNSPGLPRGKVRRFLAETMPDDFANRQLTDTGYAARQAVALLKRLWPDVGEPSQAADFGLSEELRRRKVLPVTGRVTAQLRKLWGLNNILSDDGEKTRADHRHHAIDALVVACTDPGMTQRLSHYWQQKDVPHAERPHLPPPWPGIRENAELAVKAIIVSHRVRKKVSGPLHKETVYGDTGQEIERHRITYRQVVTRKPLAELSKTELGAIRDTHIREMVTDWVKKNGGDPKKAFGIFPRNTSKDSKVQKDRPEIHKARIIVEQQPSLMAPVATGRVSLGNNHHLAIYRTTDGKIDWRIVSMMEAAQRLARHQPIVTKALTDGSTLVMSISLGDTVCICHGEKAGYWIANILSANGQIFFRRAEDASGESKWGPNANTLFKENACKLSVDPIGRVRPAND

SEQ ID NO: 190 - protein, 1056 aa, unidentified
  REGION 1..1056: note = Description of Unknown: Cas Enzyme sequence
MKNSLLPEEHVLGLDIGANSVGWALVAVKDGQPMRLVRAGVRVFAAGVEGDIGAIESGRDVSRAVARREARLRRRMLERRRRRLNKLAMLLQQGGLLPPGDISSAAARMTFFADLDRSLFPQDLRRSHPHVLPYRLRARALDEKLSPCEIGRALYHLAQRRGFLPAGRVKAGRGGEEEQKEQGQVEKGIGKLEERMRESGARTLGEYLSGLDPDEQRIRGPGHWTARGMFEDEFEKVWAAQTPRYPEILTEELKKRVHRAIFFQRPLKTQRHLVGECELEPGRKRAPIALPSAQRFRFVQKVNDLEIITPDGERRKPTPEQRETLVSALETQGDLEFKKVRKLLSLSKEHSFNHEHGGDKKLIGNRTASGLGQIFGDRWRTLSAEQRDRVVEDVRSMHNRDALKRRAMRVWGLDEHEAERLASLPLEDGHCSLSRKALEKVLPAMERGVRYATARNEVYGERPRPPTAAFLPPLDRAVEVRNPAVERALTEVRKVVNAIVREHAKPALIRIELARDLKKSRPDRKRIAEGNRERETARNRAAEEICKEAGIAKPRASDIEKYLLAEECSWQCPYTGKQINWDTLFGDSPQFDVEHIIPLQRCLDNSFVNKTLCDLEENRKRKGNRTPWEAYGADPQRWEEMIRRVRGFRSWAARAKLQRFQMKDLESLDDFATRQLNDTRYASRRAVEFVGLLYGSGADGVDPKGTRRIQASRGQVTRFLRDEWRLNAVLGGGEKRREDHRHHAIDAVVVALTEPGTIKRLSDAAARARLERRRRFGKMPDPWSGFLDEVRAAIERLIVSHRVSRKVSGAMHEETIYSKPRTGPDGKECVHVRKPVGGLSKQDLENIVDPIVRDCVLAKLEELGGGEASRAFSDPKKHPSLAARDGRQVPIHKVRVRVSAGTTSVGEGARERHVILGNNHHVEVLETKDAKGRAKWEGFVVSMYEAMRRLKAKEPVIRRDHGPEKKFLFSLAGGETIEIDEHDGTRGLYVVRTVATGRSGQREYPAIEFARLNDARKKEDIKKAGAWKKALVDPLRRAQCQKVTITPLGEVRRASD

SEQ ID NO: 191 - protein, 1092 aa, unidentified
  REGION 1..1092: note = Description of Unknown: Cas Enzyme sequence
MKNSLQTAEYILGLDIGTNSIGWAIVNAENGKQVGIGKLGVRIFPEGVEGDIVSGTDKSRASKRREMRLRRRQLERTRRRLVKLLHLLQSVALMPQGEINSSEERNKYFFELDNELFSTEARQSNPHVLPYLLRARALQGKLAPYELGRALYHLAQRRGFASNKKQMRKKGAEEKQRKKDVGIVKTNISELQQKMAGKTLGEYFSKLDLALDRIRNQYTDRKDYEKEFDKILIAQEIYYSSIFTNDFKKRLKRAIFYQRPIKKQKNLIGKCELEQRCQRAQWASLDAQRFRLLQKVNDLRVKLSAREERNLNEEERAKLIEALEKEGDLSWGKIRKLLNLKGFKFNFETNDEEELKGDRISSELYKVFGDRWMEFLPEEKDQIIDDIRGFQNLDALKRRGMNKWGLTEHNAQLLVEIDLEEGYCNLSLRALAKVLHKMEKGVPYATACKEIYPDKAKKPQDLLPRLETIVDVRNPAVHRALTELRKVTNDIIRNYGKPEFIRVELLRDLKKPRKEREKLAIKMGQNKKARKAAIKDLEDNGFRATDSNILKWLLMKECNEECPYTGRKITPPALFGDSPQFDVEHIIPRYMGNHDNSFMNKTLCYIDENRGIKQKQIPYETYKGTDKWEAILHRVSRFTSMPQSQSQDGRKGKSKRKKGGWTKLDQFMVGSPEGEELKTLDDFTTQQLNDSAYASRLAIEYLACLYGAGADGIDTNGKRRLQAGRGQITGALRNGWRLNEILGGGKKVREDHRQHAIDAVVISLTDAKTVKMQSEVESKALTAQKRASVELPEPWKTFLDDVREAVGKINVSHRAMRKVAGALHKEHYYSKPFENDHGKGCVHIRKQLKEIKDDKDIKNIIDNIVDPRIRCIVKDKYIEMKREDKKKSFSDRNNHPHLVTRKGTKIPIHSVRVRVDGTRKEIGAGATRRWVEFSSNHHIEIFKVKDKKGKPRWEGDVVTTMEAMKRQKAINDYNQAKKKAEKNNESFNLLPPGPVIQRDHSEGTIFQFSLCQGEIIEIIDEGSGVRSLKVIEKITKRERKSGPQLTVGFVSIYDARKSGERDLKEKTPEQLRKLECRKIIITPLGEIRTAND

SEQ ID NO: 192 - protein, 1062 aa, unidentified
  REGION 1..1062: note = Description of Unknown: Cas Enzyme sequence
MNARQQSASPKHELVLGLDIGAASIGWALVEEVEGRPIGLRAAGVRAFPAGTGETLSDFTAGRDESHAVKRRQARLRRRQLARRRHRLDKLALALQGAGLLPAGEVQAAEAAMAYFEALDRDLFPDAARKAEPHLAPYRLRARALDEELKPYEIGRALYHLAHRRGFLSNRRVRPRPAGAEETEEEKEEGKVKAAIGELARKMEASGARTLGEYLSRLDPREERVRGRYLSRKMLEEEFAAIWAAQAPRHPELLGADLRKRVHRAIFYQRPLKSARRLVGRCELDKGKRRAPLACLAAQRFRLLQKVNDLKIALPDGGERGLTAEERATLVEALERRGDLKFPAIRELLGLPKRGCKFNFETEGEKALIGNRTRRALATAFGEEAWQALGADGQERVVVELRSLHKPEAVKRRAMRLWGLGEEAADRLAAVALEDGYCNLSRQALAKVLPLMEEGVQYATVRKQVYGEEPAPRAVRSLPAVHRVQTVRNPAVERALTELRKVVNAILREHGKPGHIRIELARDLKRPRKDRKEMAAAMADNRRARAEAARRMAAEGLREPRPRDVQKWLLADECCWQCPYTGKAISFETLFGDHPQFDIEHIIPLPRSLDDSFVNKTLCEVEENRARKGNRTPWEAYHGTDQWQGIIARVKRFRGRAAKAKLELFQREEVRSLEDFTAAQLTDTRYASRLATRYVGLLYGAGETGVDPQRRRRVEASRGAVTRFLRDEWQLNFLGGGEKTRDDHRQHAIDALVVALTTPATIKRLSDAAASAASARRRRFAPMEPPWDGFLGQVRRAIDDMVVSHRVSRKVAAALHEETVYSKPHPNAEGKECVHVRKRLDALSEKEVAEIVDPTVRARVEARLEELGQKDPAKAFKDPKTHPSLRAKDGREIPIHTVRIRVSVAPEMIGGGAYTRRVKLGSNHHVEILEVKDRRGNPHWEGHVVTTKEALRRLKAGEPLVRRDYGEGKEFLFSLARGEIIELNAEQDKKGKTAAEGLYVIRTVTLSGGYPRVDFAAVSDARMKGDVLAAGDWGWASMARLEKRGCRKVVVTPLGEVRWAND

SEQ ID NO: 193 - protein, 1063 aa, unidentified
  REGION 1..1063: note = Description of Unknown: Cas Enzyme sequence
MNAMQESASPKGELVLGLDIGAASVGWALVEEVDGRPVGLRGAGVRVFPTGSGETLSDITAGREESHAVKRRQARLRRRQLARRRHRLDKLALILQSAALLPPGEMQPADAAMAYFDAVDRDLFSRAARKEDPHLLLYRLRARALDGALTRYEIGRALYHLAHRRGFLSNRRVRARPAGAKETEEEKEEGKVRTAIGELARSMAESGARTLGEYLAGLDPHEQRVRGRYLSRKMLEEEFGAIWAAQAAHHPDILTADLRKKVQRAIFYQRPLKTARHLVGRCELEKRRRRAPLACLAAQRFRLLQKVNDLKVLLPDGHERGLTEEERKRLLEVLERQGDLKFPAMRELLGLPKRGCKFNFETEGEKGLIGNRTRSKVVAVFGEQPWQALGAEGQERVVIELRSLHKPEAVKRRAMKLWRLEEEGAARLAEVALEDGYSNLSRQALEKVVPLMEEGMQYATARKQLYGEEPPRAVRSLPAVQRVVTLRNPAVERALTELRKVVNAVMREYGRPDHIRVELARDLKRPRKDRKGMAAAMADNRRGREEAARRIIAEAAIPSPRPSDIEKWLLADECCWECPYTGRPISFQALFGGNPEFDIEHIIPLHRSLDDSFANKTLCYLAENRERKRNRTPWEAYHGTDQWEEMIARVKRFKSRLAGAKLRLFQTEEVRSLEDFTAQQLTDTRYASRLATRYVGLLYGAPETGVDPEGRRRVEASRGQVTAQLRGRWGLNAVLGGGEKTRDDHRQHAIDAIVVALTDAGTIKRFSDDAAHAALTERRLGRLEPPWRGLLDDVRKAVEGMVVSHRVSRKVSGALHEETVYSKPHQDEEGKEFVHVRRPLGGPPKGLSEKEVADIVDRSVRERVKAKLEELGEKDPRKAFKDPKNHPALRAKDGREIPIHSVRVRVRVSPELIGGGAYARRVKLGSNHHVEIVEATDKKGNPRWEGHVVTTKEAMRRLKAREPIVQGDHGPGKRFLFSLADGEIVELNAEQDKRALYVIRTVRTDRRVEFVGITDARKKGSRSERGTIKGEGAWFTAAVDKLRERGSRKVVVTPVGEVRWASD

SEQ ID NO: 194 - protein, 1071 aa, unidentified
  REGION 1..1071: note = Description of Unknown: Cas Enzyme sequence
MKSTHNLPSDAGSLVLGLDIGAASIGWAFVERHDGKPQRLKAAGTRAFDPAVKEDISAIRAGRDTSRAAARREARLRRRMLARRRHRLTKLALILQRSGLLPPGDLESSDALMGYFARLDRELFRPDARRADPHLLPYHLRSRALDERLEPYELGRALYHLAHRRGFLSNRRVKPKAAGAKETDEEKEQGLVKTAIGELGQQIHETGARTLGEYLSRLDPEENRVRNRYLGRQMLKDEFEAIWVAQGPYHPDILTDDLRKKVHNAIFFQRPLKSQRHLVGQCELERGRRRAPLAALAAQRFRLLQKVNDLKVSMPDGEVRNLTAQERTKLVDALERQGDLKFGAIRKLLDLPRRHCRFNFETEGEKGLIGNRTACKLREVFGEERWQVLSLEERDRVVYEIRSIHNRDALKRRAMKLWNLDEEAAARLSDVALEDGYCNLSRQALAKMLPLMEKGMAYASARKQLYSDEPGPRVVRVLPRVQGLLEVRNPTVERALTELRKVVNAIVREHGKPDQIRIELAREMKKSRKDRKDIHARNAANRRAREAAAALIMKEAGITKPLRSDTDKWVLAEECNWQCPYTGKQISAETLFGDNPQFDVEHIVPFHRCLDNSFFNKTLCDIAENRSRKGSRTPWEAYGGDEERWAQIIERVKGFNGRAARAKLERFQIEDVKTLDDFTSQQLNDTRYASRLAVRYVGLLYGAGAEGVDPEGKRRVEASRGAVTSFLRDEWQLNFLGGGEKTRDDHRQHAIDAIVVALTTPVTIKRLSDAAARAPQARRRRFAPMEPPWPGFLDDVRAAIDNMVVSHRVSRKVAAALHEETIYSKPCRDDNGKPCVHIRKPLQSLGAKDVDSIVDPAVRECVKAKLDDLGEKDPKKAFSDAKNHPSLRAGDGRQIPIHKARIRVPVTTKRVGGDGAYARRVKLGSNHHVEILQTTDKRARPRWEGVVVSTYEAMRRLRAGEAIVQRDHGPDKEFKFSLAGGEIIELNAEETKKDRPAHAETPKRDLYVIRTISMTKAGRVTVDFASISDARKKEDIQKAGDWGRSDIDPLRRRGCRKVVVTPLGEVRRAGD

SEQ ID NO: 195 - protein, 1059 aa, unidentified
  REGION 1..1059: note = Description of Unknown: Cas Enzyme sequence
MESVQEARSGELVLGLDIGAASVGWALVELRGGQPTGLKAAGVRAFPVGMGNTISDISRGADQSHAAERRQARLRRRQLARRRHRLDKLAGILQGAGLLPPGELKPAEAAVQYFEALDRELFPPEARRANPHLLPYRLRARALEEGLAPYEIGRAIYHLAHRRGFLSNRRVKAGARGDDEQKEEGKVKGAISELAQRIEASGARTLGEYLSKLDPEDERVRGRWLGRKMLEDEFHLIWAGQAAHHPDLLTEELRQKTHRAIFFQRPIKSQRHLVGYCELEEPKRRRAPMCTLAAQRFRLLQKVNDLLVEEADTGRRPLSPEERASLVEALEAQRRLSFPNIRRLLGLRRGVKFNFETEGEKGLPGNRTAHDLAQVFGEGRWAAFSEDERDRVVEDLRSIHNRDALKRRAAKAWGLAGEAAEGFAEIALEDGYCNLSRQALAKVLPLMEGGIQYATARKQLYGDQPPPPVLGALPRLESVLEVRNPAVERALTEVRKVVNAIVREHGRPDRTRIELARDLKKPRKERERISKQNAKNRAARASAAESIKAAKVGIPEPRRSDEEKWLLADECGWQCPYTGKQISVEALFGDGPQFDVEHIIPFHRSLDNSFVNKTLCEIKENRDGKRNRSPWEAYHGTEVWDGIIGRVKQFKSGVARAKLELFLKRPEEIQGLDDFTSQQLTDTRYSSRLATRYVGLLYGAGEQGVDAQGRRRVESSRGQVTAELRGRWGMNAILGGGEKTRDDHRHHAIDAVVVAATDAATIKRFSDAAQNAAMAGRRLRELAPPWPGLLDDVRAAIEGMVVSHRVSRKVAAALHEETVYSKPQVDEQGKPCVHVRKRLEDISKKDLADIVDPAVREAVAAQVEALGEKAFKDRANHPALRAKDGRMIPIHKVRIRAAVSPEQIGGEGAHGRQVKLGSNHHVEITETTDKKGNLRWEGAVVSTLEAMRRLKTREPVVKRDHGPGKGFRFSLAGGEIIELNAEEDKKGKTAAAGLYVVRTVTLTGGYPRVDFASISDARLKKDIQEAGDWGWASMTRLQNRHCRKVVVTPLGEVRRVGKD

SEQ ID NO: 196 - protein, 1061 aa, unidentified
  REGION 1..1061: note = Description of Unknown: Cas Enzyme sequence
MTLSSEPTPREAELVLGLDIGAASIGWALVELAGGKPAKLKAAGVRAFAAGVEGDISAGRDQSRAGARREARLRRRLLARRRHRLTKLARILQRNGLLPPGELQRADALIDYFNTLDRDLFPPASRREEPHLLLYRLRARALDEKLTPSELGRALYHLAQRRGFLSNRRAKPKPAGVRQSDEEKEEGKVKTAIGKLAESIAESGARTLGEYLSRLNPEEERVRNRYLGRGMLQDEFEAIWQAQAAHHPDLLTDDLKSKVHEAIFFQRPLKSQRHLIGECDLEKGRRRAPLAALAAQRFRLLQKVNDLRAFLPTGEERALTPEERAKLADALERQGDLTFGKVRTLLGLPRGSRFNFETEGEKGLIGNRTARKLAGVFGEEGWVGLPPEERERAVSELRSIHNREALRRRAMKLWALDEDAGQRFAEVPLEDGYCNLSQKALAKVLPLMEKGMPYASARKEIYGDQPGPSVLDVLPRLDSVLDVRNPAVERALTELRKVANAIAQEYGRPACIRVELARDLKKTRKDRKDIASRNARNRRDRQRAAEEIVRQAGIPEPRRADTERWLLAEECGWQCPYTGKQISVDALFGDHPQFDVEHIIPFHRCLDNSFINKTLCDIAENRARKQNRSPWEAYGHDEERWAEITARVKSFKGGAARPKLERFQIRDVATLDDFTSQQLNDTRYASRLAVEYLGLLYGAGADGVAPDGRRRVQASRGAVTGFLRNEWGLNAVLGGGEKTRDDHRQHAIDAVVVALTEPAAIKRLSDAAANAALARRRRFAPVQPPWAEFGGEVRAAIESMVVSHRVSRKVAAALHEETIYSAPTVDVNGKSCVHIRKPLDKLSAGDVDTIVDEAVQKAVQRALDDLRETDPAKAFASPENHPSLRAADGRDISIHKVRLRVPVSPERIGQGASARNVKLGSNHHVEILETTDKRGDPCWEGCVVSTLEAMRRLRAKEPVVRRDHGRDKKFLFSLAGGEVIFLDADESKKGKTAAEGLYVVRTVTVSGGRPAIAFVGITDARLKKDIQAAGDWGTSLIEPLRKRGCRKVVVTPLGEVRRAND

SEQ ID NO: 197 - protein, 1065 aa, unidentified
  REGION 1..1065: note = Description of Unknown: Cas Enzyme sequence
METRSSGRGYVLGLDIGANSVGWAAVTLDGDGRPVGLGGTGVRVFPEGVEGDLTTGREKSRAVKRREARLRRRMLERQTRRLVKVALVLQGAGLLPAGKARSAADRMSFFAALDESLFPEQARKTAPHVLPYALRARALDERLERYELGRALYHLAQRRGFLSNRRESAGARGDDQKKEEGKVKKGIGELRERMEKSGARTLGEYFAGLDPTQERIRQRYTARGMYEEEFEAIWAAQAAHHPAMLTEELKKRLHRAIFFQRPLKSQAHLIGECDLERGRRRAPWALLSAQRFRYLQKVNDLDVTEPTGERRRLTDEERNKLAEALESKPNLTWAGVRRALGLARGCHFNYEEGGEKGLLGNKTAARLAGVFGRERWAGMSREEQDRVVEDLHSIHDRKALARRGMRAWGLDEEAAGEFAGIPLEDGHCSLSRQALERVVPLLEEGVQYATARKQLYGEKPGPRAVDALPPLDDVLEVRNPAVERALTEVRKVVNAIVREHGRPHRIRIELARDLRRTRPQREKTARQQRRNRAAREAAAGKLLHDMGMASPKRDDTEKVLLAEESGWQCPYTGKTITMQALFGEAPQFDVEHIVPFHRCLDNSFVNKTLCEADENRSRKRGRTPWEAYGSDAERWEEIIARVRGFKSNVARAKLEKFLQQEMEGLDEFAARQLNDTRYASRLAVEFVGHLYGARADGVDPHGKQRVEASRGQVTWFLRSEWRLNQILGGGPEKERADHRQHGIDAVVVALTEPRTVKMLSQAAVRAAQAGRRRFAPVEPPWPGFLDEVREAVLGMLVSHRAQRKVSGPMHEETIYSKLHPDREGREWAHVRKRLGSDRQALSQAEVGDIVDPVIRRLVEEKLRELGVGDPKKAFASEENHPEMVTRDGRRIPIHSVRIRSSVGTETIGKGPRERRVKLGSNHHVEILEVKDKRGRVKWEGVVVSMYKAMRRLRAAEPVVQREHGHGKEFKFSLAGGEIIELDAEEDKMDKAGRGKTAAAGLYVVRTVTLTGGYPRVDFAAANDARLKKDMLAAGDWGWASMSRLQKRNCRKVSVTPLGEVRRAGD

SEQ ID NO: 198 - protein, 992 aa, unidentified
  REGION 1..992: note = Description of Unknown: Cas Enzyme sequence
RVLARRRHRLTKLALALQRSGLLPPGDLRSGDALMAYFAALDRELFSVEARRTDPHLLLHRLRARALDEKLTPYEIGRAIYHLAQHRGFLSNRKAKPRPAGVKQTEEEKEEGKVKTAIGELAESMQQSGARTLGEYLSQLDPEERRVRNRYLGRGMIQAEFEAIWLAQAPHYPDILTDNLKLKVHRAIFFQRPLKSQRHLIGECDLERGRSRWTVASLPAQSFRILQKVNDLQVFMPDGEQRALTADERGTLRDALEHQGDLTFGAIRRLLGLPRRNCRFNFETEGEKGLIGNRTARKLAAVFGEERWAALTPEQRDAVVEELRSIHNTTALAKRAIKLWSLDEQTATRLTEVALEDGYCNLSRQALEKLLPLMEQGMPYATARTQLYGAEPPPRPVTRLPRLELAAEVRNPAVERALTELRKVVNAVVRDHGTPHRIRIELARDLKKTRKDRRQITLRNARNRRNREDAARKIIAKAGVPSPRRSDTDKWLLAEECGWRCPYTGKQISVEALFGDAPAFDIEHIVPFHRCLDNSFFNKTLCDIAENRARKRDHTPWEAYGHDEARWAEIIGRVRDFQGTARRAKLERFQIRDVSTLDDFTSQQLNDTRYASRLAVKYVALLYGGGADAVDEQGKRRVEASRGAVTSFLRDEWQLNTVLGGGEKTRDDHRQHAIDAIVTALTDPAAIKRLSDAAKTAPLARRRRFAPLDPPWPGFLDDVRDAIGGMVVSHRVSRKVAGALHEETIYSKSYEDENGKPCVHVRKRLEQLGSKDVDRIVDPAVRACVKAKLGALGENDPKKAFKSEDNHPALRSPRGRETAIHSARIRVPVTTEHIGDHASAREVKLGSNHHVEIVETADEHGRPRWEGHVVSTYEAMRRLKAREPVVQRDHGPGKEFQFSLAGGEIIELDAEQDDMDGPGQGKTAAAGLYVVRTVTLTGGYPRVDFAAIADARLKKDIVAAGDWGRASMTRLRGRRCRKVLVTPLGEVRRAGD

SEQ ID NO: 199 - protein, 1340 aa, unidentified
  REGION 1..1340: note = Description of Unknown: Cas Enzyme sequence
MKKILGLDLGTNSIGWALVNEAENEIEKSSIIRLGVRIINYDNFVSTETGKESKEPEKDFKSGKGISPNAGRTLKRIMRRNLQRYKLRRENLIEILKEHGFISDETILSENGNRTTFETYRLRAKAATEEIFLEQFARVLLMINKKRGYKSSRKAKGQNEGQLIDGMEIAKKLYDENLTPGQFCLQLLKNGKKYLPDFYRSDLQAEFDRIWTKQAEFYNILTDKLKESLRGKNEKATWAIVEKPFGIVGIKRETKGEDLKKENFAWRAKALSEKMDLESLAVVLQKVNGQINGSSGYLGAISDRSKELFFTNQTVGQYQMAVLDKNPNASLKNMVFYRQDYLDEFNTLWDKQAEYHKELTEKLKNEIRDVIIFYQRRLKSQKGLISFCEFESRQIEVEIDGKKKVKTVGSRVIPRSSPLFQEFKIWQTLNNIEVFGKGKKSKKQKGATLFDKIEDPVEYGGRRELYQEEKELLAAELSIKKELKKADVLKLLFDNANELDLNFSSIQGNITQAALFDAYKKIVEQSGHNIDVEKKPMKDIIKSIEEIFNALGYNSDILHFDSDKELDKQLMYQLWHLLYSFEGDNSNTGNEKLINKITELCGFEKEYASILANVTFQDDYGSLSAKAIRKILPYLKDGNQYDVACEYAGYRHSKSSLTKNEIENKILKDKLEILPKNSLRNPVVEKILNQMINVVNGIIDTHGKPDEIRIELARELKKNAKEREELTKSIAETTKLHEQYREILTKPPFSLSYVSRNDIIRYKLYEELKDNGYKTLYSNTYISPGALFSGDFDVEHIIPQSRLFDDSFSNKTLELRSINIEKGNQTAYDFIKEKYDEKGLEDYLNRIETLFKGKKTKLRKLKMQEKDIPDGFIDRDIRDTQYIAKYAKTILNDLVKFVVSTTGSITDRLREDWQLVDVMKELNWDKYKSLGLTEEFTNEEGYRIRKIKDWTKRNDHRHHAMDALTVAFTKQNIVQYLNNLNARISKKCYCGYEKYGFNTEEYTDWTCPECGRRYFVRKDTNTIYGIEQNELYRNDKGKLLFNPPFALDEFRNEAKKHLENTLISIKAKNKVVTQNINTTKKKSGTNRKIQQIPRGQLHNETIYGSQKQYVIKEETVNAKFDEAKILTVTKPTYRDALLKRLRENANDPKKAFTGKNSLANKPIYLDELHTTQVPEKVKTVTFETVYTIRKEISPDLKIDKVIDAKIKRKLEERLNLKEFNGDAKKAFANLDENPIWLNKEKGISIKRVTISGVSNAEALHDKRDKDGTLILDENGNKQAVDFVSTSNNHHVAVYRDGKGELQEFVVSFYEVVARKNAGLPVIDKEYKQSEDQERRTTVFQ

SEQ ID NO: 200 - protein, 1382 aa, unidentified
  REGION 1..1382: note = Description of Unknown: Cas Enzyme sequence
MKRILGLDLGTASVGWAVVNEAENSEEQSNITALGSRVVLLSADEKNNFLTGKSVSATATRTAKRGARRNLQRYKLRREWLKDALVSAGIINENTCLNDSNNKELFATYISRAKAVTEQIALEDFAKVLFMINKKRGYKSNRKTDNTESEDGQIIDGLDLAKKLKARNITPGQYLLELFKENKKNKAVFYRSDLQEEVNRIWAFQSQFYPEILDNTLLSAITNKSKKAVIGLFKGIKNVEIADVKTKERTEKALTWRSEALHKQLEIGEVAYAIAEMMGAISQSSARLALLSDNSKHLEFEGLTIGQYLLKLLRNNPNSSLKNINFYRKDYEDEFNTIWEKQASFYPQLTESLRSTIFNSIFMQRNLKSCKALLANCELEFAKKKITLPDGSCQTRTIYSKVCPKSSPYFQEFQIWQSLSNIRIIDKENTHLTKGQELSYDQKVMLLPELMIHSELKANKIIEILFGKKSNYTINMPSIKGNRTNETIFNALLEIVELTGHSIDNIVKTDANQQIEAVKNIFESLGYKTDFITFDSTIEGKDGLNQPYYKLWHLLYSYCGDNSKTGNEALIRKIEELTGLEKEEAKVLANCTFKNDYASLSTKAIRKLLPHLQSNLDYSEACEAAGYNHSKRSRTKEDIKNKVYKDKLDLLPRNSLRNPIVEKILNQMIHVINQTSEAYGKPDEIRIEMAREIKKNKIQREKLANQLRQNTAELERIKDILRKDFKLSHISHNDILRYRLYEELSLNGYKTLYSNTYIERQQILDPTVTIEHIVPKALAFDDSFSNKTLEIQSVNGEKSNQTAFDFISKKYGSEALEQYINRVNNLFENGKISKTKRDNLLRKQEDIPSDFLNRDLRNTEYIAKKALEILEDYVPRVTPTIGEITKTLREDWQLVNIMRELNWEKYNSLGLTSFYYDRNGTKIGLIHNWTKRNDHRHHAMDALTIAFTKPSIIQYLNNLKSQNDKGSSIYAIQAKETYIDETRKRLIKPPYDIKQFRNDAKQMLDNIFISHKAKNKVVTPNTIVTKKKRKAGKETKAEEKRTFLTPRGALSNETVYRKICNYETKEITINSKLTYEIALTIAKKKEREAVLERLAQHNNNPTTAFKNYNKNPIMLQTSVGEKPLMSVKIVNYKELFVKRSEINEKLDIKRVLDAKVRARLTDRLKEYNNDPKAAFANLEENPIWLNEEKGIALKHVTTIERVVGLPIRPKRNINGEIMKDELGQPLKSHYVATGGNHHVAIYEDEEGKWHEKVVSFNEAASRAIQKLPIIDKDFNKELGWIFQFTMKQNEMFVFPDKESGFDPLAIDLKDPANKTLISKHLYRVQKLTSGNYYFRHHLETNVEDCKELKEITWKSIRTTKNLRGIIKVRINHIGQIIDIGEY

SEQ ID NO: 201 - protein, 1382 aa, unidentified
  REGION 1..1382: note = Description of Unknown: Cas Enzyme sequence
MKRILGLDLGTASVGWAVVNEAENSEEQSSITALGSRVVLLSADEKNNFLTGKSVSATATRTAKRGARRNLQRYKLRREWLKDALVSAGIINENTCLNDSNSKELFATYISRAKAVTEQIALEDFAKVLFMINKKRGYKSNRKTDNTESEDGQIIDGLDLAKKLKARNITPGQYLLELFKENKKNKAVFYRSDLQEEVNRIWAFQSQFYPEILDNTLLSAITNKSKKAVIGLFKGIKNVEIADVKTKERTEKVLTWRSEALHKQLEIGEVAYAIAEVMGTISQSSARLALLSDNSKLLEFEDLTIGQYLLKLLRNNPNSSLKNIIFYRKDYEDEFNSIWKKQASFYPQLTESLRSTIFNSIFMQRNLKSCKALLANCELEFAEKKITLPDGSCQTRTIYSKVCPKSSPYFQEFQIWQSLSNIRIIDKENTHLTKGQELSYDQKVMLLPELMIHSELKANKIIEILFGKKSNYTINMPSIKGNRTNETIFNALLEIVELTGHSIDNIVKTDANQQIEAVKNIFESLGYKTDFITFDSTIEGKDGLNQPYYKLWHLLYSYCGDNSKTGNEALIRKIEELTGLEKEEAKILANCTFENDYASLSTKAIRKLLPHLQSNLDYSEACEATGYNHSKRSRTKEDIKNKIYKDKLDLLPRNSLRNPIVEKILNQMIHVINQTSEAYGRPDEIRIEMAREFKKNKIQRKKLDNQLKQNTAKLERIKDILRKDFKLSHISHNDILRYRLYEELSLNGYKTLYSNTYIERQQILDPTVTIEHIVPKALAFDDSFSNKTLEIQSVNGEKSNQTAFDFISKKYGSEALEQYINRVNNLFENGKISKTKRDNLLRKQEDIPSDFLNRDLRNTEYIAKKALEILEDYVPRVTPTIGKITKRLREEWQLVNIMKELNWKKYNSLGLTFFDYTRNGEKIGIIPNWTKRNDHRHHAIDALTIAFTKPSIIQYLNNLKAQNDKGSSIYAIQAKETYIDETRKRLIKPPYDIKQFRNDAKQMLDNIFVSHKAKNKVVTPNTIVTKKKRKTGKETKAEEKRTFLTPRGPLSNETVYRKIYNYETKEITINRKLTYERALTIAKKKEREAVLERLAQHNNNPTTAFKNYNKNPIILQTSVGEKPLISIKIVNYKELFVKRSKIDKELDITRVLDTKVKACLIDRLKEYNNDPKTAFANLEENPIWLNEEKGIALKHVTTIERVVGLPIRPKRNINGEIMKDEQGQPLKSHYIETDGNHHAAIYEDEEGKWHEKVVSFNEAVSRAIQKLPIIDKDFNKELGWVFQFTMKQNEMFVFPDREAGFDPLAIDLKDPANKTLISKHLYRVRSISSNDYRFCHHLETTVATPKELKGITWKRISSLSSLQGIIKVRINHIGQIIDVGEY

SEQ ID NO: 202 - protein, 1404 aa, unidentified
  REGION 1..1404: note = Description of Unknown: Cas Enzyme sequence
MSKKILGLDLGTTSIGWAFVREAEDFQEESSIERIGVRVNPLTTDEQINFEKGKPISVNADRTLKRGARRNLQRYKQRRTNLIQLLKQYKIINENTILAEDDKNTTHSTYALRAKAVSEKISKEAFARVLLMINKKRGYKSSRKAKNEDEGQAIDGMSVAKRLYEEDITPGQLCLQLLKEGKKKLPDFYLSDLQAELEKIWNFQKKFYPEILTDEFKKEIEGKGQRATSASFWAKYKFNTAENKGSRDEKKMQAWEWRSKAINTQLTREEVAYVITEINNNINNSSGYLGAISDRSKELYFNKETVGEYLFRQLRYSPHTRVKNQVFYRQDYLDEFETIWENQSRYHNELTNELKSEIRDVVIFYQRKLKSQKGLISFCEFESKQIEIQKDGKIVKKIIGLKVSPKSSPLFQEFKIWQILQNLEFTNKETKEKKVPDFEAKNLLFEELNIKGNLKGEKAIEILGYKPKEWLVNYKELDGNRTNQVLYEGYLKILEVEGYDIKDLLKIKSNKDEVNLSELSKPVSEIKDLIKSIFESLNINTAILDFNPELEGKDFERQASYQLWHLLYSYEGDNSNTGNDELYRLLYQKFGFGKEHAQILANLSFSQDYGSLSAKAMRKIYPFIKENSYSEACSLAGYNHSSSITKEENDKRELKEKLELLPKNSLRNPVVEKILNQMVNVINAIIADPSMGRPDEIRIELARELKKNAAERAEMTIHINKAKSEHDNYRKILTTEFGIPNPTRNDIIRYKLYEELKVNGYKTLYSNTYIPREKLFSKEFDVEHIIPKALLFDDSFSNKTICARQENLDKGNKTAFDFIQSFYGKEKFEEYLQRIESLAKIKEGDTFVISKAKYKKLLLPEIEIGEGFIERDLRNSQYIAKKAKSMLLDICKTVVPTTGSITDRLREDWGLINIMQELNFEKYKKLGLIEMVEKKDGSFKERITDWTKRNDHRHHAMDALTVAFTKHNHIQYLNYLNARKNENHKMHGNVIAIEQKETELLVDSVGKRKRKFKLPISNFREVAKMHLENILVSYKAKNKVATKNKNRFKTKNGEKVKIELTPRGQLHKETVYGKMKKYETKEEIIGSKFDEATILKVANLEQRNALLQRLKENNNDPKKAFSGKNSLKSNPLYYGVDSKPIPERIKIVWLEDDYTIRKEITPDLKIDKVIDIGIRRILENRLAEFNGNAKEAFSNLEKNPIWLNEGKRIAIKRVTISGVKNAETLHYKKDHLGHEMLDKQGKRIPVDFVSTGNNHHVAIYKDDKSDLQEKVVSFYEAVERINQELPIIDKSFNHDLGWQFLFTMKQNEYFVFPRDGFDPYEIDLLNPDNYKIISPNLFRVQKIATKNYVFNHHLETKAVDGELLKTKKDLSDITYRFIQTPVNLKNIIKVRINHIGQIVKIGEY

SEQ ID NO: 203 - protein, 1468 aa, unidentified
  REGION 1..1468: note = Description of Unknown: Cas Enzyme sequence
MKKILGLDLGTNSIGWALIEQDLNKRKGSILDLGTRIIPMSQDVLGKFDSGVSISQTAERRIYRGKRRLYQRDHLRRERLHRVLNVLGFLPDHYKESIDFEKKIGQFKEGTEVKLNYSKSQTNNYEFIFKNSFDEMINEFKKTNNFSIRVPYDLTIYYLRKKALTQKISKEELAWVILNFNQKRGYYQLRGEEEEIDDNKKKEFVVLKVKEAKDTGEVFKKTGDKLYEVIFTNGWKYDKPVVKTEDWLGKQKEFIVTSTSSKDGEIKRSYKAVDSKQDWLAIKSKTQKDIDKSEKTVGEYIFDHLLQNPTQKLRGKLVKTIERKYYKEELRAILQKQIELHPELQSKENYLACLDELYPRNEAHKANLRNKGFEHLFLTDIIFYQRPLKSKKSTIGTCLYESRAFRIENSQTGSLEKTQEGLKVIPKSHPLFQEFRLWQFLKNLKIFQKESLVRGNNQLDVECTDMLLKTEDDWVNLFDFLSNKEKIDQTQFLKYLSDLKLIPKQNKNNPNYRWNYVEDKSYPCNETRAAILNRLKRVENINAEEFLTFQFEFDLWHIIYSVTDKLEFEKALHTFAEKNNLDTNSFVKNFKKIPPFQSDYGSYSEKAIKKLLPLMRLGKYWKAEDISEETKNRITSIIERLTAIGFNKEKISDIQDDDIPTRLLKSFMPFQHVSPLRGLNTYQASYAIYNRHSEVAGITEWQTPEDIDIFLTEFKQHSLRNPVVEQVVTETLRVVRDIWKKHGDSNELLFDKIHVELGREMKNSAKQRKYISNKNSENENTNLRVKEILKEMMADPSTEGDIRSFSPSHQELLKIYEEGIYQNSTANFTKVSEKDIEKIRRSSDPSKAEILRYKLWLEQGYISPYTGAIIPLNKLFTTAYQVEHIIPQSRYFDNSMGNKVICESDVNQDKGNKTAYEYLREKEGSIIEGHKLFKLPDYESHCNNYFKKNRTKLRNLLSDEIPEGFINRQLNDSRYISKLIKGLLSNLVREANEQEATSKNLIPVTGAITSKLKQDWGLNEKWNELIAPRFKRMNEISKSNDFGFDDDFKLNGKATGKTFFRIQVPLEIEKGFNKKRIDHRHHALDALVIACISKRHIHYLNSLNTEKENYSLRDSLLIKNERGHFTKTFKMPWSNFVNDAKNELEKTIISLKQNNRVINKTNNKTWQWVDLDGNLKKRLVPQTKGDNWAVRKSLHKEMVYGLIDLDVPKGKVATAVRVALSDIKNQKHIDKIADKAIQTILTNHLKNFIDEKGKPDFESAFSTEGIEALNKNIKSLNNGKKHQPILKTRLFEIGVKFPVGQSGNNPNKYVEADKGTNLFFAIYWDETKQKRVFNTVPLNVVIEHQKQVAHLPKNERLPIPVDKTLGEYRFTLSPNDLVFVPTEEEVVSPNMVDFDNLTSEQVSRIYKMVSSSLSQCFFIQSHVAQSIQNKVEFSALNKMERDLNGNMIKEVCWKLNINRLGNVLSVEG

SEQ ID NO: 204 - protein, 1498 aa, unidentified
  REGION 1..1498: note = Description of Unknown: Cas Enzyme sequence
MKKILGLDLGTNSIGWSLIEHDFEKKQGEINDLGVRIIPMSADVLGKFDAGQSHSQTAERTGYRGVRRLYQRDNLRRERLHRVLNVLGFLPGHYAVHIDFKKHLGQFKEGKETKLNYKPIADSKYEFIFQSSFNEMIKEFKKYRPELFYVKSNGKETKIPYDWTLYYLRKRALSQPLTKQELSWIILNFNQKRGYYQLRGEEIDGDKNKQFVQLKVKEVIDSGEAVKGNPLFDVIFENGWKYDKQVVKTEDWIDRTKEFIVTTKTLKNGDIKRTYKAVDSEQDWAAIKAKTEQDIERTNKTVGEFIYETLLENPAQKIRGKLVKTIERKFYKEELEKILTKQIELQPQLFTNELYKACIEELYPKNEAHQNALKNRDFLYLLMEDIIFYQRPLKSQKSNISGCQLEQRAYHKTNKETGKKEKVKQAVNVIPKSHPLFQEFRNWQWLQNLKIYNKVDTDKGELIDVTEQLLPNEDSRVDLFDFLQSKKELEQSQFIKYFIDNKLINKTEKNHYRWNYVEDKKYPFGETRAQFIFRLTKVEGIKDADMFLDEKIQIGNKENNSFISRIEQLWHIIYSVSDISEYKSALEKFAIKHHLNQESFVANFIKFPPFKSDYGSYSKKALNKLLPLMRRGKYWDENDISDKVKQRVSQIMERVNSLHLKEDYNANELAEALGNVSDDDVKKQLVKSFVPFANKNLLQGLNTYQATYLVYGRHSEIGDIQNWKSPEDIETYLKNFKQHSLRNPIVEQVVTETLRVVRDIWKHHGESKPNFFNEIHVELGREMKNPADKRKRISDRNTENENTNHRIREILKELMKDTSVDGDVRDYSPSQQDILKIYEEGVYQNPRIDYSNVSEDEIAKIRRSNSPTQKEIQRYRLWLEQGYISPYTGKPIPLTKLFTHEYQIEHIIPQSRYFDNSLSNKIICESAVNEDKDNKTAFEYLKAKGGNVINGHKLLSLAEYEAHVSQYFKNNRQKLKNLLSEDIPEGFINRQLNDSRYISKLIKGLLSNIVREEGEQEATSKNLVPVTGSVTSKLKNDWGLNDKWNELILPRFERLNQLTQTKDFTVTNTSGHTIPSVPDDLLKGFSKKRIDHRHHALDALVVACCTRNHGHYLNALNSEKKNYGLRDKLLIKNENDHYIKTFQMPWQGFANEAKNQLENTVISFKQNLRVINKANNKFWSYKDENGNLNLDKNGKAVKKLRKQIKGDNWAIRKAMHKETVSGKYNIETPKGKIATAVRGSLGDIKNEKHLAKVTDSQIREVILPNHLKNYIDVKGKIKFDVAFSDEGIEDLNKNIISLNNGKKHQPIRKVKFFEVGSKFSISENENSAKNKKYVETAKGTNLFFAIYWDEIKQKRNYETVPLNEVIVHQKQVAHLPKNERLPIQPNSKKGSFLFTLSPNDLVYVPTDEELTNISLIDFNNLSNNQLNRIYKMVSCTSVECYFVSQGTASLIMSYNSKSKQGEFGSKNKLETTIDSLEVRIKERCLKLKVDRLGNISKA

SEQ ID NO: 205 - protein, 1404 aa, unidentified
  REGION 1..1404: note = Description of Unknown: Cas Enzyme sequence
MKRVLGLDLGTTSIGWALVEEAENETEKSSIIKLGVRVNPLSVDEKTDFEKGRPLSTNAERTLKRGARRNLQRYKLRRENLIEALTANKIIAKNIPLTEIGKNTTHQTLALRARSANEKIELDELAKVLLTINKKRGYKSSRKASNDEEGVAIDGMSIAKELYERGITPGQYVLELLNDEKKYLPDFYRSDLKEEFDRIWNEQRNFYHEVLSNDLYKELQDKGKKATWAICKEPFDLKGIPLKGKAIDQRKEKYQLRASALTEKIDLEHLAIVLQEINNELNSSSGYLGAISDRSKKLYFNNLTVGQYLYQQIEENPHTSLKNQVFYRQDYLDEFEQIWSTQAKYHKELTNELKEKIRDIIIFYQRKLKSQKGLLDFCQHESWEQEYIDKTTQKTKKRRVGRKVISKSSLLFQEAKVWQNINNLVFTNESNNQKIVITELDNNIINEIFQELNIRGNQKPKVILGILKKHGILNKVSEWKTNFEDIEGNRTNQALYNAFFKIADAHGYAHDWQKRSVLDIKNELKIVFTDIKINPEILEFDGTLPGKELEKQASFQLWHLLYSAEEDVKINEEDKIKYGNNDVGLKKNLQEKFGFNPEDTKRIASITFPQDYGNLSSKALINILPELQKGYEYSDACKKVGYNHSKSFNKEELEKRILKDKLEILKKNSLRNPVVEKILNQTVNVVNQIIDLYGKPDEVRIELARELKKSAKERSEMTSGIAEATRKNDDIKKLIAKQFGIPNPSKNDVIRYKLYEELSSNGYKSLFSNKLIKVEDIFSKKIDIEHIIPKALIFDDSFSNKTLAYREVNLEKDKSTAFDYISNYKNSEIEAYTERVESLFKANAISRGKRIKLLMSAEDLPSDFIERDLRNSQYIAKKAKEMLFEVFKNVVSTSGTITSKLREDWDLINVMKELNFPKYKALGLIETETRYNKGTEKYVEREVIQDWTKRNDHRHHAMDALTVAFTKHNHIQYINNLNARYNSNHKMHVRILNIQNSITDMISSKNGSKKRRFTPPMDNFRTEAKNHIESILISFKNKNKVVTQNTNVTRTLIGENRKVQLTPRGQLHEATIYGKIKRPESKATKINARLGLDKARMITNPTLRDLVLNHLSEFNNDSKKAFSSKEIKSNPLIYKNKQLEEVVCFEELYTIRKDINPDNFKTQKNIEKVIDAKSRLVLSKRLKEFGNDSKKAFSELDKNPIWLNKEKRVSIKRVTISGVSNVEALHVEKDHLGKNIQNEGGNNIPTDFISTGNNHHIAIYKDEKGNLQENVVSFFEAVVRSNEGLPIIDKTFNNELGWEFQFTMKQNEMFVFPNDDFDVNEEDLKDNKNAINISKNLFRVQSISSKYYIFTHHLETQATNGDDFKNKKMLSGIKYNFLRSPNALSKVKKIRINHLGQIVQVGEY

SEQ ID NO: 206 - protein, 1158 aa, unidentified
  REGION 1..1158: note = Description of Unknown: Cas Enzyme sequence
MKKILGLDLGTTSIGWAFITEVESKKEASNIVRTGVRIIPLTVNEKDEFSKGNALSTNLERTQKRGARRNNQRFKQRRDKLLKILFDLDLISNVDDLKTDKSLDLYKQRALAIEQKIEKVDLAKVFFLLNGKRGYQSNRKTNDTENDSTYLSEISDRDNELVERTITVGQKLYELLEINSLACLKNRVYSRKSYNNEFDSIWKEQSKHYPKLTKELKKIIKDEIIFYQRDLKSQKGLLSECEFEKHHKVIPASSPLFQEFRIWQRLHDIVIKNRFSEEYDLGQDQKESLFDKLQESSKLTEKNILKELGLNTNEYSLNFKKIEGNTTRHQLLEIFEAIKYDIDDVLELDYTIRGNEFDKQSFMQLWHLIYSAKNSDHLIKNLKIKFSFNNEQAKTIADQVHYQLRYGSLSARAIRKLLPYMQQGYNYTDACEQAGYRHSNWRTNQEKENWKPQELKLLQKNSLRNPVVEKVMNQLVNVVNSIIKDESLGRPDEIRIEMARELRMNAKNRKKLTSRINDNTKKHETIRRILRTEFNIPRPSRNDIIKYKLAEETNWISLYSGNPIQPSRLFTQDYDIEHIIPKARLFDDSFLNKTLCESVINREKGNKTAFDYMASKDETSLNTYVSLIKSNKKMYPPKKEKLLITSENIPEGFINRQLSETQYIAKKAIEILSKVSKEITHTSGSITDLLKDQWELPYVIQDLNLDKYREIGQTESRDIKTNGNKVKKVEQIFHLDKKGEKVFWSKRDDHRHHALDAIVVALTKQHHIQHLNTLNASFEKRYNESDDNVKIAAQKFEVPWRNLREDVKQALDSTLISFKQKNKVVTKNINKTKTKNKENTQITLTPRGQLHEETIYGKIKQLNTKPILLNKRFLIKYVELIVDEAIKNLVKQQLQKFNNDPTKAFDTKILKNNPLIHNESPLKEVICFDEIFVIRKPINETLKIETVIDKGIQTILKKRLDAFEGNKKLAFTNLDEKPIYLNKNKTIEIKRVKIKSKYSDLLDLGRGYVNSGNNHHIAIYKDENDKTHGEKISFIEAVERVRQGVSVINKQHELGWDYLFNLQINDYFIFYDDTLTPEIDVFNKANYSLISKNLFRVQKLSISTNGQPNFIFRHHLETTPKTVSGFAYKGIYSYGKLIGKCQKVQLNNLGELIKIGEY

SEQ ID NO: 207 - protein, 1257 aa, unidentified
  REGION 1..1257: note = Description of Unknown: Cas Enzyme sequence
MKILGLDLGPTSIGWALINTDCNHNPVSILGMGSRVIPYSDTNIAADFSKGKSNSPCMERTSCRQMRRNLDRFQLHRDQLKKLLCDIGLIDDSFKTPSANPLEKWKTRADAAVSGTKLSPDELAGVLFHINHRRGYKHAKSDLGDSKQTDYVEKINNRYSEILKSGKTVGQYFYDKLKESEIADANGKRHYTYRIKEKVCPRKAYEDEVDRILKTQSEHYPLILTEENRRAIKQVIFYQRPLKSCKNLVSFCEFERHEFLNKSGKKVESGPKVSPRTSPLAQVCRIYETINNIRLVNIDRRNQKPDPTPSLFDDIDLAPKDFRKLMPEYRFSEEERKRIFDFLNTHEKMSEKDLLKILGLTPDDGFKSDKSLAKGIQGNTSRCQIADALRDCPSKESLLKFDLTEEIPASGADVDIATGELLPRVSDTCIRQPLYQLWHTLYSIKDKEELFRVLSDKFGIADQTTLNRLYIIDFVKAGYTNKSAKFMRKLIPLLRNGKKYSEACETLGKNHSDSLTREKNANRPLQWHLRPIYKGELRQPVVEKILNQMINIVNAIKDEYGEIDEVRVELARELKRDKEGREKMARNISKLERENKELSAEIADLNILPTRRRIQKMRMLKETGSICIYCGKTVTPYRFIEGHGYEIEHIIPRSRLFDDSLANKVCACRECNAAKGAQTAFDFMKSKGGQEFNSYIRRIEDLYKDNRISRSKHDRLLMSASEIPDDFIERDLRLTQYVTKKSLEILSGAIRNVYASSGIVTDFFRHAWGYDTILHDLNLPRYEAGDLTEKVEYETHGQIHSATRIRDWSKRKDHRHHALDALVIALTRQGYIQRLNTLNAVSGNPDRSSKWRSLDKWASERPHFERRNVIQAMEEISISFKPGKKLATPGKRYIRRNGKRICVQTGVSVPRAPLHKETIYGRIRTDHGEKSLKLALENPGLVTDSHLRQQLELLIEQNDGDIRKTMKFLKKNPLEINGKPVEKIRCYREEIVVRYPVESIRFKDLCYVVDSHIRTIIEKRFKEVDNADKEFVKSLAERPLYSDNDCRHRIRTVRLFSGLQKSTLAGVRRDENGRIIGYAQKRNNDHVAFYRTPDRKIVESVVSFWDCIKRKKIKLSPIIKNPADAWDQIIASKECDIAEEIAETLPPADSSFIMSLQRNEMVVLGMSDDQWNDAVATKDIRTINRHLYRVWKLSSKSYCFKYHTNTTAAIEDGDKEIKQHYIIASPDSFFNLNPRKVIVSLLGKINTISDDKENPML

SEQ ID NO: 208 - protein, 1015 aa, unidentified
  REGION 1..1015: note = Description of Unknown: Cas Enzyme sequence
MKTREAHLAREARLRYICTEAGIEVLAAKQTARDPETKKFRVVQEADERLTREFPRKGDETCYASCLLRIKLLRGEPLAGWQVFKALHSAIQRRGYDADLAWKNRGPRNADAEKEEGDTAQRAQAFRDILLKMAPGQPEFHLPCYLDAWRMELWNASKPDEMRLRVNHLAEPARNRDGTQALVAPRELVVAETRRLIEAAAKLFPKLADSSDEILFGPGGRAYASYYPELRKAHDLRLGGAGDWDGILGQKVPRFDNRIIAKCALIPRLNACSAEPRKLADDTFAPESLLAAEVTFLMKLKHSRVQRGTGGVESLTPSELRQLFEFRHTEGPTRYAFSEPQWKKAIAKLGGLHPAPGHSEIAKPNLTGRSRFCRPALRILRDLLLSGHTPLEQHALELGKLVGNTQPQRGLIPADLAFLRRMGDSWTGLYVPDQQHDQLLALRENEGRDIAIRALIGSCNNPIVRHRLEVFWKRVQKLETQFGLPSEVVLEFVRQDFMGAEAKFKLQKFQNDRQKAREKARATVKELKTETRSAALKWELLEAQRGICLYTGESLPQTLIDELEIEHIVPRSQGGPDAMVNYVVTKHATNDAKANRTPYEWFAANNFAGWDAYSARVKEREVSLRPKKVRLLTLPDAAEQVQRYTALAETAYIARLAQTLVALYFNWPIRSQEGARRITIVNGGLTARVRRNYKLNSLLSPCPEGKDPRDWEEQCEKNRGDKRHHALDAMVISFIPGWARNPRHEGFFRLPDGVTRETFAAALTNRLPRALVLPKPELEATVYGERIIDGKRYGVARIALRDFAVKVEKNKPVLKPRKDLKPHQIIDPVIRNAVESLIEGNPSLTLEQWETWCVNYRRGSMQGPRVKKLFVTITDADSLDEYGNLSKDGVSSRPQLRRGKQHRGYFIVEVSAATKKEPSRRKLDVRPVYAHQSQVTSAKRLAQESGLVIKGFFESGCTVKITSAVIQGETVLTPGYYRLNSIWEDGRMKVTDFQTELHGPIPIAKFLAAGLHRAD

SEQ ID NO: 209 - protein, 1365 aa, unidentified
  REGION 1..1365: note = Description of Unknown: Cas Enzyme sequence
MKKVLGLDLGTTSIGWALVNESDTNNEKSEIIKLGVRVNPLTIDEQTDFEKGRPLSVNADRTLKRGARRNLQRYKQRRKNLVEILTKNGFISNNILLTEIGKNTTHQTLALRAKSAKQQIRREEFSRVLLTINKKRGYKSSRKAKNEEEGSLIDGMAIAKELYDSNLTVGQYVFQLLESGGKYIPDFYLSDLQNEFNAVWEFQKQFYSEKLTDKLYNDLQGKGKQQTWAICKEPFSIVGEKRITKRVELKKENYKWRAEGLTEKLTLEQLAIVLQEINNNLNNSSGYLGAISDRSKELYFNKETVGENLYKQIQENAHTSLKNQVFYRQDYLDEFEQIWETQTKYYSELTTKLKEEIRDIVIFYQRKLKSQKHLISNCEFEKYHKSIPKSSPLFQEFKIWQNLNNLEIKHIETKEKQKLDDDARNLLFEELNLRGNLKASIILKLLKLDAKKWSLNFKEIEGNRTNEALYNVYQKIADFEGYGFDWSKKIASKIKEELYTIFPEIGISTKILGFNSELSGNDFDKQESYQLWHLLYSEEDNKTLKQNLYKKYGFRPEYTSMLTNVSLQQDYGRLSAKAIKKVIPFLISGNNYSESCALAKYNHSHSLTKEELETRPLKDKLELLQKNSLRNPVVEKILNQMVNVINQVIETYGKPDEVRIELARDLKKSAKERAETTKYINTATNANIEFKKIITKVFGIPNPTKNDLIKYKLYEELKDRGYKTLFTNQYIKKEDLFSKNIDIEHIIPKSKLFDDSFSNKTLAFRKVNLAKADRTALDFIESDYNADLDNYKKSIDALYNKGKGAISKGKYKKLLMAEKDLPDGFIDRDLRNSQYIAKKAKQLLQETIRTVNTTTGSITSKLREDWDLINVMKELNLPKYRKLGLTEIQERKNNKKFEIIKDWTKRNDHRHHAMDALTVAFTTYNHVQYLNNLNASRDSENSKLYGIRTKITKVYEYKNGNKKRKFIPPMSNFREKSKKEIESILISFKTKNKVVTRNINKTKQKGKDKYNTKIQLTPRGQLHKETIYGKMKEIVVKEEKIGGKFDELKINQITKSIYKDALLKRLADNENNPKKAFTGKNALSKNPIYINKSKTKEVPEVVKIKFFENNYTIRKDINSDQFKDFKSLQKIIDVGVRRILENRLTEFNNDAKKAFSDLDKNPIWLNKEKGISIKRVTISGVKNVEALHTKKDHFGKEVLDKDGKTQAVDFVSTGNNHHVAIYKDKDGKLCDNVVSFYEALARINAGLPIIDKEYNGWQFLFTMKQNEMFVFPSDNFNPKEIDLEENKNINIISKHLFRVQKFSKVEYGNSAVRDYVFRHHLETQINNKKELRNKSFIISKSLLLFNNILKVRINHIGKIVQVGEY

SEQ ID NO: 210 - protein, 1376 aa, unidentified
  REGION 1..1376: note = Description of Unknown: Cas Enzyme sequence
MKRILGLDLGTTSIGWAFVNEAENDKESSSIIKTGVRVIPLSADEQQDFKKGNNITINADRTLKRSMRRNLQRYKQRRIAVIEELVKIGFISKEDSLAEGGKNTTHNTYKTRAIAPTEKISKKDFAKVLLMINKKRGYKSSRKANNQEEGQLIDGMAIAKQLHIKKLTPGQFSLQLLEGGKKTLPIYYKSDLQKEFDTIWDFQKQFYPEQLTTAHKEGLIGLGQRASGTYFEKTIGTPRAENKGKEKKLQEYQWRRKAITKQLDLTEVAFILTELNNQINQSNGYLGAISDRSKELYFNNLTVGQYLYEQLKKNPLASLKNQVFYRQDYMDEFDAIWNEQSKHYPELTEETRKQLRNISIFYQRRLKSQKGLINICELEGKEREVTIDGEKKKKIIGPRVAPKSSLVFQQAKVWQNINAIIITNNKTNKKRTLDQEIKELLFEQLNITNSLSDKEVLKFLASVSDIKIKDWSINFEKIEGNRTLAALYKVFEKIVEIEGYPEFFKDKNGGEIRESLEKCFCESGINTGILKLEFQSTGNEFAKQPAYQLWHLLYSYEDDNSPTGIESLIVKLQEKFGFKIAHAQILANITFQEDYGSLSVRALRKIYPYLEEGKMYDEACMLAGYNHSNSLTTIENEKRPLLEAIKILKKNSLRNPVVEKILNQMIHVVNTIIAHPEMGRPDEIRVELARELKKTAKQRNDLTKQIGAATKKHEEIRDYLKKEIGLKYVSRKDLIKYKLYQELASIGHKTLYSGTYVELKDLFFSNKFDVEHIIPQSVMFDDSFSNKTIELRKVNLEKGNETAYDYCERKGWLKSFDSSVQEVFKAKGIKYGKLKKLLMKKEEIPKDFLNRDLGNTAFISKKANEILKQVTRRVQPTSGNITAKLRSDWELINVLKELNWDKYKAVGLTYYDYNKQDKALPRIKDWTKRNDHRHHAMDAITVAFTKPAFVQYLNNMNAESNKGIIIQKIKDKFTYRDKKDGRKFIKPYDTIREDAKKHLSEIFISHKAKNKVVTRNKNKIKIKGKNNYKIQKVLTPRGQLHKETIYGKSKYYVVKEEKINGSFNKEKISTITNLIFRNAVLERLLVNENDPKKAFTGKNALTKNPIFTEGSENSVPLVVKTQVLKSQYTIRKEISSDLKIDKVVDQGIKKILQIRLKAFGGKPKLAFANLEENPIWLNKEKGISIKRVTITGVSNAESLHDAGDLNGNKLENKYGALIPKDFVSTGNNHHVAIYRDEKGNLQEEVVSFYEAVIRKNIGESIIKMNHEKGWKLEFTLKQNEMFLFPKDDFIPNEIDLFAPENRKIINQNLFRVQKISTKDYVFNHHLETMAVSADDFKNKKMLSNLTYKRYRSEKSLEGIVKVRLNHLGEIVQLGEY

SEQ ID NO: 211 - protein, 1393 aa, unidentified
  REGION 1..1393: note = Description of Unknown: Cas Enzyme sequence
MKKILGLDLGSTSIGWAFVKESENENEKSEIVKLGVRVVPLTTDEETDFERGNPISVNAERTLKRGARRNLDRYQIRREALIEILKQNGFIEDGTVLSEDGKHTTFEKYRIRAKAAKEKISKEEFARTLLMINKKRGYKSSRKTKQEDEGTAIDGMEVAKYIYDNDLTPGQYVYDLLKKGKKHLPDFYRSDLQAELNKIWEFQKEFYPEIFTDEFKEQISGKGKQAISKMFLEKYGIYTAENKGKRDEVRLQAYKWRSEAIVKQLLKEELAYVIVEINNNINSSSGYLGAISDRSKELCFKSQTVGEYLYQQLRNNSHTRLKNQVFYRQDYLDEFEKIWEVQNAFYPELTKELKREIRDVVIFYQRRLKSQKHLISKCEFEKNHRVVPRSSPLFQEFKIRQTINNLRLRHIDSGEVFGIDVFDDTIGEQLFEELNIRHKLKDKEILKILVKNPKEYELNYETLEGNETNAALYDVYAKILEFEGELVDFKKLNASQINDFVSTKLLELGIEPGILTFEGELEGDMFDKQPLMQLWHLLYSFEGDNSVTGNKKLIEKIKEKFGFPDSYARMIANISLKPDYGSLSSRAIKKILPYLKERNTYDMACYYAGYNHSSSLTKEELESRGLKDKLDLLKKNSLRNPVVEKILNQMVNVINAIIDDENLGKPDEIRIELARELKYSADERKRMTANISKATREYEGIRKILQNEFGVKKVTRNDIIRYRLWKELESNGFKTLYTNTYIPKEKVFSKEFDIEHIIPQAKLFDDSFSNKTLSVRHINIEKGNKTAYDYLKEKLSTEDFEQYKARIDKLYKNSVLTRAKYNKLLMKEKEIPDGFIERDLRNSQYIAKKAVQMLSEVVRSVTTTTGKITDRLRSDWQLINVLKELNLPKYEKLGMVKVIEGKDGKPERQIVDWTKRNDHRHHAMDALTVAFTTRSHVQYLNFMNARNNEMHKKYHEVYGIEKKQMHRDKNGKLIFISPVPVSKFRTEAKKHLESILVSFKAKNKVATRNRNKIKIKGGFKEKIELTPRGQLHKETVYGKIYRYATKLEKVGSKFNEETIGKVADKKYRQALLKRLNDFNGNTAKAFGGKNSLSKNPVFTESNVKVPEKVKLVWQKPVYIIRKKISPDLFRNSKKEDIFHKKIEDENFIIDNKIREILKTQYDKAKKEVKEYNQTVEKKNQKKALETALSDLEGNPIWLDKEKGICIKRVTITGVSNAEPLHYKKDHNGKLILDTDGEKQPVDFVSTGNNHHVAIYRDAKGNLQEKVVSFFEAVERKRQGLSVIDKSFKSDEDWEFLFSMKQNEYFVFPSDDFDPNEVDLHNPKNLSMISPNLYRVQKIASTNYMFRHHLETTVEEKKELKNISHINIRTPKGLCDIVKVRLNHLGRIVSVGEY

SEQ ID NO: 212 - protein, 978 aa, unidentified
  REGION 1..978: note = Description of Unknown: Cas Enzyme sequence
MLERTARRLTGLAVLLQGGGLLPQGPLSSEEERHRFFLNLDRTLSLALPAGQDPAMLPYRLRARALDEGLQAYEIGRALYHLGQRRGFLSNRRAPSKKHEESEVKEGIAELAREMEAAGARTLGEYFSGLDLHHARIRHRWTSRQMYLDEFDKIWETQAQYQPGLLTNEFRRQVHRAIFYQRPVRSASHLIGHCDLEPGRKRAAWALLPAQRFRLLQKVNDLELATPDGVRRRLTGPEREALVAHLETKGDITFPRLRGLLSLDKRTGFKLAESEDRVIGNRTAARLMRVLGESRWEGLSSEDRERIVEDLGSIQKEEALARRVRRVWGLDEEKARELASTRLEEGYCNLSRKAIERLLPLLEQGVAYATARKQVYGDAPPRAAYDEVPPFDLPRRLGRLSMPEVRNPAVKRALNEARRVVNAVIQEHGKPDIIRIEFARELKKARKERKAISERNRANRKAREEAASRLLQEAGIQPATRRDIEKWLLAEECRWECPYTGKQMSAGSLFGEAPQFDIEHIIPLYRCWDDSFFNKTLCEVNENRNVKANRSPWEAYGSDSERWDEIIRRVKSYRGAAAKAKLERFKMTDLVSLDDFAGAQLNATGYASRLARECFGVLYGAGADGVDPRGKVRVQVTRGGVTRYLRDEWGLNAMLGGAEKRREDHRQHAVDAILVALTDQRAIKALSDAAERARSVRRRRFAPIEAPWRSFVEDVGQALETLIVSHRVSRKVSGPLHDETYYSRPRADMEGEERVRVRKPLNGDFKDRDVEAIVDPAVRERVREHLERHAGDARKAFGDAADLPFLEAKDGRRMPIRKARIYKALRTQAIAEGARRREVATGSNHHVEILEVRNKKGAVKWEGEVVTMLEAMRRLRAGEPVVRRDHGPEKRFLFSLCGGDTIELDSEGSRQLYVVRSTSPAGGGRYVLVEFVRNNEARNVGHIKKGGEWSKALLDPLRERNCRKVVVSPLGEVRAAND

SEQ ID NO: 213 - protein, 1066 aa, unidentified
  REGION 1..1066: note = Description of Unknown: Cas Enzyme sequence
MKSAQGVNSGDLVLGLDIGAASVGWALIQLQDGMPKVLRATGVRAFPAGVEGGDASAITAGRDVSSAAKRREARSRRRLLARRRHRLTKLALLLQQAGLLPQGDVASGDALVGYFEALDRELFPADARHDTPHLLPYRLRARALDEKLAPHEIGRALYHLAHRRGFLSNRRVKPKAAGVKETDEEKEEGKVKGAISELAQRMRDSGARTLGEYLATQDPEEKRVRNQYLGRKMLEDEFDRIWAGQAEHYPHLLTDELKQRVHRAIFFQRPLKTQRHLIGDCDLEKGRKRAPLALLSAQRFRLLQKVNDLRVRPAEGEERELTPAERTALVDALETQGDVTFATIRRLLHVPRETTFNFQTEGEKGLIGNRTGRKLAEVFGNEQWAAFAPTERDRVVEDLLSIHNHEALKRRAAKAWGLNDTAADRFASIALEYGYCNLSRQALAMVLPPMEQGIPYGTARKQIYGESPPLTAAAALPRLEAAPFTVRNPAVERALTEVRKVVNAVVREHGLPALVRIELARDLKKPRKERKAISERNAANRREREAAAKEIEDLVGPDPRRSDREKWLLWKECRGQCPYTGKPISRDALFGEHLQFDVEHIIPFPRCLDNSFMNKTLCEVTENRSRKGNRTPWEAYGHDPERWGEIIARVRGFQGQAARAKFSRFQTREVASLEDFTTQQLNDTRYASRLAVEYLGLLYGAGRDGVDPQTHRKRVEASRGAVTYDLRSVWGLNGILGGGEKTRDDHRQHAIDAVVVALTEPTAIKRLSDAAERAPLQRRRLFADMAPPWPDFIDHVRAAIEAMVVSHRVSRKVAAALHEETIYSKPHFDDDGKQWVHVRKPLDQNFSARDVPNIVDPAVRQAVHKKLEEVGEKALKDVGNHPALATKDGRQIPIHSVRLRVPITTEPIGTGASGRHVKLGSNHHVEIIETTDRKGQPKWEGIVVSTLKAMQRLKARQPVVQHDHRPGKELKFSLAGGEIIELDAEQGKKDGSDRPCSAAGLYAIRTVSVSKTGRVEVAFVSIKDARKKADIQALGAWGRSDVDPLRRRNCRKVVVTPWGEVRRASD

SEQ ID NO: 214 - protein, 1252 aa, unidentified
  REGION 1..1252: note = Description of Unknown: Cas Enzyme sequence
MKKILGLDLGVSSIGWALIKEEQEKPVEIIGMGVRIVPLDTDENQEFTQGNTITKNQERTKKRSTRRSYYRYVLRRKALTAELKKHQMFNEKLFGISKLELWGLRSKAVEQQISLEELGRVLYHLNQKRGYKSVKNEEKDNKEETNYVSEIKNRYDLLKNEGKTIGQKFYEELSKNYHYRIKQQVYPREAYIEEFNKIIKKQQEFYPEILTDEFINHLRDNIIYHQRNLKSQKGLVKTCEFEGFHIKNKDGKEIFTGPKVAHRSNPLFQTAKIWESINNIVIEDKRKNKYPITIEQKQAIFQYLDNNIRLSQSELFKILGIKDKSEWYGNKMLSRGIQGNTTKVAIKEALNNNDLAKHLLQFEIKVKKVNQSDNSNTYLIDNDSGEITKEEGRLIVDNNIVNEPLYQIWHVIYSIRDINKCKYVLVKKWGLDEITAEKLAKIDFTKSSYGNKSIKALRKILPYLMKGYKYSDAASFAGYNHSKSLTKEEIIEKKLLDKIPLLPKNVLRQPVVEKILNQMIHIINDIIDENRGWITREERDKGKFEIRIELARELKQSREERNETYKNLSRIEKENKEIERRLEELGVRATRKNIIKYRLFSEISENKINATCIYTGKMFSLTDALNGNEIDVEHIIPKSILFDDSQSNKTLTFSYINKEKGDRTAYDYMASKGEEELSKYIERVDQLFKNKIINKQKRDKLLMPANNIPKDFIERQIRESQYISRKSREILNQICKNVWVTGGGVTAYLRRIWGWEDILMHLQLKRIKELIPDPVGEKITEIVEWETEDGQIHHKEVIRNWNKRNDHRHHAIDALVIACTKQGYIQRINTLSAKTTRDEIFKEVSQRNTDFRESLSLLDKYFITQKPFTSSQVEEKVNKVIISIKPGKKVATYGKRFIRKNDKRIIVQDHIIVPRGALSEESIYGKIKILDQKKPVKYLFKNTHLIFKPYIKELVEQRLSEYNGDAKKALASLKNNPIYLDNKNRKVPLEYASCFKEEYVIKYPIKSITEKDIEYIVDKKVREIISQRLKQYSGNTEEAFKEPVYLNNEKKIPIKTVRMFTKLSAVEVLKYDENGKPIAYVKTGNNHHIAIYQDEDGKKIPHLCTFWHAVDRKKYGIPVIIDNPKSVWDKILSSKENYPQSFLIKLPDQNWKFIQSFQQNEIFYISPDNKDDINIDNIEPFNLYRLQKISMKKGKKIDLWFRQIFETETNDSENYSLIKKFYNAQSISRIETLNPIKIKVNRLGEIEAIDLK

SEQ ID NO: 215 - protein, 1281 aa, unidentified
  REGION 1..1281: note = Description of Unknown: Cas Enzyme sequence
LAHYFEKCDFMGKILGLDLGSASIGWAVIEEKDSTVKIVALGSRIIPYDGTEGQDFAKGTGESRNSLRTKARTARKGYDRYQLRRKYLVDVLIKNEMMPDENLKSLPKMQLWELRSKAVTEYISKQELGRLLIWLNQKRGYKSSRSDANLDKKDTDYVKDVKSRFEKIKELDLTIGQYFHNELKNDEYFRVKENIFPREAYIEEFDVIWNTQAKYNPSLNDCPKEILEKIANGIFLGSSSSQQSLRKDAITNGLKYIIKNQIIYNQRPLKSQKGLVSVCEFEGFWTNKDGKEFFVGPKVAPKSSPLFQLAKIWENVNNIRLSSKRGETIELALEEKQKVFEHLNNNEKLTATDLFKILGKSKNEFTVTKQLEKGIQGNITRNAIIKVLGENEVSKKLLKLDLNIVETDKSGYLYSKKTGEVLGEKPVKYIDAGVENEPFYQLWHTIYSINEIQECSHALQKRFGIDTETADKLAAIDFSKFAFGNKSAKTIRKILPYLMEGNMYSEAMSYAGYEHSNSLTKDENLGRKLLDKLKPVEKNSLRQPIVEKILNQMVNVVNAIIEKHGKPNEIRIELARELKQSKEERNDTDKAMSKRQRENEVIANYLAEYGLRATKNNIIKWRLYQEIDNQDKKLNAICIYCGQPISITEAIKGTEVDVEHIIPKSKLFDDSQSNKTLAHRRCNANKGDMTAYDFMKTKPQQEFDAYVERVNTLYANRIIGKAKREKLLMSEDKIPDNFIDRQLRESQYIAKKAREILQTVCHNVWSTSGTVTAELRHLWGWDDITMNLQMPKYKELGLTEMVEWESENGKNKHSKEVIKDWTKRDDHRHHAIDALTIACTKQGFIQRFNTLSASKTREDMLKEIEQRSEPYKEKLSLLEKYIVSQRLFSVAEVENAAAQILISFKSGKKVAVKGKRKIGKRGNKKVVQTDIIVPRGALSEESVYGKIKTIEKNKPVKYLFENPHLIFKPYIKNLVEQRLEKFENDTKKALASLKKEPIYLDKEKTKLLEYATCFKEEFVIKYTVDTNFNKTDKIVDEQIKRILQTRLQKFDNKPKEAFKDVQQGEKSLKWYEDEGLERPILSVRCFTGLSAVVPVKKDGEGSEIGFVKPGNNHHIAIYANDDGDKPEQVCCTFWHAVERKKYDIPVVIKSANEVWDKILQQRENTYPQSFLEQLPPPNLDLKLSMQQNEMFILGMTNEELKIAIDNKEYRKISENLYRVQKIFGNKKQIEVVFRHHLETQLNDDNNAKISKRFVKIQSLSTLFSLNPFKVKIDCLGDVKPQ

SEQ ID NO: 216 - protein, 1476 aa, unidentified
  REGION 1..1476: note = Description of Unknown: Cas Enzyme sequence
MKKVLFLAHYLEKCDFMKRILGLDLGTTSIGWALVDEAENNEEKSSIIRLGTRIIQYDNFVSTVTKKEIKGDPADAFRAGKGVSPNAARTQSRSMRRNLQRYKLRREILIEILKERGFISNETILSENGNRTTFETYRLRAKAATEEIGLEEFARVLLMINKKRGYKSSRKAKGTDEGTLIDGMEVATKLYNDNLTPGQFCLQLLQADKKYLPDFYRSDLQAEFDKIWTKQQGFYPEILTDELKDKFVKIEVKNGKKNIKRTNKGETWKICETPFSIIGIKREAKGAEQKKQNFEWRAKAIAEKIDLEHLAIVFQELNNEINNAGEYLGAISDRSKELYFKKQTVGQYQMAVLAENPNASLRNMVFYRQDYLDEFNTIWDKQAEYHKELTEELKEIIRDGKVCNGKIRGGIFFQRRLKSQKGLISFCEFESRKIEVEINGKKKTKIAGSRVIPRSSPLFQEFKIWQILNNIEVSVKGRKTKKQKEISLFAEQEPLEVYGKRELYQEEKELLATELSVKEKLTKAEILKTLFDNSQELDLNFKEIQGNLTQAKLFEAYKRIVEASGHELDLKKSAEKILKNVEEVFKGLGYHTDILVFDSDKPLDEQPMYQLWHLLYSFEGDNSNTGNENLINKISELYGFEKEYALILANVVFQDDYGSLSAKAIRKILPHLKDGFSYGGRKNRSEEPSACFLAGYEKHSKSSETKEEIENKVLKDKLEILPKNSLRNPVVEKILNQMINVINAIIETYGKPDEIRIELARELKKNAKEREELTKSIAETTKLHDEYKKILSQPPFNLSYISRNDIIRYKLYKELEQNGYKTLYSDTYISPATLFDGSFEIEHIIPQSRLFDDSFSNKTLETHEVNHPKNGKGNRTAYDFIKEKYGENGLEDYLSRIEALFKQGIISRAKYNKLKMQEKDIPEDFINRDLGDTRYIAKYAKTMLGDLVKRVVPTIGSITDALREDWQLIDVMKELNWDKYNALDLTYYEENREGKPLKRIKDWTKRNDHRHHAMDALTVAFTKKAFIQLFNNRNASLKPNSNEFALKNLYIENGIVKPPMPLNEFRAEARKHLENTLISIKVKNKVVTQNINKAKNGATFEKKIANNETKKIKGQQCFTPRGQLHNETIYGSLKQYMVKEEKVGTTFDEAKILTVSKPAYREVLLKRLQENGNDPKKAFGGKNALAKNPIFISETEQLPEKVKTVIFEAVYTIRKEISPDLKLEKVIDVGIRTILKNRLKEFGDDPKKAFVNLDENPIWLNKEKGISIKRVTISGISNAESLHDKRDKDSKLILDENGKKQPVDFVNTGNNHHVAIYCDTEGNLDEKVVPFYEAVARRNAGLPIIDKNYKRDEGYEFLFSMKQNEYFVFPNEKTGFNPKEIDLLDPDNYALISPNLFRVQKVSTKNYMFRHHLETKVSFEVKDESKSKEEQKKRAKEIENKLRRIAWELIQTPNNLQGIVKVRVNHIGQIVSVGEY

SEQ ID NO: 217 - protein, 1628 aa, unidentified
  REGION 1..1628: note = Description of Unknown: Cas Enzyme sequence
MKILGLDLGTNSIGWALVNEAENSEEKSSIIQLGVRVNPLTVDEQQNFEKGKSITTNADRTLKRSMRRNLQRYKLRREKLIEILEENNFISEETILSENGNKTTFETYRLRAKAATEEVTLEQFARVLLMINKKRGYKSSRKAKGQDEGQLIDGMEIAKKLYNENLTPGQLCLQLLENGKKYLPDFYRSDLQSEFDKIFDNQFAFYPDYLSLDLKEELRNKKRDAVWAICAKTFKDKGFELVGIKRQGSTAEQKIENYLWRAKGLTEKLDLEQIVIVLQQINIQINSSSGYLGAISDRSKELFFNKQTVGQYQMAVLSENPNASLTNMVFYRQDYLDEFNAIWNKQAEYHKALTEELKNEIRDVVIFYQRRLKSQKGLISFCEFENNIVEYKEKIIKLQKCQLINLKETTITILNKQGEKIKIKEEFIENFFKNNSIDEMPIELFKRQLNIENVEKIYYKQGHRVIPRSSPLFQEFKIWQKLNDIEVFPANEKNKKRKPNARRLEQDEKELLFTELSVKEKLSKDKILLILNLQEFDMNFNSIDGNKTQYELFKAYKKIIELSENEIGDDFSIETIEENFKQLGINTDILRYSLPEDVRKINKNGEDVSVTEECEMYKLYHLLYSFEGDKSNSGIENLLNKLKELYGFEKEYAKILAGVEFQSDYGNLSAKAIRKILPLMKMGQDYTTACANIYERHSKSSLTTEELEKKVYKNKLDILPKNSLRNPVVEKILNQMVNVINEIIEAHGKPDEIRIELSRELKKNADERFLLTDSVNNNTGDTERIKQRLKEDFNIANPSRNDIVRYKLWEELSLNGHKPLYGCKENLQKEISPAILFSKEIDIEHIIPKSRLFDDSFSNKTLVFKSDNTGPNGKNAQTAIDYVKQVEGNIDDYLSRIVKIFGTKTTKKVLTNKATGNKSVKSETKTFDTLQKEYIKSLKKKQKEEWEHLSENDKKLRIINKYFSNKLKKLVITGDELPEGFIERDLGTTQYITKKAKTMLGDLVKFVVSTTGSITDRLREDWQLVDVMKEMNFPKYEQLGLVENIERVDYETGEIRKVPKIKDWTKRNDHRHHAMDALTVAFTKRQFIQYLNNLNARRTDDNMTISNTENEEQDNFAITTEDTILNTRDVLGIEQKELYRDKRNKLRFNPPMPLNEFRAEAKKHLDNTLISIKAKNKVVTQNINKTKKKGGTNKKIQQTPRGQLHNETIYGSQKQYAVKEETVNAKFDETKILTVAKSVYRVALLKRLQENGNDPKKAFTGKNSLANNPIYLNELHTLKVPEKVKTVAFETIYTIRKEISPDLFKDSKKKDIFEKAFIENKQELDKILEEDRKNKVVNKIYEQTINFIFDKNVRIALIEKYKKTKKEVDEFNNTATKDKKKVLETAFSNLDENPIWLNEKKGISIKRVTISGISNAEALHDKRDKDGYWILPNGTRKKVDKNDKTTIKQPADFVSTSNNHHVTVYRVPMLEKNGNHEQDEDGNKKYELQENIVSFYEAVARKNANLPIIDKEYKDKNGNKVEGSEFLFSMKQNEYFVFPNEKTGFNPKEIDLMNPDNYWLISPNLFRVQKFGSLLSGFWFRHHLETTVNTPKEMKGITYKVIQSAKNLNEIVKVRVNHIGQIVSVGEY

SEQ ID NO: 218 - protein, 1190 aa, unidentified
  REGION 1..1190: note = Description of Unknown: Cas Enzyme sequence
MKTLGIDLGTNSLGWAVINATGVENTGVLVFEEGVNREQSDSLETPAAARRAKRMARRLRFRRKLRRRLILKILIENGMCPLTPNELKMWSQTGSFPKDNAAFLNWLKSTDTDNPYSDRAAAASGKVAPEVLGRAIFHISQRRGFKSGRKDQPEEGEEKSAAAKELEGMKGEIAALTAELEKSGLTLGQYFYEEIKHGNKVRKRHTGRIEHYQKEWAKIAKAQGLSKDLTDKIDKTLFWQRPLREQSFLVGKCPLEPKRKRAQIGHPEFEAFRALSFVNNIRWGRDGSPSRPSLPLAAEQRAVALACFIRKTPFDFKVIHKALEKQFPELKGAAFNYEDNVSLSPSKVTAALKERLPDGADLQKAFDALTFFDDNEKLQIWAQKQLGLSGEQSASFVKIRIPEGRAGYSLHAIRKINRFFRKGTELSEAIFLAKLPEVIPDFDTKEDGIVAKVHEHNELYRENKRDAYRDTRTENRVGVLSLEKRLASWLEADYGIHTEVFRTLYFRDPKADSSYADVRSGGTVLPPVNLGMIRNPLVQRSMTMLRKLVNELRRKGVIDAETRIHIELARDVNSRNDRMAIQAWQKQNEEARQKAKAKLQEQGIDNPADDLVLKYVLAEEQDWACPYTGRKINIEALVKGGFDIEHTLPRSRSGDDSQANKTLCDIAFNRDIKKDRMPSELPNHDEIVTHLRPWLNKIDELKTLKEKQAKIAKSTSKENPEARSKARQKMLVTKLELKYWEDKYHRFTKETDDVTPSFISRQLVDTGIMTRHAVALLKTVYPDVYPVNGQAVAFARKLWKVQGEDEIKDRSDHTHHAKDALVIAALSRERFQKICAELKTDDERKNPKFNVAPPFPDFAQTVFNITQGILVKHVTRHNGLKQTYYKKPRRLSGLTKGKDGNPVTRKPAAGNTVRGQLHEETFYGKIKRPGHAEPVCVIRKALASCSEKDVAAIVDDVIRKCVQDKLAQLGGDFKKAIVQDVFAMASGVPIRKVRVFVTPHTSLNEIRRHTATPSMHDYKRPVYACTAAGSNLGIAVYKVPLRTQPDFIIEKLLDAVRNAVPPAPNGAELLGRILPGAMALARLECGGLPPLSESGCVLPYSKTLIYKVRKFDKNGITLWFHREARAKKDLEADLKTAQKNSSGSSSVDYEHPHEVLCLNLRKAWNSFLFEGIHFKMGLDGRIEYLTGVEK

SEQ ID NO: 219 - protein, 1179 aa, unidentified
  REGION 1..1179: note = Description of Unknown: Cas Enzyme sequence
MKTSKTLGLDLGTNSLGWAVIDETAVEAAGVLVFEEGVNRVQSDSLETPAATRRAKRMARRLRFRRHLRRRLILKSLIEQNMCPLTREELKAWAQTGTFPKDNTAFVEWLKSTDTRNPYCDRARAATEKVDPLTLGRAIYHLAQRRGFKSGRKDQPEEGEEISASKAKELGEVKGNIARISAELDKSGLTLGQYFFNEIKAGRKVRKQHTGRVEHYEKEWTKIAAVQKLDKTLAENVARALFWQRPLREQSFLVGKCPLEPKRNRAQIGHPDFETFRALSFVNNIRVLDGETRTPLTAEQRDVAADCFIRKTPFEFMDIGKKLRKQFRDLTEAKFNYDDDNPSLSPSKVTAALKGILPDSTDFQREFDALSFFDDDKRLKSWAQTQLGLSEVASAHFANIRIPEGRAGHSLHSIRKINRFLRKGVELSEAIFLAKLPEVILAFDAEEDGILAKVHEHNELYRENKRTAYHDTRTENRIGVLSLEKRLRSWLEEDYGIGKDMFDTLYFRDPKADSSYSNVRSGGTVLPPVNLGMIRNPLVQRSMTMLRKLVNELRKTGKIDADTRIHIELARDVNSRNDRMAIQEWQKQNEKKCADAQAKLQEHGIAKPAEDLILKYVLWAEQPEHCCLFCGKSLGIDDLVNGSDIEHTLPRSRSGDDSQANKTVACVNCNRNIKKGLLPSDLPNHEEILLRLRPWVERIRDLKTLKEKQARIAKGLSKENPEARSKARQKMLATKLELKYLEDKYYRFTKKPDDVTPSFMNRQLVDTGIMTRHAVALLKTVYPDVYPVNGQAVAFARKLWKVQGEDEIKDRSDHTHHAKDAMVIAALSRDRFQKICAELKADDERKNPRFNVAPPFAGFAQTVYDATAAIPVKHVTRHNEFKQTHYASKRLSGLTKGKDGKPVTSKPAAGNAVRGQLHKDTFYGKIRLPGQTEIVCVIRKELSSANFKSEDTLETIVDPAVKARIKTIIATRGDDFKKAIDQGGFTMSSGVPINKVRVKDRIRNPLPLRDHEATPSQHEYKNPYYVAPAENSNFCLSVYRIGNEKPLFVVENLLKFVQGGIRPVPEGACRLGRILPGAMAIAYQSPDEWSESDFHFEKRLYKVENFSESDNRMVLRFHKEARKMTDVDEAKQSSVDFEQPHALLRLSFKKAWSTFLFEGIHFAMGLDGAVTFTHREADA

SEQ ID NO: 220 - protein, 1563 aa, unidentified
  REGION 1..1563: note = Description of Unknown: Cas Enzyme sequence
MKKILGLDLGTNSIGWALIERDFEKAEGEIDGLGSRIIPMEPEMFSRFGTGLPLSKSNTGIAYTPSGKRTDYRGVRRLFQRDNLRRERLHRVLNILGFLPKHYANTIDFAEHFGQFKKDTEVKLNYRKNKLEKYEFIFMDSFNEMVKEFEAEGQETKIPYDWTLYYLRKKALSKKITKEELAWIILNFNQKRGYYLRGEEKEISDGKKKEFVVLKVKGVTDSGEVIKKSGDKLYDVVFENGWSYDKQITKTENWIDRTKEFIVTTTIKKDGEIKRTFKAVNSEEDWIAIKTKTQQDIDTSGKYICEYIYNALLLNPTQKIRGKLIKTIEREYYKKEFKAILKEQIKHHTEINVRTVVGKKLYQSCVDELYPRNEAHQNNIKDKDFTYLFTDDIIFYQRPLKSKKSTISGCQYETRRFKKKVIDKVTNEEKEEWLTEPIKAIPKSHPLFQEFRLWQFLKNLKVYKKEDAKGNLIDKDITSELLQTEDDWVSLFDFLNERKTIKQNHIIDFFIKKKSIDKKQKSNFYWNYVEDKEYPANDTKASFISRLKKVKDLNAIAFLTPKTEYKLWHIIYSVTDKNEFEQAITNFAIRNNIDQKSFEDNFKKFPPFKSDYGAYSEKAIKKLLPLMRRGKYWDEDNISQEVKNRISNIKDRLESIDYDIEVFKTDKNKRLQTIVDDDVPEQLLKSFVEFKNQNHLAGLNTYQACYAVYERHSEASTITQWKTPDDIDKFLRGFKQHSLRNPIVEQVVTETLRIVRDIWQYYGNGKEKFFSEIHVELGREMKNPAGKRESMAKKNIENENTNQRIKAVLHELMNDPEVDGDIKPFSPSQQEILKIYEEGVFQNPAVSYKNTKEDDIVKIRKNSTPSKTEITRYKLWLEQGYVSPYTGKMIPLNRLFTEDYQIEHIIPQSRYFDNSLSNKIICESEVNALKDNQTGYDFIKNPKMKIVDLGQGRSVPLFSLEQYESHCNNYFKKNRTKLKNLLSEDIPKGFINRQLNDSRYISKLIKGLLGNLVREKNEREVTSKHLIPVTGTITSKLKQDWGLNDKWNELIAPRFERINKLITKEGESLSKDFGYWENQNGKKFFRTQVPDEISKGFSKKRIDHRHHALDALVIACCTREHTHYLNALNSENKNYGLRNSLLKKNDNGDYTKHFLMPWRNFTTNTKSQLEKTVVSFKQNLRVINKTNNKTWQWKEVDGQLKKKLIKQEKGDNWSIRKPMHKETISGRVFIDEFKRISIYTALKNHTLIIDKKIRDIIIVKKKDFNNKELVAYFKKNPIKQNGIKITKVKVWVKATATRIALCNKFTRKQLESITDTGIQRILENHLKNYIDEKGKEQFDLAFNTEGVDELNKNILKLNNGKKHQPIYKVRIYEVGKKFNVGLKGSRESKFAEAAKGTNLFFAIYWNDEKQKREYETIPLNEVIEHQKWRATLGKEERNNTPLIPIKPEKGVFLFTLSPNDLVYVPTDEELENQALVNFDNLSKEQTNSIYKMVSTTKGECHFIPNSNATEIIKNENGTNSKSERVQNFYNQSVVLGTDNKPVMIKTRCWKLKADRLGNIVKDW

SEQ ID NO: 221 - protein, 1188 aa, unidentified
  REGION 1..1188: note = Description of Unknown: Cas Enzyme sequence
MNKRILGLDIGVSSVGLSVIEDNDGLKEIKEMAVRIVPEDPNFQGKFYSGNTASKNLSRTTDRGIRRNNQRFKARRDKLYAALKELDMFPEHTLMNLPALELYGLRAKAVTDQVSLKEFGRVLILLNQRRGFLSNRKSNSEEENSTDYKKRIAELEYELDNRTIGQQLYHELQSVKHPLEILLRERTYLRASYIEEFDRIWENQKQYDPETLTGGVNLDDNKGTLYDLLRNKIIYHQRPLKSQKGLVSDCLFEKQHKAVSKSSPYFELFRTLQKVNDLSWKTPDGSKYEPNHTQKQLLRDTLFKGVEAKSKYKLTISKIKALLGYSRNEKVYLNFTELDGSRTYAILRDALTSAGIENPEQFLFFNINQNDEKGGLFQLWHITYSLPSQEEVVNALIKHFNFSKEQGVIIAKHVGYNSEYGSLSTRAIRKLLPYMEKGNGYSEACDIVGYDHSGYKTKIDLHDKLKPLLPNSLRNPVVEQVLNQVVNMVNQAIDKHGKFDEIRVELARELRNSADSRRRMSRNNRTNKTFNDSIRTRLHSEYGFKVVNGRDVKRYKLWDQTNKQCLYCFHHITKTDLLNGKADIEHILPKSRSFSNHMNNFILAHRTCNADKGQRTAYDFMESKGMEKLTTYIELANKFFSEGKGSITKAKFENLMCKGDQIPSDFVERMKKDTQYISKESVKMLKSVCENTYTTTGQITDLLREEWGLKHVLEEITFDKYKAAGLTEIKQYKDSEGNIKSREIITAWSKRDDHRHHAVDALICALTDQKIIFKLNNLNKIYQFERDALTKEELVKFEKDLEGRFDLKEFIAQAAYEFPIPIPQLRTKAKKHLESIFISIKKSSKVLSKSINTPKNAPAQTTWTPRGRIHEETVMGKVKRIADKPVKLDKKFLQLEEIVSPPLKELIKTHLRKYENDVSKAFSAQTLKTNPIIYKNEEIRAVKVYQESCTKRVALSENFTAAQVLKITDERVKNILQERIAEHGGIKKALSNLEENPIWLNMEQGIKVKSVTVYDESKVEKVREGYVKTGGNHHALIYKSEEGKYIDKVVSFWEAIEIGRANIQETGKPYPIIKRSDNSEFGIFQFSMQINDLFVFDLKHTENPQEENELNFLESDNRWLISKKLFRLQKMSKKSSGEFDVHFRHHLESSVERSIRELTWINIRSNKLLIRLTKIRINHLGEIIKIGE

SEQ ID NO: 222 - protein, 1371 aa, unidentified
  REGION 1..1371: note = Description of Unknown: Cas Enzyme sequence
MKKVLGLDLGTTSIGWALVNQAESSGEHSSIIATGVRVNPLTTDEKDSFEKGKAITTNADRRQKRGMRRNLQRYKLRREHLLSVLRREGWISEDTVLSEQGARSTYQTFRLRAAAPAEEISLEDLSRVLLMINRKRGYKSNRKTDKGEEGHLIDGMEVARTLYDEGLTPGEYSLRLVNEGKRVLPDYYRSDLVAELEKIWSSQKVWYPDILTDEFKNSIENDGRNGVIKKFLSRYSIYTADNKGKDKKKTALEWRVKALADQLDKETLAYVIADLKGAIQGSSGYLGAISDRSKELVFDNLTVGQYLWRQIEQDPNYSTRNKVFYRQDYMDEFERIWVCQKRFHPELNDELKSEIRDVVIFYQRRLKSQKNLISFCEFETRDITVEEAGVQKVKKCGCRVAPRSSLIFQEFKIWSVLNNISVKSKTDGSTVEVTDEMKRRLFDYLSVNDKITVSDMLRLFELKPKGYDVNYKEIQGNLTLAELYRKFFEVVSASGNGEHDLAKLSYSGAYKILFEVYSALGFSTEILTFDASLPKKEYECQPLFKLWHLLYSYEGDNSKTGDASLIRRVAEICRMPEEYARIIASVKLLDDYASLSHKAMKKILPHLKDGCAYDEACARAGYNHSSSMTKEENEARVLKDRLEVLPKGALRNPVVEKILNQMVNVVNTLADEYGKPDEIHIEMARELKQNAKQREKATKDIADNTKRDEEIVKKLQEEFGLKYVSKKDILRYRLYEELKSLGYKTLYSGQYIPKDRLFSNSIDIEHIIPQALMFDDSYSNKTLEFSDVNRDKGKETAFDYVSRKYGPAELDAYKLRVHELYSHEVISARKRDRLLMRQSDIPSDFVNRDLTNSQYIARKSTEMLGEFVRDVMPTTGSITALLREQWQLVDVMKELNLPKYRQAGKTFTVTKSDGQSLEKISDDWTKRNDHRHHAMDALTIAFTRRSHIKVLNTLNALPGSEDYSLKEMVTTVLPNRKRIFTPPMPLGELRSAFKSALESTLVSIKAKNKVATRNVNKSKVKNGTIAVETLTPRGQLHKEQVYGRRKVYEPFEVTVGGKMDAAMIASVASRAEREALKRRLEAFGGDPKKAFTGKNSLEKNPLYVDELQSVAVPAKVKCVRMKEVYSIRKEIGPDISVDKVVDGRVRALLKARLDEYGGDPKKAFVNLEEKPIWMDESKGIKMKKVTIAENFDLCAIRDKRDKDGKLILDSAGNTIPSDYVNPRNNHHIAIYEDADGNYQELVVTLLEALQRKTAGLPVIDKTYHEDLGWKFVFSMKLNEMFVFPNPATGFDPSEMDLMDPANYAAISPNLFRVQTLSSGDYRFRHHLETSIESDKELKDVTWKRLKSLSSLKGIVKVRINHIGQIVAVGEY

SEQ ID NO: 223 - protein, 1359 aa, unidentified
  REGION 1..1359: note = Description of Unknown: Cas Enzyme sequence
MKKIVGLDLGIASVGWAFVMEDDNYVKSKIIDSGVRLVPLSSDEKKEFSSGKALSTNAGRTMKRGMRRNNFRYKMRRNRLINLLKEMNLITDDTPLAEEGKLSHYETIALRNKAAIERMEKHELARVLLAINKKRGYKSNRKAKNDEETKDGSQLSNDLAIAEELKSRHLTPGQLALERLKKGEGIPGFYRSDLANEFETIWKMQSAKYSELLDTSRKKDILNSSAKGIIALFEKVYGVTVAQVNGSKSEKEKFTYDERAKAAHQVIEQDKLAIVFRSLLTDLAASSGYLSRISDLSKQLHFNNWTVGQYLHHQINESPNNSLKNQIFQRRDYLNEFEKIWKVQEQHHPELTSKMKGIIRDEIIFYQRRLKSQKHLVGNCTLEPGNKTIPQSAPLFQLFRIWQNLSNLRLENKIGGEIIKPDFEQRKLLFEVLNTRPYLSKRDVFSILDQRASQWNINYEKLEGNRFQNHLVDLGLEICEANEIVINPKKTRGANLLNILIDNLKSLGVQLPFMTLENLDNIKNIELHPQYSLWHLLYSYEGDSTSSGEEKLINRLCKKYGLNTGQAKKLANIPLSDQYGNLSAKAIKNILPSLLEGMTYDEAASLAEYRHSLHETADERDARELKDALPLMEKNSLRNPVVEKILNQVVHVINAIIADPKMGRPDEIRIELGRDLKMNAKQRSEMESRIKENTKKHEEIKKVLRNEFGITRNVSRKDIIRYKLYKELEPNGYKTLYTNQYISKGMLFTNEVDVDHILPQSLFFDDSFSNKILTTRSENLDKSNTTAIDYVANFGEEAVGAYKQRLKNLFGDSDRMTTKQKRLLTPKEEIPTDFLNRDLGNTQYIAKAAMEMLKQVCRIVTPSTGKITARLRKDWGLIDVLKDLNWDKYEAVGMTSQKTTRNDRVIRIINDWSKRNDHRHHAMDAITVAFTRPAIVQLLNNLNARDNRDNPLWGIQKKHTYSDQGKLSFKVPVEHMRSIVKEQLSKLLVSRKAKNKVTTLSKNKIKVKGKKGFLVQVTQAPRGALHKETIYGGAKRYETRLEKVGAKFVEEKILLVAKKTYREALLQRLEEFNGDAKKAFTGKNSLLKNPIILTRQKENQVPEKVKLVELKTVYTTRKQIDRDFKEGHVKKVIDVGLRRILKNRLKKYDNDSKKAFGDLEKNPIWIDEKKGIALKRVTMEGPKTVLAIHEKKNHHGEMINGSQGETFPVDFVQEGNNHHTAIYRDGKGNLQAEIISFFKAVTRKKNEIPVVKKEHEEGWEFLYTLKQDEFFIFPPDEFKLTHKEICSGKFKNEIFPYLFYLVKQSQNDYLFRHHIEATVDDPKALRDILWKRIRSIKDLEGIIKVRLNHLGNIVQVGEY

SEQ ID NO: 224 - protein, 1501 aa, unidentified
  REGION 1..1501: note = Description of Unknown: Cas Enzyme sequence
MKTILGLDLGTNSIGWAKISIDDNGNYLRDIQLGSRIIPMSQDVLGKFDNGVTESQTAVRTGFRGLRRIRERSLLRRERLHRVLHVMGFLPPHYDSAIGWNKEEPSTYGKFLNHGEPKLAWERQGDGSMRFLFMDSFHKMMEDFAPHQPALVADGRKIPLDWTLYYLRKKALTQPIKKEELAWILLNFNQKRGYYQLRGEEEEENPTKREEYHELKVVSVEAAEEGKGGNTWYNVKLENGWIYHRPSKIDLSDWVGKTKQFIVTMEYEADGITLKKNKEGEVKRSFRVPDEDDWGLRKKRTESQLEASGKTVGAFIYDHLLAEPADKIRGNFIRTIERKYYKQELADILREQSKYHEELQSKKILADCAEELYRSNQPHRDSLLKKDMVYLLLTDLIFYQRPLKSKKSLIANCPYEYYEYVDKETGEIKRQGIKCVAKSNPYYQEFRLWQFVLNLRLYDRTEDKEVTAEYLPSKEDYARLFVYLNDRKEINQETLLKDFFKLKKVKQRSEKEFPVRWNYIEDKEKKYPCNETRHELLMALDRAGMERSWLDDTARQYRLWHLLYSIEVKDEAERALRKLKDDDEFVSAFLKVKPFKKDYGAYSEKAVKKLLAVMRMGSHWCEDDICKETKERIEHILQGDVEEKIKERMNHTAYSLGELSDFQGLPEWLACYVVYGRHSEATDIKHWKTPESLMAYINGFKQHSLRNPIVEQCILETLRTVHDIWKEAGHIDEIHVELGRSMKSTSDQRARMTENILRNENTNLRIKSLLMELKNDADIKDVRPYSPMQQEILRIYEEGALQELTKEDNDYEEIFKISKIPQPSAKELLKYKLWLEQKYRSPYTGKPISLSKLFTSAYQIEHIIPQSRYFDDSFNNKVICESEVNALKSNMLGYEFIKNHGGEIVHCTLLGDVKVQNESEYKAFVTEHYANNKYKKEKLLMEDIPQDFLNRHLNDSRYISKVVKTLLSNIVRTEDEMETTSKFVVSCTGGITDRLKKDWGLNDVWNSIVYSRFERLNELTKSDAFGRWENKEGKRVFQTSVPLELQRGFNKKRIDHRHHAMDALVIACASRNIINYLNNESANSPKKREDLRQQLCDKNRIIRKPWESFTQDARAALEDVVVSFKNYVRVINKTTNYYERYGADGEKTIAKQKNSEMWAVRKPMHEAKYYGRVNLQRKTEVRLKAALEDIPSICNKELRDYINRLVKSGLNARQLLAHFKSTDYCWNKQNVDKVEVWRFSDEKEPLVAIRESLDTSFDAKRIDTITDTGIQKILLNYLEAKGGDPAIAFTPEGIAEMNQNMALYNNGKMHQPILRVRLSKKRGKKYQVGQTGCKAKQFVISESGTNLYFAIYEDEDRNRTYNTIPLNEVAERLKQGLSPVPEKNEKEVPLKFYLSPNDLVYVPTEEEILMKECKLNKNRIYKFIDSSGTTANFVPHRSASLIYNVDKKLAEAFCNDEIIQNEYGVGSPQSKNQKALTGEMIKAVCWKLEVDRLGNIIRVIK

SEQ ID NO: 225 - protein, 1494 aa, unidentified
  REGION 1..1494: note = Description of Unknown: Cas Enzyme sequence
MKKIIGFDIGTNSIGWAIIYGDTNEEGKLQLKEIANAGSRIIPMDASILGDFDKGNSVSQTKKRTEYRGARRLRERCLLRRERLHRILNIMGFLPEHFAAQLTRYGKFTDNSEPKIAWWKDKEGKMQFLFRKSFNEMLNEFYAHNPQLIEEDKKIPYDWTLYYLRKKALTAPIQKEELAWILLNFNQKRGYYQLRGEDEEDTQNKIEEYQSLKIIRVEATDEKKDANTWYDVHLENGMVYRRTSKTFLDWEGKTKDFIITTLLDKNGQPKVDKDGQIRRSLRQPKEEDWGLLKKKTETSIDNSGKTVGSYIYDSLLCDTTQKIKGRLVRTIERKYYKSELKAILEKQKQFIPELNDKELYDQCIEELYPSNEAYRNNIAHRDFTYLLAEDILFYQRPLKSKKSLIADCQYETRAYKNPETGETKHIGIKCVSKSHPKYQEFRLWQFISNLRIYERNKIVDGKMKLDVDVTDSFLKDETDYEGLFEFLNNKKTIKQDSLLSSFFKLKKQNGKHLYRWNYVEDKEYPCNETRELIMSRLKKAGISASFLTSETEEALWHILYSVSDKQELRTALATFARKNTLDETTFTEHFIKTPPFRNEYGAYSLKAINKLLPLMRRGKYWSEDSIDTKTRERIERIIDGEADENIKNTVREKAINLNDIPHFKGLPLWLACYIVYNRHSEASDSERWERPEDIDEYLRKFRQHSLNNPIVEQVVTETLRTVRDIWKTEGHIDEIHIELGREMKSPAAKRAQMAQNMIENENTNIRIKYLLQEFASPDMDIEGVHPHSPSQQELLRIYEEGVLASEKDITPDIKELIGRLNEKSKQPSHSDVLRYRLWLDQKYRSPYTGLTIPLSRLFTTDYEIEHVIPQSRYFDNSLTNKVICESEVNKLKGNQLGYEFIMRHHGEKVPLSRGRTATILEPKEYEQLVKETYQANPQKLKKLMMDDIPDGFIDRQLNDSRYISKLVKGLMSKIVREKGEEEATSKNVIVCTGGITDRLKKDWGVNDVWNRIVLPRFERLNQMCGQQLYTTVNTSGHVIPAMPIEQQRGFSKKRIDHRHHAMDAIVIACATRSIVNYLNNESAKHDAKTTRHDLQRAVCHKQPTDTNGNYRWILNMPWDTFPADASNALKQIIVSFKQNLRVISKTTNKIQKVKNNRRVLEQQTKGVNWAIRKPMHKETVYGEVNLRLQKEVKLEEAITRPDDIIERDLKKKLKAMLKSGYDLKKIKAYFDDNAEIWTDINLNRIPIYYFTAETNDKYFATRRSIDQSFNRKKIINEITDTGIQNILLRHLENNSGNPDIAFSPEGIEEMNRNIRTLNNRKWHQPILKVRVYEKANKFPIGKSGNKSKKFVEAAKGTNLFFAVYEKEDGKRHYSSIPLKVVIDRMKAGLPVAKDDGIIPTFVLSPGDLVYVPKEGEKISSDTIDKNRIYKMVSCSDNRCFFIGNTIAKAIVNNKDLHEFNVLNKIEIALTGENIKEKCIPIKVDRLGQIVKLGY

SEQ ID NO: 226 - protein, 1459 aa, unidentified
  REGION 1..1459: note = Description of Unknown: Cas Enzyme sequence
MKKILGLDLGTNSIGWALIQQDYENKRGEILGMGSRIIPMGTDKQDYEKGVGITKNADRRTKRTIRKMNKRYKLRRNKLLYILHELGMLPEQFQFKNGIPPKDKIQELELLPIKKGTMQLDSFAHYQLRARAIDNIIELKDFGKILYQFNQLRGYAGGNNDEDSKKKKNEDDTDEEVTAKKYEVFTQKVIISKVEKSETIFKVRGGVNKGQELYKYNVTITFDEEELVGETELQNLEEKIGKEEEFEIRIKRNKKGETTSVIFALPQKTNWRKQMEATEETLKNEKLFVSQLFIKDLEKNKWTKIRNRVILRNRYQEEFDKIWETQGKQYPFLNNCPKETLKNISDYLFPGKSESQEKLRKEAFNGGLKYIVKNQVIYYQRPLKPQTELISKCQFEKEEQVLANSHPLFQEFRCWDQINKMYITSKEEVWNEKKKKNVYQYTDRFLTTDEKQEIYNKLQNQKQLGFSEVAKIVRLKNDKTEYLNGLNLKAKLKGCDTNITIKKILGTHFELLYSQDKDIVKKIWKAIFDNANSGSEYDPSSPKVSSISNVLKALNDDEAASALALKFAQNVKFPRKYASLSEKAIRNILPLMQLNPASVPEKIKQTFHLIQTGEVIDDFPVEQLEDYVISFVEQNPNAIETGGLMYAFASSLIYGKHTSETIKPQIKDYHEIQYVERNLRNPIVSQLTNETMQIVKTLWKQYKFNSEELEIRVELARDLKNSAAERDKIYKGQIKSQKINETIKKRLIELKHEPSQGNIELYKLWSKQNTEDYPFPKKATEPTQEEIQKLRLWEEQKCISPYTLKPIPLSKLFSSERLYDIDHIVPKSRYFDDSLSNKVVCETNINEEKGNRTAWEYISQQDSRLGICQEADYIKHINHIFYGKKKRNLLLEKIPVNPVERQIKDTQYISVAVKNELAKIVGSDNVKTSTGEVTSFLRSRWGLKKLFMELTEERFREMELWDINPETGKPNAEWTRKYFDKEKQKHIYEIRNWSKRYDNRHHAVDALVVALTEHKHIKRLNDLNKYLQDELTKRKDEFKLEIKEGENTIEAFFNLESTRREEIQKQIESSRHFEKPFEDLVKQAKNHLEAMTTSIKPKDKLCVSIDKFDSNTPHKKLKAQVKIRGALHQETNYGKTRDPKTGLLRDTKTIDLPNLKAKDIPQIIDEIIKKEINTHKKQYDSMKEAFTGEGLKAFNECRFQRKKPDELKPPVYKVKIWYSAKEDDESTLQRLYSNNEKLSVVTGDNYLFLVMETYGKKGKERVFDIASLYDSADIAKRSLKEKYDNFKYRICEDYRVKHEDKPERVIFTLQQGDLVYFPENENDEFLSFSNAELDEWLQNIDNKKKISHRIYKVVKFDKSKTAHFIPHNYANVISVPKDLTEEQREVLKNQYLDKKIPKKELNFVEYGSYRDCSPYEPGGTFVKSVTETDKRKKQKLKKIQDTCVKVTVDWTGNIKKALF

SEQ ID NO: 227 - protein, 1199 aa, unidentified
  REGION 1..1199: note = Description of Unknown: Cas Enzyme sequence
MKFILGLDPGIASIGWALILEAENDNEQSRIIDSNVVKVDFDNFAYMNAKGKISEGKPIDMFRKGLTVSPNLVRRQKRGAHRNLQHFKLRRADLIALLRENGFIDGDTLLCEDGKGTTYETLMLRSKAASEEISLSELARVLLMINKKRGYKSSRKGEADTDIEDMGAYLAAITGRSQLLVENHQTVGQYLMNQLNLHPLKGIKRQTFYRKDYEDEFEQIWKTQMAFHPELTRKLKKEIKNRIIFYQRPIESKKQDLSFCELESHQIEVEKNGKKQLVTTGSRVCPISSPLFQEFRMWQRLNDVVLTNTTTLEQYTLTLEQKEMLAAELSIRKELTKTAAIKLLVGKQTRNYDLNFDTLIGNETQARLVNAYLKILELTGHDKLDIKKMKAQDVLDAICKVFEGLGYKTEALNAEVVIGSEIYMQPHYKLWHLLYSFPGDNSRSGSAKLVQRVKDFFGIDNDEYAKVIADVNFPNGYRNLSAKAIQKILPFLKEGYQYSEACEKAGYNHSKRSITNEENEKRTLQHYLQPISHNSLRNPLVERILNQMVSVVNGLIDEYGEKYGQFSEIRIELARDLSKNAESRKRMTQDIENNKNERAKCRQELIDQLNERGYHVTYVSENDILKYRLYKELAPLGYKTLYSKSKVDLVDLIIHRKFDKEHIIPKAKSPSNAFSVLTIELSSINEEKGDMTALDYVKWKYGEAEAQQYIARVNDLFKQKAISKAKKENLLRTAADIQDEPLTRDLGLTQYINRKAYELLDTITRKVVPTTGSITCRLRDDWQLVDVLQELVWDKYDKLNLIDTYEDKDGKTVRKINEDAWTKRTDHRNHAMDAITVAFTKPAFIFYLNSLNSQGEARNQLLKMRHDYLHRDKQGNWRFNEPMPLGELRAEVKQQLEKINVYQKTATNAVTPNLNISKTKKKKEGNRQMQLTPRGKLHDDTYYGSIIENGVKVFTKRVDVNESLNVDDVVDKGVQRILQERLREYGNKPKEAFTNLEENPIWFNREKGICIKRVIVRTKLKDARAIHKKHNNKGELLLDKDGKTQSAEYVRTNNNHHVAIYEDAQHELHEVVVSFFDAVDSAIQGNPVIDKTYNADKGWRFLFSLQQNDCFVFPDEATGFNPADIDLTAKENYALISPHLFKVQSISEGDYRFRHQYDATKNNNAKLKNMTWKRIRAINDLKGAVKIRITKIGHIEYAE

SEQ ID NO: 228 - protein, 1195 aa, unidentified
  REGION 1..1195: note = Description of Unknown: Cas Enzyme sequence
MRKTLGLDLGTNSVGWAVLDDITGDILDKGVVVFPEGIDAANDTLETPAAVRRAARMARRMKFRRKLRKWTLLKVLIDNQMCPMTEQELKEWKKSGVFPVNNKAFVNWLKSTDTSNPYADRAAAASGKVAPHVLGRALYHIAQRRGFKSSRKDAQADGSEDKELGAVKGDIAALTKEIADAGCRTLGQYFAKHIESERSSLCKTRVRKRYTGRVEHYMTEFAVIMEAQGIAHDSKLYGKLYDAIFCQRPLRSQKHLVGSCPLEHGNPRAQIGHPAFEEFRMRAFVNNLSFRNTVTGERVPLTAADRELACSAFMTKESTIKFSAISKLFKKKLKSEPLDFNYYKNDDTISSCSTRFKIKNGFGDVPYDEQKVFDALTFFDNEELLKQWFRKHYPELPENSVGKLVKIHPKEGNAQYSLKAINKILPFLRKGHDLFTARLLAKMPDIIPQFSEHEEEIVLHIREMEMKCRASREAMRVESVRREEKPLRLMDLCRDYFLTEWDVDEKAWNKLYLHGDSPYEVDPRRPDRIPAVALGMIRNPLVQRSMTTLRRLVNYLRDHGKIDGDTTIRIELARGVNDYASRHALQLWQKDRAALREKARAELGDTTSEDMIDRYILWEEQGHICLYTGKQISCVQQLSGNSFDIEHTVPRSMSGDDSLANKTLCDAKYNREVKKGMVPTDCPNYESEIFARLAPWREKVEELEKTYRSRKNAAKGAADPQQRANARIKAIRTKIELDYWRDKLKRFEITSDKLIDPENGLSGFKRRQLVDTGIMSSHAVELLRSVYPNVYSVNGAATAFARKAWGIQGDEAKDRSEHTHHAKDAMVIAALTPSRFNAICTALKDDGRSSNMRPCDVCKQPFTGFAEAVRKAADEILVKHIQRRTTLRQSSKKVPIPQKKRAKDQQTGKWTKSYFAKGDTVRGHLHGDTYYGKIINPVSGALCTVERKAIEGEELKDVERIIPSIVDPAIREIVRKGVERLLADGATHVAPDSITMPSGVPIRKVRRIAPAKFNSPDAIKKHAYVSTKPHKHYLYAGSASDVNFRMAIYCIGGSYSYETESILNWAQGHKSSCYIPLDTKPGFVGYAYPGTMVLLCNGKQEEEKTLLKNQPKLLSRRLYYLRTLPTQKEKRCELQFHLEARDKKLIPSTDKGSKITCEAPQSILRLTANSEMLSRALFEGIHFKMMLDGTIVFLK

SEQ ID NO: 229 - protein, 1432 aa, unidentified
  REGION 1..1432: note = Description of Unknown: Cas Enzyme sequence
  MOD_RES 117..121: note = Any amino acid
MKKILGLDLGTSSIGWALVNEAETSEEKSSIIKLGVRVNPLTVDELQNFEKGKSITTNADRTAGRSMRRNLQRYKLRRENLIEVLKEYNFITDEMILSENGNRTTFETYRLRAKAAXXXXXVEEISLEQFARVLLMINKKRGYKSSRKAKGAENGTLIDGMEVAKKMYDEGITPGELCLQLLTAGKRYFPDFYRSDLQAEFDRIWNFQKQFYPDSLIDKVKDEVRGKNKSQTWAILAKYFVWKEVENSWNEEEAQTRRVEKEYRLVGIKRGVKREELKLENFQWRVKALSERMNPEELAIVLQEINEQISNSSGYLGAISDRSKELYFNRQTVGQYQMAVLDNNPNIGLRNMVFYRQDYLDEFNTIWEKQAEFHKELTEDLKKEIRDIVIFYQRRLKSQKGLINICEFERRQIEVEIDGKKKIKTIGSRVIPRSSPLFQEFKIWQTLNDIEVSVLGVKNKRKKQDDNSTTLLDSAENIDSLKLNVSRPLDADEKSLLAKELFIRDKLTKSDVLKLLFNNPQNLNLNFKNIDGNRTGSALYQAFSKILEISGHESINFKKSADEIVEQVKTIFSALGWNTEVLCFDSEKELDKQPYFKLWHLLYSFEGDSTPTGDGNLIQKIADLCGFEKDYASILANITFQEDYGSLSTKTIRKILPHLKDGNQYDVACEYAGYKHSKSSLKKEEIKNKVLKDKLELLPKNSLRNPVVEKILNQMVNVINAIITTYGKPDEIRIELARELKKNAKEREELTKSIVDTTKTHEGIRAILQNDFGMSHVSRNAIIRYKLYEELKDNGYKTLYSNTYIPKEKLFSKDFDIEHIIPQARLFDDSFSNKTLEVKSINIEKGSKTAYDFVEEKYGEQGLQEYLNRCEVLFRDKKTKLRKLKMQESEIPEGFIDRDLRNTQYIAKKALSMLNEICRRVVATTGAITDELREDWQLVDVMKELNWEKYKVLGLVEYFEDNDGRLIGRIKDWTKRNDHRHHAMDALTVAFTKDVFIQYFNNKNASLKPDTNEAAIRNKYFQNGKAIPPMSLDEFRAEAKKHLNDTLISIKTKNKVVTINLNRTKKKNGINKKQQQTPRGQLHLETVYGSHKQYVVKEEKVNASFDAAKIATVNKPAYRDALLRRLQENGNDSKKAFTGKNSLDKQPVWLDAKQNECVPEKVKTVMLETVYTVRKPIDEKLNVDKVVDARIRKLLQDRIKEYGNAKSAFANLDENPIWLNKEKGITIKRVSVFGISKAQSLHEKKDKDGNFILDKDSRRIPVDFVNTGNNHHVAIYRKPVLDKKGQAVFDENGELKFELEEVVVSFFDAVTRVNLSQPIIDKDYKRSEGWKFLFSMKQNEYFVFPNEKTGFDPKEIDLLNPENYALISPNLFRVQKIASKDYVFRHHLETVVADRKELQEITWKRISSLSILNRIIKVRVNHIGQIVMIGEY

SEQ ID NO: 230 - protein, 1436 aa, unidentified
  REGION 1..1436: note = Description of Unknown: Cas Enzyme sequence
MKRILGLDLGTNSIGWALVDEAENKDERSSIVKLGVRVNPLTVDELTNFEKGKSITTNTDRTLKRGMRRNLQRYKLRRETLMEVLKEYKLITEDTKLSENGNRTTFETYRLRAKAATEEISLEEFARVLLMINKKRGYKSSRKAKGAEEGMLIDGMDIARELYNNNLTPGELCLQLLDADKKFLPDFYRSDLQNELDGIWEKQKKYYPEILTDVLKEELRGKKRDAVWAICAKYFVWKEPYTEWNKEKGKTEQQEREHKLEGIYSKRKRDEAKRENLQWRVNGLKEKLSLEQLVVVLQEMNTQINNSSGYLGAISDRSKELYFNKQTVGQYQMEMLDKNPNVSLRNMVFYRQDYLDEFNTLWEKQAVYHKELTEELKKEIRDIIIFYQRRLKSQKGLIGFCEFESRQIEVEIDGKKKIKTVGNRVIPRSSPLFQEFKIWQILNNIEVTVVDKKSKRRKLKDNSPALFDELDDFEQMELSGRRYLYQEEKELLAQELFVRDKMTKSDVLKLLFDNPQELDLNFKTIDGNKTGYALFQAYSKMIEMSGHEPVDFKQSVEKVVEHVKAIFDLLNWNTDILGFNSNEELDNQSYYKLWHLLYSFEGDNTPTGNGRLVQKMTELYGFEKAYATILANVTFQDDYGSLSAKAIHKILPHLKDGNRYDVACAYAGYRHSESSLTKEEIANKVLKDRLMLLPKNSLRNPVVEKILNQMVNVINTIIDTYGKPDEIRVELARELKKNAKEREELTKSIAQTTKAHEEYKALLQNEFGLTNVSRTDILRYKLYKELESRGYKTLYSNTYISREKLFSKEFDIEHIIPQARLFDDSFSNKTLEARSVNIEKGNKTAYDFVKEKFGESGADNSLEYYLNNIEDLFKSGKISKTKCNKLKMTERDISGGFIQRDLRNTQYIAKKALSMLNEISRRVVTTSGSVTDKLREDWQLVDVMKELNWEKYKALGLVEYFEDRDGRQIGRIKDWTKRNDHRHHAMDALTVAFTKDVFIQYFNNKNASLNPNTNEYAIKNKYFLNGRAIAPMPLREFRAEAKKHLENTLISIKAKNKVITSNINKTKKRGGVNKKMQQTPRGQLHLETIYGSGKQYLTREEKVNASFDMRKIRTVSKSAYRDALLKRLHENDNDPKKAFAGKNSLDKQPIWIDKEQMRKVPEKVKIVTLEAIYTIRKEISPDLKVDKVMDAGVRKILTDRLNEYGNDAKKAFSNLDENPIWLNKEKGISIKRVTISGISNAQSLHVKKDKDGKSILDEKGRNIPVDFVNTGNNHHVAVYRRPVIDKKGQLVVDEAGNPKYELEEVVVSFFEAVTRANLSQPIIDKDYKTSEGWQFLFSMKQNEYFVFPNEKTGFNPKEIDLLDAENYGLISPNLFRVQKFSHKNYVFRHHLETTIKDTSSILRGTTWVDFRSSKGLDTIVKVRVNHIGQIVSVGEY

SEQ ID NO: 231 - protein, 1455 aa, unidentified
  REGION 1..1455: note = Description of Unknown: Cas Enzyme sequence
MARVLGLDLGTASIGYSLRDTDKGTNITEQLVRFGSIIFQKGVGNSKTGEFSYAAERTKHRASRRLYQARRYRIWETLATLIEFGFCPLSIEDLDRWRVYDKARNLKRRYPVDAANFEQWVRLDFDGDGKSDYSSPYQLREELAIVQLDFSQEINRFKLGRALYHIAQRRGFKSSKGETLKEQEDAVKDDIANEMSLESVSLKKSEEKKSKDLASYMEENALHTVGCAFAQLEREGVRVRASKYQAVRSQYKEEIKYIFEFQNGLDIDGDFFKRIYSDRKDGCIFYKRPLRSQKGLVGKCTLEPAKSRCPISHPEFEKFRAFAFINNIQYRRATEDEWLNLTAEQKLKLYNDKFLQAKPSFKFEVVRKWIEKEIGLLQDYHLSKEKRTINYSDRTNVTGCPISGRMKALLGEKWEEYKQQSDKIRKNRNGKEHVVSYMMEDIWHVCFSYDDEEAVSEFAKSLKFDDKQVKQFLNLWIAIPQGYAMLSLKAIRNINRFLVPKRNNPLYKGYIYTEAALLGKMPEILGEKQWADNEKSILGAINGWINQNREEKRILDIVNNLISAYKSLEYAEQFAYKNVEYQLDDSDKKDIEKYTIEAFGQKSWEKETQEMKDKVLKDVGRMYQQFFFTSKRDYFRLPKLGDTIKLYLSNNFPEFYCANGFVESQTGLQCRCAACKKLNKLYHPSMVEFYKPANEQEFEYGGVMLSKKLLANPVIGAFKNPMAMRTLHQLRNLINYFIKEGLVEEDTRIVVETARDLNDANMRWAIEEYQREREKENKAILEAIKELKGEEKNNDDIGKARLLIEQNPEYLFNKDRYEVESGDDTNNKKKKAMGKATDFLYKKDVAKYRLWLEQGMQCIYTGKIISVSELFDENKTDFEHTIPRSKSFDSSLANLTVCDAYYNRHIKKNCIPTELPNYEEIEHRLQPWKKKVEQLKNNVEFWRQKSKQAQTKDAKDKVIRQKHLWQMELDYWQNKLSRFTMTEVTSGFKHSQLNDTRLITKYAYHYLKSVFSKVEVQKGLVTADFRKMLGVQSADEKKDRDKHSHHAIDATILSLIPVAAKRDKILELFYKIQEEKKLYFNTEYWEKELQKEIRSCQIGNISSLPDYIEENILINHISKDQTLVPAKRKMRTRGKVIWQRDEDGHFCMDRDGCKMPKHWIKGDCIRGKLHGDSFYGAIKQSKKKGEKDYLTSYEDISYVIRRELKYKKTPTDKGFKDLDDLHMSIVDEGLFNIIKQQCDGKSFKEACDDGFYMLNRDGDKVNKIRHVRCYTSVKKPLAIKRQSYLSDKEYKQSYYAEVGDLYAMCKYCNADKTKVRYEVINLFDITENRRYGYSIAEVLEDDKKKEKYYLVAVLQAGKQVILYKNDDELESIIEMSNDKLSDRLYVISGFESPYRIILKKHICAKSDSELGKGESIKSFNELPDKIRQSVNAINYLLEDIDFYISPDGLITFKND

SEQ ID NO: 232 - protein, 1522 aa, unidentified
  REGION 1..1522: note = Description of Unknown: Cas Enzyme sequence
MKNILGLDLGTNSIGWSVIQGLVDESNRERLMKILGCGSRIIPMSAAILGDFDRGNSISQTAERTGYRGVRRLRERELLRRERLHRVLDILGFLPEHYAALLTRYGKFKSPEAGKIAWTTDESGNPKFLFEDSFLEMLHDFAVNQPALVSDGKKVPYDWTVYYLRKKALTQKISKEELAWLLLNFNQKRGYYQLRGEEEESETEEKKPKTRQYFDRQIIKSITDTGDVYRENKIFMVELANGEKGKIFKREKPDWEGQEKAILVTVDLDKEGNDRLESDGSVSRRYKIPTEAEWDTQWALIKMKTEQDLDNQSKTVGAYIYDTLLQRPNQKIRGKLVRTIERKYYKQELIQILKAQTSFHEELRDEQLYKRCIEELYGSNDSYRNSISGRDFVYLFVDNILFYQRPLKSKKSLIDDCPYESLTYKKDGEVKEVPLKCIAKSHPLFQEFRLWQFISNIRIYLKEGINPSSGRKELDIDVTSQFLPDTSSYERLFNWLNEKKEVDQNGFLKYPAFNLKKEVDKYRWNYVEDKKYPCNSTHAQLVAALQKAGVPSSFLDEKAKDGESMEEVLWNILYAIEDKQELEKAVSTFAQKHDLPDSFVTVFKHFPPYKKEYGSYSAKAIRKLLSVMRLGSRWSEEGIEPHVLDRINKLIDGEWDEQIDDRTREKAQHLKRVEDFSGLPVWLACYVVYGRHSEAKEIQYWKKPEDIDAYLKSFRQHSLRNPIVEQVVLETLRTVRDIWKQVGQIDEIHVELGREMKNPADKRRKETLRMLENENANLRIKALLTEFMNPEFEIENVRPYSPSQQDLLRIYEEGVFDSELDNIPDDIEDILKKFNQADITKRPTHGEVMRYKLWLEQKYCSPYTNKPIPLGKLFTSAYEIEHVIPQSRYFDNSLNNKVICESEVNKLKDNSLGYEFIKNHHGEIVTLTGGQTVRILSVKEYEQFVDDHYSKNRIKKRNLLLEDIPEDFISRQLNDSRYISKLIKGLLSNIVREENEPEAVSKNLISCTGGITDRLKKDWGINDVWNDLILPRFQRMNELEGSKRFTTFNKNGKEIPAMPLELQKGFSKKRIDHRHHAMDAIVIACANRNIVNYLNNASASKNAKTTRYDLQHLLCSKCKNEEDGGYQWLINKPWENFTVDVLHALSEIVVSFKQNLRVINKTSNRYQHINEEGKKVMELQTKGDSWAIRKPMHKETVFGEVNLQMKKTENLKKAIEHPERIVNKALRKEIKAMLTLKYSFNRIKEHFDTYKDKWKDTDLTKVEVYIYSKETKDRYFATRKVIDVSFDESKIKGSVTDTGIQKIMLRHLEANQNNPKLAFSPDGIEEMNRNIVALNGGKPHQPIYRVRYYEMSDSKFSVGETGNKTHKYVEAAKGTNLFFAIYETEVIDKKTGAKSMKRSYDTIPLNVVVERQKQGLPSAPCNEEGIEPKYVLSPNDLVYLPTAEEVETGNILFPIDKNRIYRVVSFGAVACFCVKSEVASLIKDKVEYTSQNKMERAITGEMIKDTCIPIIVDRLGNIRLKK

SEQ ID NO: 233 - protein, 1485 aa, unidentified
  REGION 1..1485: note = Description of Unknown: Cas Enzyme sequence
MKRILGLDLGTNSIGWALIENDFDTKQGKILGLGSRIIPMSQDVLGNFDVGNSVSQTAERTGFRGTRRLRERNLLRRERLHRVLNVLGFLPEHYANQTDFEKRLGKFLDEKEPKIAWKEVWNEQKNESEFVFIFQDSFNEMVNDFNANGLEIRIPYDWTIYYLRKKALQRKIEKEELAWIILNFNQKRGYYQLRGEEEEENPNKLVEFHSLKIVDVVADEKPNSKGDIWYSLHLENGWIYRRSSKTPLFDWKDKVRDFIVTTDLNDDGTVKTDKEGNEKRSFRAPSEDDWTLIKKKTEADIDKSQKTVGTYIYEELLKNPTQKIRGKLVQTIERKFYKEELIAILKKQIELQPELFTEDLYNDCVRELYRNNEAHQTTLSKRNCFVHLLVNDIIFYQRPLRSQKSSIGNCTLEYRKHKDKDGNEVTEYLKAIPKSNPLYQEFRLWQWFFNLKIYKKDDDTDVTEQLITNVTDKENLFDFLNNRKEIDQKALLKYFKLTEKTHRWNYVEDKKYPCNETKTMISTRIEKVENVSADFLTSEIEQKLWHIIYSVTDKNEFEKALKTFANKYNLDVVSFVENFKKFPPFKSEYGSFSEKAIKKLLPLMRLGKYWNWEIIDAKTQDRIEKIITGEYDAEIKNRVREKAINLTSENDFQGLQLWLAQYIVYDRHSEASITGKWKTVADLEKYLEEFKQHSLRNPIVEQVITETLRVVRDIWKKHGNFSEIHIELGREMKNTADERKRLTNIVTENENTNLRIKALIMELKESTDVENVRPYSPIQQEILKIYEEGVINSNIEIPEDILKISKTAQPSKSELQRYKLWLEQKYRSPYTGQMIPLGKLFSEEYQIEHIIPKARYFDDSLSNKVICEAAINQLKDKCLGFEFIKKFHGQIVDLGFGKSVKIFEETAYQDFVKEHYSKNRAKRNRLLLEDIPEKMIERQMNDTRYISKFISQLLSNIVRADKDDDGVNSKNVLPGNGKITTTLKQDWGLNDVWNDLILPRFERMNTLTNSNVFTAWNEQYQKFLPTVPLELSKGFQKKRIDHRHHAMDALVIACATHDHINLLNNQSAKSETSRYDLQNKLRNKEKNETIGKDIFKEFKKPWNNFIVDARNELEKIVISFKQNLRVINKTTNKYQAYENGKKVLKSQAKGDSWAIRKPLHKDTIFAKVSLRKIKKIRLSEALKDWKMIVDKELKQEIKRLITMYGNEFKIDVINKYFKDQKYLFNEVDISKVEIYYFETENAAVRKSLDISFTEKKINESITDSGIQKILINHLWTKENNPELAFSPEGIEEMNKNIIQLNDGRFHQPIYKVRVYETIGNKFQVGTTGNKKSKYVEAAKGTNLFFAIYADENGNRTYETIPLNIVIERLKQGLNAVPEKNEKEYNLLFHLSPNDLVYVPTEEERENIRVIDWENLDKEQLKRIYKVVSCTGSECHFVPQEVANSIVNKVEFSPLNKIGRSLTGEMIKDVCVKLKITRLGKMEKCL

SEQ ID NO: 234 - protein, 1361 aa, unidentified
  REGION 1..1361: note = Description of Unknown: Cas Enzyme sequence
MKKILGLDLGTTSIGWALINEAENNNETSEIIKLGVRVIPMSVDEKNDFEKGNPITTNANRTLKRSARRNLQRFKIRRENLIDILIKNQFIGNINELVEKGNHSTFETYRLRAKAAKEKIELNQLARVLMMINKKRGYKSSRKTKNEEDGVAVEGMSIAKKIYEENITPGQIIYQILQEGKKYKPEFYRSDLKNEFDLIWNKNKEFYPDFFTDDLYQALEGKSKTASSKTILAIKEIYLADIKGKRNEVNLEKAKLRSEAPTLQLSINELALVICEINGEIANSSGYLGAISDRSKQLIFNNKTVGEYLYEQIENDCHTSLKNQVFYRQDYLDEFERIWETQKQYHPVLTNELKTEIRDVIIFYQRRLKSQKGLISFCEFENWETIINGKKKTIGQRVIPKSSPLFQEFKIWQILNNIKLQNLKTKEINVLSIEDKEFLFEELNIKEKLKDAEILKLLKLKAKDWKLNYSSIEGNKTNYILYQAYLKMLEWEGWDINTKKESAIDIKDAIKSFFKTFNINEKILDFNSNLEGNDFDKQDSYQLWHLLYSAEDDTILKKNLLKYGFDEKQANLLANITLQTGDYGNLSAKAIRKILPHLKEGNEYSVACLHAGYNHSNSETKEDLKNKVYKNRLEILKKNSLRNPVVEKILNQMVNVVNAIIDDESLGKPDEIRIELARELKKNAKQRKEAETGIRKATAYNEKLKAIIQNECGIKNPSRNDIVRYKLWEELKDNGYKTIYTNTYIPKEEIFSNKFDIEHIIPQSRLFDDSFSNKTLSVREVNIEKGNKTAFDYLEEKLSEDEFFQYKERVKRIFYKDKRAKYNKLLMTGKEIPDGFIERDLKNSQYIAKKARQMLLEVFPTVVSTSGSITARLRNDWGLINVMKELNWEKYNQLGLTEIVKNKDGKSIKKIKNWTKRNDHRHHAMDALTVAFTKHSYIQYLNNLNARTDESKPKLTKEIYGIQKKELKRDDRNKLKFKIPIENFRQEANKHLEQILVSHKAKNKVVTNNINKIKVKDNFIKKPQLTPRGQLHKETVYGKMQQYETKEVKVNASFDEEMIAKVAKKKYREALLKRLNENNNEPKKAFAGKNSLSKNPIYLDENKEQKLPEKVKIVWLKDNFTIRKEIGPDLKVEKVIDPKIRAILQKRINKYGDAKKAFSNLKDDPIWLNEEKGIQIKRVTIKGVENAIALHNKKDHFGNTILDENNKEQATDFVSLGNNHHVAIYRDEKGNLQEEVVSFFTAVERVNQGLPIINKNHALGWEFLFTMKQNEYFVFPSENFDPNEFDLLDPKNAALISPHLFRVQKIATKNYMFRHHLETTVNIDKELKEISFIHIQSFNRLNHISKVRINHLGQIVHVGEY

SEQ ID NO: 235 - protein, 1207 aa, unidentified
  REGION 1..1207: note = Description of Unknown: Cas Enzyme sequence
MRSYSILKAGVNASGKERKLKTLGIDLGTNSLGWAILDEKSIQKAGVLVFEEGVNREQSDSLETPAATRRAKRMARRLRFRRHLRRRLILKILIEQKMCPLRLAELKTWAQTGLFPKENRVFVEWLKSTELRNPYFDRARAASEKVDPLTLGRAIYHLSQRRGFKSGRKDQVEVGEETSAAKAKELGQIKGDIVRITASLEKSNLTQGQYFYNEIKAGRKVRKQHTGRVEHYEKEWSKIASVQKLDQQLSVKIARALFWHRPLREQSHLVGKCPLEPKRHRAQIGHPEFEKFRVLSFVNNIRWIDGDVKRSLTCEQRTVATACFVRKSTFEFKTIRVALEKQFKELKGAPFNYEDSTTLSPSIVTAGLEELLPTGADLQKAFDALTFFDDNEKLKSWAEKQFGLSSEKAGQFVKIRVAEGRAGYSLHALRKINRFLSKGVELSEAIFLARLPDVIPGFDEKERDIIAKVHEHNELYRENKRTAYRDPRSENRIGVLSLEKRLRSWLEDNYGIDGKGFDELYFRDPKADSSYADVRPGGEVLPPVNLGMIRNPLVQRSMTMLRRLVNELRKKGEIDADTRIHIELARDVNSRNDRMAIQEWQKQKEKNRADARAKLLEHGIVNPAEDLILKVILAEEQGWVCPYTGANISLSGGGSLFAGFDIEHTLPRSRSGDDSQANLALCDIHFNRNVKKDLMPSELSKYDEIVTRLRPWCEKIEELKKLKQKQTKIAKSIPKDNPEARSRARQKMLVTKMELKYWEDKYYRFTRKPDEVTPSFISRQLVDTGVMTRHAVALLRSVYPDVYPVNGQAVAFARKLWKVQGEDEKKDRTEHTHHAKDAIVIAALSRDRFQRICAELKADDEKKNPKFKVEMPFPSFSQSVHDVTSAILIKHVTRHNEIKQTHRRFVRLSSPKKTKAGRITCVAARGSTIRGQLHNETFYGKIVKPGEKDIVCVIRKELNSGNFPQASALEKIIDPAVRKSVQDEITRRGGDFKKAIDAAVEEGTFKLPGERGALIKKVRIEANVANPKELRRHDEVQPKQSYKASVWVQSSGGSNFRLAVYERKADGEGGVETLFVTENLLDFAQGKINKPADGRLIGHILRGAMAIAYQFDGEWKEESFNLGQRFYEVVKFAQGRITLRGHREARKMTDLQSELSEVGKNKQGQSSIDFTNPHELLLISEKKAWSSFLFEGIHFVMGLDGEITFKK

SEQ ID NO: 236 - protein, 1523 aa, unidentified
  REGION 1..1523: note = Description of Unknown: Cas Enzyme sequence
MKKILGLDLGTNSIGWAVVNADEITRENETTYLKPTGISAAGSRIIPMDAGILGDFDKGNSVSQTKERTGFRGTRRLRERNLLRRERMLRVLKIIGFLPKHFADQIDVYGKFNNDKEPKLAWHANQEGKFEFIFQNAFNEMLADFSENQPQLVADGKKVPYDWTIYYLRKKALNQRIEKEELAWILLQFNQKRGYYQLRGEEEEEDNTKLVEYLAQKVIRVEATTEKKGDDVWYNVYLENGMVYRRTSRMPLDWEGKVKEFIVTTELEKDGTPKKDKEGNIKRSFRAPKEDDWTLQKKKTEFDIEKSQKTIGAYIYDSLLQKPDQKILGKLVRTVERKFYKDELRQILEKQKSLIPELQDDKLYKECLLSLYPNNEAHRNNMTNSDFTHLFINDILFYQRPLKSKKSLISDCPYESHYDHDGNEHPIKCIAKSNPLFQEFRLWQFVKNLRIYEREKEVAGKLQTDVDVTSELLKSDDNYVKLFEWLNDRASIKQDTLLNSYFGIKKGKKEDQFPMRWNYVEEKDYPCNETRSTILSGLAKCDIKTDFLTPEKEMQLWHILYSVEDKIEIGKALKKFADKNNLPEIFVDVFAKIKPFKKEYGSYSEKAIKKLLPLMRIGKYWNESSIDSKTRDRIEKIINGEYDESIKNRVREKAINLNDIKQFKGLPVWLACYIVYDRHSEAKEIEKWEKPEDIDTYLKSFKQHSLRNPIVEQVITETLRTVRDIWKQEGQIDEIHVELGREMKNPADKRKRMTERILENENTNLRIKAMLMEFMNDTSIENVRPYSPSQQDILRIYEENALDNLSKTDKEFDFISKISKTAQPSKSDIIKYKCWLEQKYRSPYTGKPISLTKLFTSAYEIEHVIPQSLYFDDSLSNKVICETEVNKLKSNMLGYAFIKEHSGEKVQLSQNEVVEILSVKNYEDFVKEHYSKNQTKMKKLLMEEIPDGFIERQLNDSRYISKVVKSLLSNIVREKNANGEYEPEAISKNLISCNGSITDRLKKDWGMNDVWNSIILPRFERMNKLTEKDCFTAINAEGHLIPQMPLDLQKGFNKKRIDHRHHAMDAIVIACTTRDHVNLLNNEAAKSGNSANRYQLQHKLRRFEKVIINGKEREVAKEFLMPWKIFTIDAKTALENIIVSFKQNLRIINRTTNSYQHFDCEGKKVIVKQTQGDSWAIRKSMHKDTVFGEVNLRFIKQISLNEAIKVPSRIVNKDFKKKVLELLKGKRDAKFIKKYIEENKDVWSDIDIKKIDVYYYTKETNDRYFATRKPIDSSFNKKKIEESITDTGIQKILLAHLTSKGNNPDIAFSPDGIDEMNHNITALNDGKYHQPIFKVRVYEKADKFPVGQKGNKNHKFVEAAKGTNLFFAVFVNEKENKETGEKECARSYLTIPLNIMIDCQKKFGSQWKNNIETYLKENKLVADEVKLLFILSPNDLVYLPTNEELKEGVKIVDKKRIYKMVSCTGNEGHFIPEVVANPIMQTIELGSNNKAQRSWSGEMIKEICLPLKVDRLGNIIELNGKKL

SEQ ID NO: 237 - protein, 1063 aa, unidentified
  REGION 1..1063: note = Description of Unknown: Cas Enzyme sequence
MATYISVNRQDKLTTGESVSGNISGLAPQKYILGIDLGTSSVGWAVIKADENDNPAGILDLGVRIFRAGKEGDLERGQDESRNKKRREARLARRQIKRRRRRKMKLFLDLQKSGLLPAGDKDEVICAIDQEILKEYKEKYGKDANYKHLYILRAKALDESLPPYWFGRAIYHLGQRRGFLSNRKAQPKASDSDERSKVKKGISELHNEIQSSGSRTLGEYFSTLNPHEARIRQRWTARKMYEEEFELIWDMQSKFHPELLSREIKEIIRKDLFYQRPLKNQKFLVGYCELEPNKKRARKALLVAQEFRLIQIVNNMKLVSKETGEILKLDEDQRCKVIEFLRTKKEASSSDILKSIGLKATKYKLNLDKKESKKKFYGNTTLAQLASVFGDKIHELSEEEKEQIVQDLISIQKEEVLLKRGIQKWGLTQEQAERFAEIQLEEGYLNVSVKAITKIMPLLEQGLTYAEAKAKIYPNSDQEFPMFDLLPALNSRKLPVSLKYINNPLVMRSLSELRKVVNAIIRKYGKPYIIRLELANELKKAKKEKEAIYKTNEEKAKKKKNARNLIASRLGIDSNIVTENDIEKYLLADECNWICPYTGKSISMDALFNSQFDVEHIIPYSLSFDNSFLNKTLCYHEENRNVKRNKTPYEAYSHTEKWEEILQRVKAFKTNADEKLRKFTMKPDEIEESSNEFLARQLNDTRYASQLARKYLGLLYGGYIDQNSKVRVQVNAGQVTALVRNAYGFNALLGGASKKTREDHRHHSVDALAIALISPGLIQDLRKQIKENERLNRKWNDVVLTPPKWLSIDFIRPKIEDVNVSVRISRKVRGPLHQETNYSPLLHDGYHHMRKNINDLSEKELERIVDPVVQNIVKKAASDAGGKPKKIKEVYMTSERKALRTPIKKVRVRNLSSGDVVQIGHGKKKRYVALDLIHHVEIFKAKDSSRSPVYISRKVKLYEAYQRKSDKNPIVCKEPPEDGYEYVFSLATGEIIKWQNKLWRLQTFRSSDKSSNRIQTKLAQVSDARKDEAIPLSGRQPFLNDKFLSTITKVSIDPLGNCRISND

SEQ ID NO: 238 - protein, 1075 aa, unidentified
  REGION 1..1075: note = Description of Unknown: Cas Enzyme sequence
MKLSLGLDIGTTSIGFALVDTENGKIIESNSVIFHRKETTNSANKTLTRRLARSSRRLIQRRAQRKKNLRKLLYRYSLIKKDFVNNTKEYIQNNPIENLFYLRSEALKRILSNYELASILYSFGNKRGYSDRYVLDEEDKGTIANAIADNKSKLKNYKTFGEMMWDLHPEKCRNSQGDYSHLATMKDIKSEIKLILQTQRELGNEKITDDFIDEILSEDTYRDGSVSIFYQRPLKEISGQIGLCSYQHHKGYKRASKATYTFLDYIFLEKLHNTPVLYKNEECSLFSVIEDYETALQKFIKNDGNFNTPFIKSLFDKKTLKSLVVKLDKNNASENKILGKDGCSLFKVIEHFNKALSVDTIDDIATILTIYQDSEQKKEQLRKNFSSLLGDAEIDELALLDFKGFGKLSIETMQSMMPLMKNGSTPYDAKKECGFTLITNTQKIDFLPPLNCTQEYISEVLSKKVPSLDIENFIPFYDALGNPVVSRVISVLRKIINQIIVDYGIPDQIVVELARDYNSKKEEKEISKAENANKKYNEQLEKEIQSFGYISNGKNIEKYRYWKEQNEYCLYSGKHINLQDLFTNAVEIEHVLPRSKVFVNAKKNKIVVFKKENQDKGNLYHYEYLKRNGKWDIFVKTVKGIVREKKIKENKAKWLLTENFDHIAKDSYLNDTKYATRLIAKYLGYYLYPSSDIHNTGGKRSVFTLNGKATSFMRKHWGLQKKDEKKDRGNHYHHAVDAIVLAFVTPKIINNISSFFKLKEQGKKVTFQMPYNNFRKDIVDLVEKYEKNKKFVHHHQVIKKNVIAYDNPISTISVDGKEFIKKRENIKEFIEKIQKKMNDKKHSPDEIIDKEVAKIIDNSTDRFIAKNIKTKITEILAMEDEVEKIKSDKINAKNDQDKIETLDAKLQALQDKINAPFVIYRGKKNTPQIVKSFLVLGKGAGIYNHVSNKRDTTVQKRKNKDAIGMELWEKDNKKYCVPLYLHNLWNSSEKFSHSKTKIDNSFKRIAVLYPKTVLMIRRDDKVDYILYVGVSSGPAERFEYKEINKPKKERLSCSVGTLDHISVKKIDIYGNILDN

SEQ ID NO: 239 - protein, 1050 aa, unidentified
  REGION 1..1050: note = Description of Unknown: Cas Enzyme sequence
MKNYRLGIDLGATSLGWSLFELDNNNEPVKLMRVGVRIFPDGRKAAGKWSKKEPLNVTRRTARGIRRNRDRYLQRRNDLMKYLIENNLMPKDISERKELEHLDPYYLRAKGLDEQLTLFEFGRAIFHLNQRRGFKSNRKFDSADKETSIMKMAIKELAEKLEETDSRTLGEYLYNLNKDLPKKEIVHSKPRRVKKGDKSYNLFPDRAMYLDEFEQLWEKQHEFHSELTNEIKTNIKNIIFYQRDLKPQEKGSCQFEEGEFRCSFAYVTAQKFRIFQELNNLELLDFNKKNHKLTDEQRAIILHTLLTQKTATFKSLRRKLGKDFANNFTFNLESEKRKDLKGDETSAIMRKDNYFGDKWDELADTEKDEIVTKILNEENDKEVETNLVNWLCDKYSLSEENAQNIANASLSKKISNLSGKAIRKLLPFLQDGFIYSDACEKAGYKLTDEAPEKPKFYKGNLPYYGELFEKDALFGDKEKYNSENEPEKYYGKIPNVTVHIALNQLRKFINELSKTYGAPKQIVLELARELKLGRSKVAEIEKIQAKNRKYNEKIAVELEKISVENNYANRTKYKLWEELADDPTKRCCPFSGIQIPIHKLFTHEFQIEHILPKSKTFNDRMVNKTIAHRKANQDKGERSPFEAFGHNPTGYNYNEILLRAEQLPFAKRRRFFPDAMKNYEDEGEVLSRMLTDTQYMSRIARKYMAFVCGKNNVWSIPGQLTAKLRSKWGLNELLSEDSSKNRADHRHHAVDAFVVACTSRSTMQKVARAIGNSRDKFIDKMPPPFKQFKHKEMKQLLDDMVISFKPDHGNAKKAITEHKTVGQLHKETAYGLVSKDEEKGKIILSVRKELVSLESIKKIKEITDPRIRATLLQLTEGKTGKEITGIISEFSKETGIKRVKTQIEKSLNSVVRIEDNKGNYKYYELRNNYCADIYCPDKGKKAGKWQIEIIPMFYAHQTNFIPDWQKANPTAKKIMRLYINDTVAYEENGETVIRRVKKMNIDGRLFFIDHKIAKSDKDPNATSVKQLQEKDGRKVGVDILGRVSDPKRAK

SEQ ID NO: 240 - protein, 1047 aa, unidentified
  REGION 1..1047: note = Description of Unknown: Cas Enzyme sequence
MNYILGIDVGATSLGWCVLQLDKKEKPIKIKRMGVRIFSDGRDSKSQEPLAVTRRNARSARKRRDRLLRRKKRLMKVFIENGLWSSSEAERKNLEKTTDPYEIRCKALDQEVTLAELGRALFHINQRRGFKSNRKTDKKEKDTSALKMAIKDLHERLEKGNYRTIGEYLYKLNPSGIHPSKRHPLRIRVTAEGNKAVYNFYANRKLYEKEVDFLLKKQQAFHPELTDLLCDKIKNIIFYQRPLKPQAVGKCRFEAGEPRAPIASPLYQKFRFLQELNILAPDDLANGDSLTPAQRKLIREIMSKQKTVKFEDIRKELKMSATFNLEDERRKELNGDEVSAILSKRALFGPIWHEINDDQKEEIVNVLLSERNEQDIAEFLLSKFDLSAEQLNKIIDTELPEGYGSLSIKALRKIVPYLEQGEIYSKACELAGYHHSKITGAKTWDYLPYYGVILEKEVIGGSLSLDDDPDKMHKPEIADYERFWGKINNPTVHIGLNQIRLLVNELIRTYGKPKRIAVEFARELKLSRKQKEALNKEQKENKNRNAIINEMLRNAGIKENYENRMIVKIWQDQARENPLERVCPFCGKLISFEKLFTGEFEVEHLLPFSRSYNDGHNNKVISCSSCNRIKTNKTPYEAFGADPRKWNEILERIKYLPIRKQRCFKEDALQGEKEIIERLLNDTKYLAKAAKKYLAAICPPEKISAIPGQLTAQLREAWGLNTLLPDSHKKDRTDHRHHSIDAFVVACTSRAMLQAISAASARGWLERRRLFADSPPPFEDFTRTDMQDCIDKMIISHKPDHGNALRSISENKTIAALHEDTSYGFVKDCDNEGAAIFAIRKPLISLTEDKNIREIASNKIRAMVTNALNGITVKKEREQKLRELAQKYNIRNVRLHIQKNKGTMAPIKDRRTGKIYRYVALGGNYCAEIYQPNRGKYKNKWQVEVISYYHAHQKEFVPKWRKAEPEAKLIMRLFKDDLVAWDNGAARVIMRVKKFNQDGRLFFEPHSVAKSDKDAKATSAKQLQERNARKIKVDILGRVFDPLCSRG

SEQ ID NO: 241 - protein, 1073 aa, unidentified
  REGION 1..1073: note = Description of Unknown: Cas Enzyme sequence
MNAPYRLGLDVGTNSLGWCALRLDPVGEPVGILDLGARIFADGRDPQKGTSLAVDRRLARQARRRRDRFVRRRDDLMDALVRHGLMPADAVARKALEALDPYALRARGLDEELPPHAFGRALFHLHQRRGFRSIRQAADRGKDKEAGKISAAIEKLTADMAASGARTLGEHMHRLREAGDPVRARLRGEGAKAAYDLYPQRAMVEAEFDLLWARQAAAKPAALTPEAGAAIRAVMFRQRPLKPVEPGRCRYLPEEPRAPWALPAAQTFRILQDVGNLRIELPDRSFRRLTREEAARLHAELERRADLTFERIRRLLGLGSDARFNFEEGGRDRLPGHRTNHVLAGKALFGARWWTLTKEQRTGVVELLLSEPDDERLIETLRTDWGLSEEAARRVADAPIPEGHARLGRTALAILGRIMRDEPDPENPSHPIRYDQAVARAGRHHSDDRTGEILDALPYYGPVLEPHLIGGSGIPDDPDEARYGRIPNPTVHIGLNQLRRLVNAAIAAYGPPQQIVVELARELKQSREQKDRIAADQAERRKENERRRAMLVELGLPDNGDTLLRLRLWEELAPEPHARRCVYTGEPISIRMLFDGSLVAIDHILPFRASFDDGAANKIVCLARANVRKGKRSPFEAFGHTAEWEDILRRAETLPRNKRWRFAPDAMDRLRLAGAGGAGSGGPVLPADAAADLEEGTGFLARHLTDTQYLARLTREYLGHVCDPSQVYAIPGRLTEMLRRRWGLNKLLSDSDSKNRTDHRHHAIDACVIALTRRSLLQQVAAAAEHDRERMLDDLPEPWDGFRDELRDKVRAAVVSLRPDHGAGGKLHEETAYGLVADPDAEGGNNIVYRKPFAGLNENEIARIRDRRLRTLVQEHVAAATTAAGGGKLPPAALKQALAAFAAVAPEEYRGLARVRLLKTEEAPIPIRDRASGRVYKAVSPGANHHIAIFEQPDGGAWVPELVTMFDANRPKPPPRRRAHPAARLVMRLHKGDLIKVEPKSGEEERIMRVVRLGASKLYLAAHHETGDLQRRHDDPDDPFRWCFVGLGQLKARRARKVSVDMLGRVRDPGPPA

SEQ ID NO: 242 - protein, 1145 aa, unidentified
  REGION 1..1145: note = Description of Unknown: Cas Enzyme sequence
MGTENSRSYRLGLDLGSNSLGWFVTYLEKRSDRYEPVALGPGGVRIFPDGRDPQSKMSNAVDRRMARGARKRRDRFIERRKELIAALAKYDLFPSDAHKLKALETLDPYALRKTALTDALPGHHVGRALFHLNQRRGFQSNRKTDSKQNEDGAIKQAATKLQAEMAEENAATLGSFLADRHLSDMYLDRQSAIRVELVRLGKDHLTGNARKKAWAKIRKRLFGDEILPPRDAPDGVRARATMIGTKASYDFYPTRAMLLDEFNAIWATQRAHHPAMTDDAKKEIEHIIFYQRPLKPAIVGKCTLDPATRPFKEDPEGYRAPWSHPLAQRFRILSEARNLEIRETGKGSRKLTKEQSDLVVAALLANKEVKFDKLRTLLKLPPEAKFNLESDRRAALDGDQTAARLSDKKGFGKAWRGFPLQRQIAIVAKLEETEDENELIVWLERECALDGAAAARVANTTLPDGHCRLGLRAIGKIVPIMQGDLDDDGVSGAGYHIAAERAGYDHAKLPTGEQLDRLPYYGRWLADAVVGTGDARDGKEKQYGQFPNPTVHIGLGQLRRLVNELIDSHGPPTEIAIEFTRALKLSEQEKADKQREQRHNQDKNTARTAELGKFGFSANPRNLLKMRLWEELATDPLDRKCVYTGEQISIERLLSEEVDIDHILPVAMTLDDSAANKIICMRYANRHKRKMTPVEAFGSSPTLQGHRYNWDDIAARAASLPRNKRWRFDANAREEFDKRGGFLARQLNETGWLARLAKQYLGAIADPNRIWVVPGRLTAMLRGKWGLNALLPDHNYAGVQDKAEEFIASTDDMEFSGIKNRADHRHHAIDGLVVALTDRSLLWKMANAYDEEREKFVINPPWATMRDDLKAALEKMVVSHKPDHGIEGKLHEDTAYGVLKEPEKIDDQDKDGANLVYRKAIESLNNNEIDRIRDRRLRAIVRDHVDTEKKKGVVLADALRQLTEPGDHPQIKHGLRHVRILKKEKPEYLVPIANRKTSQSYKAYSAGENFCVEVFETTSGKWDGEAVRRFDANKQNAGAKVPHAPQWRGAHPDAKLMMRIHKGDLIRLNHDGRIRIMVVHRLDAAAGRFKLADHNETGNLDKRHATNNDIDPFRWLMTSYNTLKKLEAAPVRVNELGQVWRIAPG

SEQ ID NO: 243 - protein, 1058 aa, unidentified
  REGION 1..1058: note = Description of Unknown: Cas Enzyme sequence
MSTVLGLDIGSNSVGWALVDIENQSITAMGVRIFPDAVENKNSEREESKNVARRMKRQLRKQYDRRRRRAKVVRSIMVKNALLPLTEEELDRLNTSDPYELRSRSLTEKLELYEIGKIIDHINSRRGFQSNRKSSSEEETSGVIIDGTKDGLKPGIMAIDESLNPKLRKYKDYLAEKASIVKKLPDVKHGYRTMGEYLYSLDPHTVRRRNRFTLRDHYRIELDLILALQARYYPKVLTPELQEQILGSVFHQRPLKSVRHLVGKCRFEPGKKRVHKSHPEYQRFRFLQQVNALRVNTTDRVSGDDTDLLPEEIYNLKLIAEAAAAKGRDRKLKLETQGDIKKALGWKSKIPATASVTSVDLERTIADMRNALGRTYIDGLPREQVHELWNVLQYAEDLDWVIDWAQKKLGVDETKARAFAAIKLEDGYGSVSLRAVRKILPFLEEGDLYNEAVVHAGYNFHDEALDFQITDRVPALLPEDARNSMVQRSFAETRRIVNAIVRKWGNPDVIRVEMGRDLKLPAKQRAKIEKENKKNQTQNANDKTRLEKEFKIDDARRSDILKLRLWEEQDGKCMYTGKTIAKNMLFNGTVDVDHILPYSRTLDDSKNNKVVCLREVNQAKGNRTPWEAAMAGVLDFEALKEMAKILRANHKITDKKHANLLMSAEQFAERFSDDPNNGFIARQLNDTRFATRLVSKYLRTVTKRVEAPTGAMTAMLRRFWGLDGVLPELASLGRAFVAPVLEGGRKDRNDHRHHAVDALTIALTNQSIIQKISTLNARSEEKSKELRDGRIKLPDAPIAGLRKLALDCVDSIIVSHRKTRKGRGALHQETLYGLARTHGGEQRFNAAGVPQYVVRKPLSAGLSCGEIDGIVNPVVRNLVLQRLEEFGVNTSQKKYTIPEDAFAAPLYYELASGERRRIKRVRILVPSTSAVKLRKDGVYVIPFGSDHMLFYRENDSQKYKWELRSRLDLAKKLPLQKLTLSEAEQAISLRAGDLVELTRKGKIDVYKVQKLSGAGVGEVSLFHHADASGNTKQYERPTPSAMQFEKLTVDILGNITPE

SEQ ID NO: 244 - protein, 1081 aa, unidentified
  REGION 1..1081: note = Description of Unknown: Cas Enzyme sequence
MSSLTFSFDIGHSSIGWSVLSSPPIKEVSEIADPSILGCGSVTFPTDDCLASQRRGFRRQRRHIRSTRVRIEHLKRLLEHLGVLTREQLDAMGHPAPFHLAASTLISGEVLSWRELWDVIRWYAHNRGYDGNRRWASDPESEDEDTEKEKAALELMGRHGTETMAETVCALLGVTPGTDPNTSSTLPYKTQNAAFPRPVVRREVRRILEHHIGKLDHLDQAFIDTLMAPDEDDRGDSWKTIAVPDLKLPRRYFGGLLFGQRIPRFDNRIIAACPITGGKVPNKADQVFYAFRWAMLVANIRVDNKPLQAEQRQLLDAAMQGKGRLSEKEITQAVEDITGSTEHNLKATFTIHPDSEKALVLDPATAYAASADTKRSAIHPFWTLLPDDVRRKASGRWKKGRPVTPQWMIHAVGADTPVAGALEEVADTVFAIGQKKKKPPYLTRGHLLRRSFHPERPSGRAPYTKEVMRGVVDFVFSTNRHPSEKGGPIERTAEVLDKEKGRDIDQLTNNHLIRHRLRILLRLAEDLVETYAEGDGAKVSKVVVEVTRDLREFSGLTAKEMARELGGRLGHFKEAVDYLDEHAPHLKVTGSLIRKCRIALDMDWQCPFTGKRYDAVDLPKMSREHIVPYSDRPTNAMYALVLTVPEVNSMKGKRTGRQFIGAHEGQAVDGSPNLDLFTLRQYDTFVNQLDTRGHDDDRKRKIRRKALLRLDKFEEKDHGFTEGSLTQTSHLVRLAARQIEKHLPNIQPHDIISLPGQVTSEIRKHWNLLGCMARAVPEVLDENGKTITKTEIRDLTHLHHAVDAATIALGAHYIPNRGSIWEAIIKRRKEPKDWALLRALGVFKRNTEGRVELTSLPDSVKDELGERLAEERVVQHIPSDMSGVVAEQNTWRVVSQHSADDDPSTLVTLRQRSSEVGTNGERIYKKKEKKERLGKLLGVSPVGGEGKLKEIKGALIISDNYGLALDPEPAIIPFHKVWHRLQTLRKANGGNPVRILRNGMLIRVLKNSARAKQDYTGLWRIVSLKNNKSGLALDIIRPSYVKAQNRVAWSGMNMQLATMLSNGLEIVEPTLCGSGATDKIS

SEQ ID NO: 245 - protein, 1047 aa, unidentified
  REGION 1..1047: note = Description of Unknown: Cas Enzyme sequence
MKNYRLGIDLGSTSLGWSIIELSKGKEPTKLMNLGVRIFPDGRDAKSREPLNKQRRDHRSMRRNRDRNLQRKQHLFDCLIKSKLMPENIIEQKKLENLDPYELRVQALDKEISLHEFGRVLFHLNQRRGFKSNRKLDADDKETSTMKNAIKELENELKKAGVRTLGEYLFNLNKDIVEHHQRKPLRVKTTAEGYNLYPDRKMYEDEFEILWKKQSEYHQELNSELKERIKNIIFFQRPLKPQPKGKCRFEPDETRCPVAFPIYQQFRIYQEVNNLRLLDFDRVSHDLTDEQRTIILKAVLFQKKTAFKALRKKLGKEYAQDYVFNLESEKRKDMKGDETSFTLRKDEYFGTTWDELTDKEQDEIITRIINEDNDTKIEETLISWLCDSFKLQKENAEKISNLRLSQGIGSVSKKAINKILPFLKEGFIYSEACEKAGYHHSDFRTGEIFDEENLPYYGEVMPQHVAFGTDDSDDIDDVRFGKIPNPTVHLALNQLRKFINALTKKYGAPQQVVVELARELKNGQKRLREIEYEQNKNRKYNEKIADELEKIGVENTYQNRLKYKLWEELDRDPTKRCCPYTGKHISLNAVNGLFSNKFEIEHILPKSKTFNDRPANKTVSYFKANRDKGERSPFDAFGHNPKGYEWDKILSRAEKLPKSKRWKFYPDAMKNFENENDVISRMLTDTQYMSKVAREYMSYVCGPNNVWVIPGQLTAKIRSKWGLNELLSDDSKKNREDHRHHSVDAFVVACTSRSMLQKIARASELSRDRFIDEMPPPFTAFKHEKMKDLLDNTTISFKPDHGNAKAAILRKQTVGQLHDETAYGFVSEDIAKGKITLCVRKPLRDLNTIKKITEIVDANIRHFLLSSIEMNEDKKIDTILEEFRQMTGIKRVKIQVEKDKKTVIPIYNKKGEIYKYYLSGSNYCADIYCPNKGEKAGKWHVEIIPMFHAHQPDFEPQWHKQNPTAKKIMRLFINDFVSYNENDERKIRRVKKLSVDGRLFFIDPKIAKSDKEPNATSVKQLQERNARKIGVDILGKVYDPKQKNENH

SEQ ID NO: 246 - protein, 1176 aa, unidentified
  REGION 1..1176: note = Description of Unknown: Cas Enzyme sequence
MPVYLGLDVGSNSVGSAWVDTEKRVITAGVSVFPAGVEDSDTKRGAPKNQARRQKRSSRHSIRHRSERKALLRWLLTQAGLLPKEKAALDALFQQDPWALRRDGLRRPLTAHEFGRVLVHLGQRRGALGIEADDEKEAGKVKDAIRRTSDSLADGKTFGEMMALKREEGRQPLLDKNSQPVPEKFFALPIRNRAGVFAFHATRAMIRDEFNRLWNKQREFGGELGKLLTDELRRKLEDDNDDENWRCKGALFGQRRTWWDTGTIGRCDLEPTDHKCPIGDRHAQAFLVLETVNNIRIQERGQPERPLNEEERRKVVAKLREQKSATPATVRAALGLKSKNLKAFYALNIERDPDRKVNTDWFYSQIVHGSFGEKSWAGLDESKRESVNRALLKLDPESPENVNKLRKGAVEWWGMDAQGAEKIINAWKSRFNTSKRVNLSRRAIINLLPYLENGATVTEARQQFAQDPSSKATPEQRARYAFTFNKAVMDAIARQAGRERAEQLLGQRGLNYDARHFLEMHPDTLPLPPMLANPVARQAIYEVRRHVNAYLRRFGRKPDRVVIELAREAYQTARVRDDILKSNRRRDSIRKKIIAEFQLERLSPNQQRAAVERVLLCRQQKGARPYTDTNLIFTEAQAAQGEECEVDHIVPRSKGGDSGLSNLLLVERGANRNKGNRTPKEWLAPAEFQGLLQKLAHIEKSQGDEYFRETDFKRKWDNLNAAVTPDGERRWRESQLTSTAYAARQVAEYLQSALYRDDPPDKRCIFFSNGRYTSMLRRDWQLYETGAIEVGEESGESRAGRVEKDRTDHRNHAVDAAVIALTGPKIVEQAASGYAWQEEHKALTGQWPPRPPISPPAPWTGVEELRAAIMRPIFGSPQGDGGLVVSHRPIKRRIVGALHEDTMYGCVNAERNLYTVRIEIGKLTAKMLRMPVQEKDERGRTISKDPPLGKGGLVRDRDLRRRLRECILANKLDPDAFLPKQIKALAKGSMLRLPSGVPIRFVKVIRKIYDPVTIKVKGVEKPRVYIAGNNHHMEILQDEKTADWMGICISNLEAARRVRQRQRKGEPQMSMVRKNHGAGKTFILSLAKGETIFSRRQDRPAEPARYYVVSKLNKKVIHFQPVNDARPVKDKKNPANCQDRWSVAPAGLKALGPEPNTPPYKVRVSPLGEVEPLHDD

SEQ ID NO: 247 - protein, 1098 aa, unidentified
  REGION 1..1098: note = Description of Unknown: Cas Enzyme sequence
MRWRLGIDLGTNSLGWCATELGENNKPFGILGIGSRIFADGRDPKSGASLAVDRRAARAMRRRGDRFKRRQQALLKHLTLDGLLPPDTTERKALEALDPYALRARALDEALPPFHIGRAFFHLNQRRGFQSNRKTDRADGDETGKIATGIDRLEAAIGESGARTFGEFLHLRRKAELERAGPGRHNHIPSVRTRLRPETEEGARGGGYDFYPGRHLVKAEFDAIFEAQAAYHPTLLTDAVHDCLFEIVFHQRPLKEPRIGKCTLRPEEERLPKAHPLFQRRRLLEEVNALMIVRPGEVAERLTPEQRDHLLLKLRDSRKVSFASLRKLLKLDPDARFNKESDNRPDMLGDEITAQLADRKRFGPRWIGFTVDEQWAVVEKLRDAEDTGELLRWLTERCGLDAAHAKAVAGIHLPEGFGRFGKTASEGLVAALERETTVDGKVIVYNEAVERAGLGHHSDFPPDDPLERLPYYGAILERHLLPGTGEPADPEEMRIGRLTNPTVHIGLNQLRRTVNRLIAAYGPPAEIAIELARELKMSEEDKAKVNADNNKNRRRAEERSKKLQEIGKPDTGANRALLKLWEELNPGNVLDRRCIYTGAQISIDMLFSGSVEVDHILPFTATLDDSNGNKIVCLRAANRAKRKRSPYEAFGHMADWEEIAARAARLPKAKRWRFEPDAMQRFDKEGGFLARQLTDTQHLARLAREYLSALYPGRGEGSSHVWVSPGRLTEMVRRKLGLNELLPDHNYAAPDQPKNRLDHRHHAIDAAVIAIVDRSMLQAIARASALEGQEGRERIHIPEPWEGFREELRRVVNGITASHRVNHGTASKKGLPKGHDQTAGRLHNDTAYGLTGETDAKGNGIVVRRLPITGLKPDHLTDDASRGVRDAALRAALRAFTRGKDGKAFEQALRDFPERGALPFRGLRRVRVVEPLAVIPIHDRKGRAYKGYKGDSNYRYDVWELPDGKWQAEVVSMFDAHQPGWVSKLRAGCPTAKKVLSLHQNDLLAIEPDGAGRRLMRVVKFGQNGQITLAEPNEAGDLKRRDALPNDTDPFKYIGPTAGGLKKVRARQVRVDEIGRIADPGFPARKKVRRTRPKPDAA

SEQ ID NO: 248 - protein, 1105 aa, unidentified
  REGION 1..1105: note = Description of Unknown: Cas Enzyme sequence
MSWRLGADLGTNSLGWAVIEIALVDGIWTPKRIVAAGSRIFSDGREPKSGASLAGARRDARAMRRRRDRFKQRQAALVKYLTSAGFFPADETERQKLAALDPYELRAKALHEPLPLTHIGRALFHLNQRRGFKSNRKTDRGRNDDDSGKIRVGVARLHEQMRDAGADTLGQFLHMRRASAKSANTIPHVRTRIVTVDAEDGKAGDVYDFYPDRQMLEEEFEAIWKAQTPHHPEALTLERKEQFHEIIFHQRPLKEPKIGYCTLLPPEKRLPKAHPLFQRRRLLEEVNALKVVLPGKEAVPLGKPERDALLSKLAGKKAVAYASLRKALKLDPDARFNKESDNRKDMKGDEVAAEMSSAKRFGKAWLGMAAETQWDVVSRLQKLESDAEAADFEAWLRERHELSREQAQAVTGARLPEGYGRFGETATRALIRELQKDVVVYSEAVSRCPELGHHSDFRDGQIWQDEKGHPALPYYGAILERHILPGTADPEEQDDALRIGRLTNPTVHIGLNQLRRVLNTLIRRYGPPVEIAIELARELKLDEERKKEINTRNRENREAAEKRSKKLNELGQADKGGNRALLKLWEELNRENVLDRRCVYTGRKISMDMLFSGAVEVDHILPFSATLDDSGGNRILCLREVNRIKRKRTPWEARADLRAQFGPEADWEAIAARAARLPKEKRWRFEPDAIHRFDQQGGFLARHLTDTQHLSRLAREYLSALYPEKGEGSSHVWVSPGRLTEMLRRAWGLNHHLPDHNLIGQANQPKNRKDHRHHAIDAIVVAVTDRGMLNRIAREAGRHGHEEASRVVADIPDPWEGFSVEVGRIVRGIVVSHRADHGTASKAGRPKGKDATAARLHNETAYGLTGEKDARGLDIVVTRKPLSSFKKPADLDAIRDEDLKRKLKDWTAGKEGGAFEQALRTFGHPERGPRSYPGLRRIRVVEPLSVISIKDRDGRAYKAYKGDSNYRFDMWELKNGKWKDEVVSMFEAHQRDWVSPIRAANPTARKVLSLQQNDIVAVERENGRELMRVVKFTDGKLALAPPQEAGSLKARDTDKDDPFKYVYGSASSLQRWKARQIRIDELGRVLDPGFPARKPRSGTSPGAGV

SEQ ID NO: 249 - protein, 1072 aa, unidentified
  REGION 1..1072: note = Description of Unknown: Cas Enzyme sequence
MRWRFGGDLGANSFGWFAVELDEAGKPFRVLAAGSRIFSDGRDPKSKQSLAADRRAARSMRRLRDRFKQRQQGLLKHLTLAGLLPADETARKALAALDPYQLRARARHEPLSLEQIGRALFHLNQRRGFKSNRRTERKADDESGKIRIGVARLQQKMREVGAETLGEYLHHRRTSARDPNHIPSVRTRLRPETAEDAKGDGYDFYPDRAMLEEEFDSIWAAQADYHPSVLTDAAHDTLFGIVFHQRPLRAPRVGTCTLVATEPRLPKAHPLFQRRRLLEELNALRIVRTGENPQPLTRDQRDTLYLKLKDKRTVSFESLRKLLKLEPGDHFNKESENRKDLKGDEVNAEMSNKKRFGSQWFHLDVETQWGVIDRLLHEEDVETLCAWLEERCGLAPDHASAVAGARLPEGYGRFGLTATTKLIEALRADVIVYSEAVERAGLGHHSDFRTGEVLDALPYYGHVLERHIMPGTGDPNDPEEVRVGRLTNPTVHIGLNQVRRVLNRLIKAHGPPSEIALELARELKLDDKRKEELNRRNRENREAAEHRSKKLDELGVADKGGNRALLKLWEELNPQNALDRRCIYSGVQIGMDMLFSGAVEVDHILPFSDTLDDSQANKLLCLREANREKGDQSPFRAWGNTTRWDEIAERAARLPKAKRRRFEPDAMRRFEEEGGFLARHLVDTQYLSKLAREYLSALFPGRGEDSSKVWVSPGRLTEMLRRKWGLNDLLPDHNYAGGGDQAKNRLDHRHHTIDAAVIAVTDRGLLQRIATESGRSGSEGRERIIVPAPWEGFRDDLKLAINRVVVSHRSDHGTVSKAGLPKGHDATAGRLHNDTAYGLTGVKERGVDLVVHRVPLASLTPDELTDGGRRVADDTLRRALAAATAGREGKAFIEALTHFAASDPWFAGTRRVRVLEPLSVVQIRDAKGRVYKGYKRDSNYRYDIWEMTDGKWVAEVVSMFDAHQPGWVSELRRDNPTIRKILKLHRDDVLAIDRGSGRELMRVVKFSEKQFALAAPQEGGPLKARAAAKGDPFNYIYPAPSTLRAWGARQVRIDELGRVLDPGPRAPAATAA

SEQ ID NO: 250 - protein, 1085 aa, unidentified
  REGION 1..1085: note = Description of Unknown: Cas Enzyme sequence
MQWRLGADLGTNSLGWAAIELDKNGRPSLLIAAGSRIFSDGRDPKSGASLAVERRAARAMRRRRDRFKQRQAALLKYLTLAGLFPANEDERNALAGLDPFALRAQALQEALPLHHIGRALFHLNQRRGFKSNRKTDRGKNEEDGKIRIGVSRLHEKMRDAGAETLGEFLHGRRASATNPNAIPRVRTRLLHDDEEGSKNDGYDFYPDRLMLEEEFEAVWEAQAPYHPAALAPENKRRLFEVIFHQRPLKKPKIGKCTLLGDEERLPKAHPLFQQRRLLEELNTLRIVRAGQVATPLTLEQRDVLYLDLKNKRVATFERLREKVLKLDPDDRFNKESENRRDIKGDEVAAELGAKTRFGNRWGHFDMNTQWNIISRIRDQESDQDEEKLSAWLRDVHGLTEEQARTTVGARLPEGYGRFGITATTDLIDALRAEVIVYSEAVEKAGLGHHSDRRTGEIFTDDSGRPVLPYYGVALERHIMPGTGETSDPEEMRIGRLTNPTVHVGLNQLRKVVNALIRTYGPPQEIAIELARELKLDDERKKEINTRNRQNREAAEQRSKKLDEIGVADRGGNRALLKLWEELNPRNVLDRRCVYTGKQISIDMLFSDTVEVDHILPFSATLDDSNGNKILCMREANREKRKRSPYEAFGHRNDWEDIAARASRLPREKRWRFEPDAMMRFDKKGGFLARQLIDTQHLSRLAREYLSSLYPDSGECSSHVWVSPGRLTEMVRRKLGLNDLLPDHNFGGGGDQKKNRLDHRHHAIDAIVIAIVDRPMLQAVARASAEAGFEGQERIIIPEPWPDFRNEVRKFISTVVVSHRPDHGTASRKGSKKGPDATAGRLHNDTAYGLTGEKDAKGNDIVVHRVPLAALRKIADIQGVRDPDLRAALLTWTKGLDGKDFEARLRKFPELGPEQFRNIRRLRVVEPLSVISIRDRNGHAYKGYKGDSNYRYDVWEVKDGKWVPEVVSMFDAHQPGWSSAIRRDNPTARKVLSLHQDDVLAIQQNGNDRKLMRVVKFGQNGQITLAEPHEAGDLKRRDAAPNDLDPFKYTAPTAGGLKRIMARQVRIDEVGRVFDPGPRDRPEAKP

SEQ ID NO: 251 - protein, 1079 aa, unidentified
  REGION 1..1079: note = Description of Unknown: Cas Enzyme sequence
MRWRLGADLGTNSLGWAVVELDGNNLPIRIIAAGSRIFGAGRDPKTGASLAVDRRAARAMRRRRDRLVRRQAALLKHLTLVGLFPADASDRQSLEGLDPYELRAKALNEALPLHHIGRALFHLNQRRGFKSNRKADRGKDADDGKIRLGVERLYAAMRDKGAETLGEFLHARRAAAADPNSVPAVRTRLRPETGEDKTGNGYDFYPDRRMLEEEFDLIWERQAPHHPSVLTPPNRKRLFEVIFHQRPLKPPKVGACTLVPGEPRLPKSHPLFQRRRLLEELNALKIVRPGAAAEPLTCEQRDLLYLKLKDKRAVTFESLRKVLKLDPDARFNKESENRKDLKGDEVAAELGARTRFGKTWPNLSDRTQWEVISRIREQESDADEAALTAWLRDKYDLSAEQAKAIVGARLPEGFGRFGLTATEKLIEALRAEVVVYSDAVQKAGFPHHSDFRTGEAFTELPYYGSVLERHIMPGTADPTDSEELRVGRLTNPTVHIGLNQLRRVVNRLIKQYGPPEQVAIELARELKLDDERKREIDRRNRENREAAVKRSEKLTGIGIADKGGNRALLKLWEELNLDNALDRRCVYTGQQISIEMLFSGAVEVDHILPFSATLDDSNDNRLLCLREANREKRKRSPFEAFGGRSDWPDIAARAARLPRGKRWRFEPDALSRFDSQGGFIARQLVDTQYLSRLAREYLGALFPGEGEGSGRVWVSPGRLTEMLRRSWGLNSLLPDHNFGGGDQPKNRRDHRHHAVDALVVAVTDRALLQRIAREAGERGHEAASRMTADLLMPWENFRAEAGEALAGIIVSHRADHGTVAKDRLARGRDQTAGRLHNDTAYGLTGEKDEKGNELVVHRVPLEALKKAAAIENVRDANLRAALVAWTRGHDGKAFEARLLAFPRLGPLPFRGIRRLRVVEPLSVIAIRDRDGRAYKGYKGDSNYRYDVWELKDGKWAAEVVSMFYAHQESWSSTIKRDNPTARKVLSLHQGDMLAIEPDGGGRKLMLVVKFGQNGQITLAEPHEAGDLKRRDATSNDIDPFKYFSPTPGGLKRVKARQVRVDELGRVLDPGPRNRGEPSP

SEQ ID NO: 252 - protein, 1196 aa, unidentified
  REGION 1..1196: note = Description of Unknown: Cas Enzyme sequence
MQNKISYRLGLDLGTNSIGWAMLALNENKEPYKIIDAGVRIFSDGKNPKTKEPLAVARRIARGARRRRDRYLSRKKTLMNYLIKIGLMPENELERKKLELLNPYQLRAEALDRQLSSFELGRAIFHFNQRRGFKSNRKEVLKPEDIGEEQEKTEDKKPKKENAKITDGEKRTNLETAITENNCRTLGEYLFKYRLENLNKNKELNQNQGLTTRAKPDENAPYPTRAMYEEEFDQIQKNQIQKTSDENWQKIKKIIFYQRPLKPQDKGFCGFINQFKVDANKLPNWAVEFFNQRDQKEFLKGLPRAYLAMPSYQKFRILSEVNNLKIKAIKDITGRTEIALTTSQKQQIIKKLQSEKTFGFKKMRQEIGFEGDNFSFNFESERRKGLDGNTTKMLLEDEKYFGKNWNELSLFKQDEIVEFLLDEDCEENILTKALNEWSLSQIQAENLSKLTVNQFGKTAVGKMCKEILQKLCQKMEEKNCRYDEALKELGIDHSDEEFSDGSESKLSYYAEAIPTSVVKVKSGSKQEMEFGKIANPTVHIALNQIRKVVNSLIEHYGKPEEIHVELARDLQLNKKAKSDLESFQKDNKKKNNQLKEELITNEIAITDDNILKFKLWKELVPKDCNDRKCPYCGKNIGIKKLFSYEVEIEHILPKSRTFDDSYNNKTVAHKNCNNLKKHYSPFEAFNDIAGFNYEEILNRAEKFPKQKRWRFAENAIQKFEGEKGFLSSQLNDTRYLSKIAAQYLSQICQNNKEKKNIRVANGKLTAVIRNNWGLNSILKTPKELPHNQSPQTLNHDPITEEVLESKKVKKNRDDHRHHAIDAFCVAMTTHSLLSEISQYNKAGKELKEFTVLPPRNWNRFYEDVKDAIDNIVVSHRIDHGANGKMHEETYYGIIEPAQSIERDEKIGNGYNFVYKKNLSSLTENEIERIRDEKIYQELNKKLQGISDKKEIEKILSNYSIKGKNGETKVKKIRLIKKENRFSIISHKQTTLQKKDLGGIEEKIHQKAVVGVNHHIEIWKLPENLKFLSALNLKGKKLEKFKEDLKEREKVKFVEFLQQDQEVLNQKLKQLEIFNNYIQELQGWASKDYDYAVICSSNFEAINHNGESKKPHPAAKLLAKIHGGDLVKIKNGEDFIVAKVTQLNPAGNRILGIKHNETGKDVKEISLSFSKFGEKKLTKIFLNEIGKEQFNSQPILK

SEQ ID NO: 253 - protein, 1117 aa, unidentified
  REGION 1..1117: note = Description of Unknown: Cas Enzyme sequence
MQRIWGLDIGTTSVGFAVVDYDEARAQGEIIRMGVRIFPEGVTEKDREPRNKARRSARLVRRQFRRRRLRRKELGRILAEKNLLPPFGSDGWTLALQFDPYDLRRRAISERLEPSEIGRALYHLAKRRGFKGKRKAEEDQEEKDAKKKKDEGVVAEGIAKLRQAMGQQTPGAFLASQPKRRGRYLAREDIDNEFQKIWIAQRQHHPAILTDALRDRIHETIFYQRPTFWRTKTLGKCWLEPDAKLCLKGSWDGQQYVMLEQLNKLRLVGGNARPLEPDERAVVLRLLESQAEATFGSIRKALKPLWRKLELPTDAEFNLEAAEDKMPGNKTEATLRKIFGDSWNDHPARDRIRQEIADRLYGVRYREVGATKIEIRSHGDEDARKLAFIASIQTDWGVTPEQAEQLADMTLPGGWLRHSGKAVDKLLRPHMEAGLGYVKAVDAAYPGCRDRPPEAEFLRIFGAAWPAHRARPAIHREIGARLREIRFRDDAGDGRKTRPPEEALRARGDFVRAAQRDYGTTEEEAEQLADLALPRDAKLSSKPADIPDLRNPTVNRALNEVRKVANNLTAVYGKPDLIRVELARDVKFSGKRLAAMKKQQAENRQRRKTAKTRLEEKGFADPSDDDVEKYLLWQECKELCPYTGKKICFDDLFGSMPEFQVEHIFPLKRSGDDSFANKTLCEIAENNRKGNKSPYEYYAPQADKWDDIKARLKTLASPEPGGRGFSTGKVRRFLAATFEEAGSEEQATRLLRDTSYIAIRTRDFLQRMGVEVQSGVGKITHKMCEFWNLFRILDPKDGEKNRDDHRHHAVDALAVALTSRSIVQRMSRFEALGKRVHAEGFPPPWPTLRADAEKAVRTIVVSHRVQRKLAGRLHEQTALGDTGITVTESKMAFRIFAKRKPLADLSGSEIDDVRDGEIRRKLKERLGITDDAIGLAKKLPEATIKKALAIELRLKDRRNPQGRIVRKVRIDVKRQMKVMVPLCPERKTYVEMGQNTNHHIAMYDLGGGKAAHETVSRIEVARRHTNNETIVRRSLNDKGKFIVSLCPGDVLECVSESGEVSYHLVRKFNEKGRVFYKPIAKADEPKPAVSFGPAQFLRSEIRKVAVDPIGRVRPAHD

SEQ ID NO: 254 - protein, 1055 aa, unidentified
  REGION 1..1055: note = Description of Unknown: Cas Enzyme sequence
MERIFGFDIGTTSIGFAVIDYNSEQSAGNILRLGVRIFPEARDSEGTPLNQQRRQKRMMRRQLRRRRMRRKTLNEALRDAGFLPAYGSADWPIVMGNDPYELRSRGLDEKLNAYEFGRAIYHLAQRRHFKGRDLEEGDLAEVETEEAGKAKKEKVDEKDKDKADEQKSKAASETTHKTLHTNGTSLGQWLAQRGAHERKRGEHALRIDVEEEFERLWTAQSHHHSSLKEKSLKAKIMDTIFAQRPVFWRKNTLGKCRFMPGEPLCPKGSWLSQQRRMLEKLNNLAIAGGNARPLDDEERGAILTGLQQQASMSWAGVRNALKPLYKKRGEPGSEKSLKFNLEEGGEKKLLGNALEAKLANIFAEDWSSHPNQTAIRNGVHERLWAADYGETPDEKRVIILSETERETRREKAAASFIADFGITADQAAQLRDLRLPTGWEPYSISALNEFLPHLEAGVRFGALGNSPEWENWRHETFPNREQPTGEILDKLPSPAIKEERDRLSTLRNPTVVRTQNELRKVVNNLIDLYGKPDRIRVEVGRDVGKSKREREEIKSGIRKAEEHRTKAIKDLVSKGIPNPSNNDIEKWLLWKECQEKCPYTGDQIGFDELFREGRYEVEHIWPRSRTFDDSRRNKTLCRKDTNIEKGNKTPFEAFGHDEDRWSSIQTRLENATASKGVTGMSPGKIKRFLARQMPDDFAARQLNDTRYAAKQILAQLKRLWPDLGPEAPVKVDAVTGQVTAQLRKLWTLNNILADTGEKTRADHRHHAVDALTVACTHPGRTSKLSRYWQLRDDPRAQKPTLTPPWDTIRADAEKAVSEIIVSHRVRKKISGPLHKDTTYGDTGEDIKTKSGTYRQFVTRKRVEALSKGEIEEIRDPHIREIIRTHVVAKGGDPKKAFPPYPSLSPSGTEIRKVRLTTKQQLNLMASVGNGYADLGSNHHIAIYRRPDGKADFEIVSLLETSQRLSQRKPIVRREGADGAEFVMSLSAGDTLEVPEGEKAGFRVIQSIWASGVVVTIEHKDATGETVWRPNAGSLLKGNVKKVSVDPIGRIRPAND

SEQ ID NO: 255 - protein, 1386 aa, unidentified
  REGION 1..1386: note = Description of Unknown: Cas Enzyme sequence
MAKILGLDLGTNSIGWALIDREKITSTNEKGTGIIACGCRIFKEGVNKNSSGKEVSRNTTRRIARGARRKNYRFKMRRKRLIKELKKLEMLPDNRYYTFKKHDKKNHTIELFKLRKKALDEKIRLEDIGRIFLQINNHRGFKSNKKEDAVTNIDKDKEKELLGVKGTIQKLEKRIKECNCRTIGEYYYFLIEQNKNSHNPNEPKLLHENDFLRGEGAYTSRELFEKEFDAIWEKQKEYYQDILTDENKEIIKDECIFYQRDLRSAKHLRNRCKLESKGFWWDKKNKKHINYLPCCTKSSFEFQEYRIWEQLNKLRYTNFEFTHQALSLEQKHELAEKLHDNEKLTLTQIKNILNLSRDTKFNDIGDHLKGNITQARLIKVFGKDFWSNSIVKQETEGNNSKFKPNEYSNIQRQLWHNIQFSKDKNWLLGKDEFIENVHRKNRKQALKKNAFYTPHNQWKQNLKQLELSDEQISKYAETTFEPGYSDYSTKAIRKLLYYMKQGDDLVTSSYKVYGDYTSSIQKEGMKLEYKVPQLANNSLRNPIVEKSVRETIKIINTIIEKYGKPDRIHLEMARELKMPKEARENIYKRNSDKDKVREEYARFLSKKLKRNIDKTSPDIKIFEMFLELNYSQKGFNNNIKGKITDNEIEKFLRLKIPSNKTKYYLWLECDRKDPYEGNTISLSTLFSNEIEIEHIIPYSLCGDNSFMNKTLSFKTFNAKKGNKTPMQYFEDKPLEKELFKQNIKKFSDGKKERFLMTDNQIEQFRNSQLNNTAYIATEVRKHLLETFKNENIELTNGVMTSLVRTLLGFNGILNKPVKVDDIYWNMGKVWAILNESKQIVDFIERTDDAILEYLNVMKGVINSAIFYPSKIRDDHRHHIVDALITALLNKKINNSILKSAEGTVNQETGEFKSKFYTNEKGEHKLTKETISEIREKLKVELNLIEVDELFPYATKKIENIFISYQNERLETLPRKKLFTPNGKQLKDKNGQQLRSSGLSVRHELHESNFYGKTKNCKENEFVRRVKLEDLTFNQLTSIVDKKIQEIIIGKIIDFTLETLNDSENPVRIDELLKTRGKIKEIILLSIAEKEIKEQLNEIKGLKGKEVRLEKQILKSKENEIKTKLPEKEDYKKIKQAIEKGLRKALKEGIYLENKGKRQLKKGNFNPEIVRNDIPIKKVRVKFFSNTAIPVKRKRISAQLASNSVKEIEEKNFQYVMPGNNYLFVIYGEEVPDKNGINRDRHIVSWFDKAQVDIENAKISKQNKIRANKGGKQIPLHSYFPSSKNGLDFLCALSHNDMVIIFNDDEGLNDINWNNQEELFNRLFTVNDFDQRGKIIFTRHNKSLNVPATKAEPVGENVLLGEGEVLRRRANTFRGIKVEITPIGTIN

SEQ ID NO: 256 - protein, 1034 aa, unidentified
  REGION 1..1034: note = Description of Unknown: Cas Enzyme sequence
MSKPYRIGLDIGANSIGWCLYELNSNDEIIRLMRMGVRIFSDGRDPQTRTSLAVERRLARQMRRQRERTVQRRHGFLNELIRSNLLPEKEDERKQLVLLDPYELRDRALREALPLPQFARALYHLARKRGFKSSRKDRGDAERKKASGVIGKGTERLRELVQTAGCETVGQFLYLRHAERKPVLARPSNSGEYEFYPDRALTLEEFDLLWERQRKFHPEALTQDIYRRLRYFIEHQRPLKAVPAGRCQLEPDETRARRGHPVFARFRILSDLANLRIEFPDGTTNALTLRERETCLDYLKKNERLSWAKLRNLLGIDKKKDDPEPFNLARSKKNGIIGDYVSLSLSAPECFGSEWESMPAERQAVVIEALALAHDDENLRARLEEKVIKVTDEQLAAISKVDVPEGFADLSLKAMAKLIPVMEAQIVTYDQAVAKAYDGLSHSDFLPEEAQLRSSLPYYGEILRGYTQPMPQSVVPEEARFGRLPNPTVHVGLNQLRKLVNAIIHRYGRPRQIIIELAREFGMSGKRRGELISEQKKNEKANERRVAELRSRNVQVNRDNLLRLRLYEELPVMNRVCVYTGKAIGQETLFSPEIEIDHILPFSKSLDDGIGNLVLAYRSANRIKGNRDPHTAFSNNPSGFDWDGIEARVAHFASENPTAWRNKAKRFQSGALERFVAERGFLDRHLTDTAYLSRLAKQYLSHVCYKHRVWVATGKLTAMLRGKWDLSDALGGHGKNRNDHRHHAIDAAVIGACDRRIIQQLSHAAEAFEQGRSHRFFEGLGQPFDGFSVAVREAVGKIVVSHKPDRDAGGSLHNDTAYGVLEPGNGKTPPLVVRRVALTTLTNAKKAATIVDPLLRTRILELIDGLNEKQAVAALEAFSAKNNIHKIRTQERLSVAEIRNPHREKGRAVKTDGNAYAEILRGPKGWTDHIVTRFDHGRNKETSPLPVVMRLFDNDVIRIEDENGKSRLMRLVKKTKGMLTFAEIYEAGNLKERDASKDDPFRYMTVAGSRLRSLKARRVTIDLLGFVHDPGFNE

SEQ ID NO: 257 - protein, 1006 aa, unidentified
  REGION 1..1006: note = Description of Unknown: Cas Enzyme sequence
MLSPILQGDLTMPTTRTAPASVNDAFLNGTVFGFDIGTASIGYAVRHGKKFLDVGVWICPEEIADLKGRRGLRRQRRTLRSKKYRRQWLATELEKLGLPKPRQPLHNPIALRCKAINGEKLSAEELHTAISHLWKRRGYLDHVPWSSREENDDRKKEEGVIKESISELRDEMKSDGCELPCQFLAKHPEQQRRRVWPRDLLKAEFAAIIKHNPKLAAKADWLLYGDTREVRGHRVYFKSTEGRNPGVLGLRWPRFDNRGPSLDSWQPLDAQGRPLHVVRKNKQHFKMSQWELALMNFRVLDAHTRQKRDPRVDFPDFIATLRAEWEKKGKVTQARLIRLSAPYAERFLLIPDQKPLTPDGGNGRAQYSSLTLELLRKEIGSGRRVDPPQPVLKRKGEDAERALNRYLAEIKHPLVRHRLVLFRRLLNKLIAEHGAPDLIVVEAVRSLALSQKNKNELNKRNEAHRRERENARDLLKGENLPTSANAIQKYRLWKETKGRCPFCLQAISQEALFNGEADIEHLVPRARLDCNEIYNLTIGHTDCNRNKKGDRTPYDAFHHDGLWESLKRNAQECFSGKKLEIFLSPNAEELIEQKSELVQTSYIAKVLRHLCLIRLGWVGEDGRDPTTEKCTPSQRFQVTNGQITSRLRQSWGLNHVLYDKPAEDTEEAWQQYAEKNRGDLRHHALDAMVISCTLPWLANRTHGAKDEFGNFGWWTQDEKRRSIASNPIGLDYKKAKAEIEKVVVKHHASRSNHRQAYATTLYAKEAPNTYVAREVFTSLKPKDLDSIYPKSFANYCVFAWQRYELETPDLQAQLKPTKGCLPPSFTQKLCFAHFQSWRAKGEGEFAWPPQVRIPIRNVRLISVKDDSAVAPFSKGTHAYVKRTGFKEVRVHPSKDGARLVPVFVPLWKSDLPISSEPVDLSIKPVVVFRLGNLVQLKKKTGANNPPGKYRIASTMQANVQLIPVHISKDKDALRAAGYLENGVNIRWKAFIEAAGYEPPHPPSAQP

SEQ ID NO: 258 - protein, 1159 aa, unidentified
  REGION 1..1159: note = Description of Unknown: Cas Enzyme sequence
MNSTLYLVGSDAPLTKLSKTFPLTINENLSLGLDIGVGSCGQALIKWDRTDSSPVGKLAEFPNLDSTAATNFSGPIAFLGVRAFDVPERYEKTGIKLKNPERRQARLMRRTIQRRAKRMHKIRMLLKQHGIVPSDYSLENEAWQKKHVSATPLQWRVDALDRLLDPWEFAAVLLHLAKHRGFKSNRKSDLVSDSKGKEGGTLESTRANHERLKNYRSVGEMWLNDPLFQDRKRNREGSYTATMLREDLQKEIKLIFSKQRELGMADATPNLETAFIKIFSQQNPLQDPIMLLGDCPFEPNEKRGAQRAYSFELSRALQKLNTIHLRSPTGLKVLLSVHVQAANGGYAHFITQFGSKKSISWSDLRKIFELDEAIQFLDLPSAKRKNTKIQDSATTLIRPEQIRQELEKEDFATRSGKNSTAFGSHILFKALGSDLWNELTTTDPASLDNVAFCLTFYEALESHPPQTGIYEAMIARGVDQRVIDLLQMHVNEGTFTIKDFTGSVALSTKASRVMVPRLARGLFYTDAAKEAGYEPLEQDFSLAKIVNPVVQSVVREVIKQVAHLIDEAGSLPGTICIEMARDIGKSIDERNEISKALEKRTTQKNANRESFASYLSPGHRITDDDLERYELWLDQGGWCSYSDQKLPSPEEILSDQVEVDHILPRSRSHDNSYDNKVLVYKNANQNKRQKTPFEWMGSDENSEAWRQFVARVNNFRIRKRKRQYLLNTDFAEKEAEFIARNLQDTRYICRLVRAYLEDFYRLAGEQPGKPNSTRRVFVQPGGLTSLVRKAWGLEDLKKDILGNRLGDKHHAVDALVCAGLSEGQRQWLTRHEQGRVTKEKIAYNAVDQLGKSYILMEQEGRSNRTPRGLSTPWGTAAVFRSDVVRALDTMTVSRRERRHGRGSWHNDTFYREVLKPNGQKTYYKRTSLVNLVNNKPQANAFNLDDVKDIHLHTNAWLKEALLIWFQRGKPVDEDQLPRGHKPKENGDLADLNSPVIRKVWVDQGNKSARKTDHGMVVGGHQVRVDVFAKTTKKGATKYFLVPVYAHDIRYGEPPMLAIIAHKPEATWDIIDNTYEFRFSLWPNSLIFSQRKGIIDIGYYSGVDRSTGSLSFSSLNDKVVGDRTSVKQGCLAFKKYTIDRLGRVSEIKSEKRTWRGGVCI

SEQ ID NO: 259 - protein, 1061 aa, unidentified
  REGION 1..1061: note = Description of Unknown: Cas Enzyme sequence
VDRLKYCLGIDMGTSSLGWAVVELKNNQDSENEKLIPVDVIDLGVRIFDDGRDAQTNEPLAVSRRNARSMRKRRDRMLRRKQYLLHTLQNAGLWPDDKEKQSNLIAQNPYEIRCRALDQKIKPFELGRALFHMAQRRGFKSNRKIDKDESSSNMKQAIDVLENKIATSGARTLGEYLYCLRPVDRTVSHKQQPSLRVRTSMKGAKTEYNIYPDRSMYEAELRTMWERQKEFYPDLLTEDLFEKIRKTILEQRPLKPQEVGVCQFEEGEKRAPKASPYFQRARILQDLNHLELASGTLSAENREAVKKLLFTKKEVKFDDIRKKLGFPPSAIFNLEANERKKIDGDLVRSVMGNKNAFGEKWDNLTIDQQHEAISLVLAEHDDEQVAALLTQSPYNLSEEQAGQVLTLTSKLPNGYGSLSIKALQKIIPFLEEGYRYDEACQKAGYNHMAVKEFDKLPYYGVVLDKAVIGGSKDPKEDPSNLANRLDDAIGNWERYAGKVNNPTVHVALNQTRRVVNAIIEKYGRPTQIAVELARDLKMSQKEKIAFTRRQNENKKRNEIIKTELEQLGLPNNYENRMRYKLWEDQARDPQDRVCPFCGRVISVSELFSPAFEIEHLLPFSRTFNDSHTNKVISCTNCNRDKFNKTPFEAFGHDKQRWEKILDRIKNYPSFAKRSAFREDALSDEKEKELIARQLNDTKYMAKMARQYLSCVCEDGNVRPIPGQLTAHLRHAWGMNPMLGDPDDEKERGDHRHHAIDAFVVACTSRHMLNQTSFLSGKGVKRVYFPPKPFDKFDYSKFQDMLNRTVISHKIDHGGADHAILTRHTTGALHEETNFGYVRQLDEKYALFSTRKELASLFKDKAIEQIANRRIRLNIQRLLAGISDEKVRKARLFNFARKNNIRRVTVCEKKDISTMIAIRNKNTGRPYRYVVGGSNYCTDIYCPNRGPQKGKWCAETVSTFDAHQKEFIPAWKKAEPEAKLIMRLFRNDTVAYDEDGTRIIARVKKMSGGNVVLIPHNSASPKEEGRKISANRLKELNARKIKVDMLGKVFDSNSMVSRQTKE

SEQ ID NO: 260 - protein, 1090 aa, unidentified
  REGION 1..1090: note = Description of Unknown: Cas Enzyme sequence
MGWRLGLDLGANSLGWAALHLDGAGDPDGILAMGSRIFSDGRDPKSGASLAVDRRAARAMRRRRDRFKQRQAALIKYLIRDGLFPADQAERQRLAVEDPYALRARALDEALSPFELGRALFHLNQRRGFQSNRKTDRGQDDEAGKIAVGVDRLTRQMRESDARTLGEFLHRRRQAAADANHIPSVRTRLRPETGEGAKGDGYDFYPSRALIAEEFAEIWAAQAPHHPTVLTREVHDRLYEIIFHQRPLKAPPVGQCTLVPGETRLAKAHPLFQKRRLLEEINALTIVRAGEIAQRLTPEQRDILFLALKTRAKMSFAALRKQLKLDPADRFNKESENRTELKGDEVAAELGARKRFGTRWAHLSTEAQCEVVQRLTAVESERDEAAFADWLRQTHGLSEDEARAVLGARLPDGHGRFGPTATTTLIDSLLHDRTEDGRVLVYSEAVQRSGLGHHSDFRRDDSDREVSELPYYGVALERHIMPGTAEPTDPDEMRIGRLTNPTVHIGLNQLRHVVNRLIRAYGPPDEIAVELARELKLTDEEKKRRNRENSENRLAAEGRSRKLEEIRQRDSGANRALLKLWEELNPGNVLDRRCIYTGEQISIDMLFSAQVEVDHILPFAETLDDSNGNKLLCLREANREKRRRSPFEAWGHTDRWPGIAERASRLPKAKRWRFEPDAMQRFAQDDGFLARHLVDTQYLGRLAREYLTSLYPGRGEGSNPVWVSPGRLTEMVRRKLGLNDLLPDHNFGGGADQPKNRLDHRHHAIDAVVVAIIDRGMLNAIARASGQEGSEGRERIHVPAPWDGFRDDLRAAVNRIIVSHRPDHGTVSKAGLRPGRDQTAGRLHNDTAYGLTGETDAKGNSIVVRRVPLGAIRKPADIVRVRDPLLRTALAEFTLGHDGKAFEDRMARFGELGPLLYRGIRRVRVTEPLTIIPIRDRDGRAYKGYKGDSNYRYDVWEMPDGKWRCQVISMFDAHQTSEQPRPHPAARKILSLQRNDMLAVERTDGNRELVRVVKFSEKQFAVAAPYEGGALKARDADGDDPFRYLYPSPNTLKGWRARQVRIDELGRVLDPGFPARKTVRRTRPRAAPAD

SEQ ID NO: 261 - protein, 1095 aa, unidentified
  REGION 1..1095: note = Description of Unknown: Cas Enzyme sequence
MDGGAMDWRLGLDLGANSLGWAALRLDRAGDPIGILAMGSRIFSDGRDPKSGASLAVDRRAARAMRRRRDRFKQRQAALLKYLIRDGLFPADQADRQRLADEDPYALRARALDEELSLFEIGRALFHLNQRRGFQSNRKADRGQDDEAGKIAVGVDRLNQQMEEQGARTLGEFLHQRRRAATDANHIPSVRTRLRPETGEGAKGDGYDFYPSRALIAEEFEEIWAAQAPHYPDTLTQQVHDRLYEIIFHQRPLRAPQVGQCTLVAGETRLPKAHPLFQKRRLLEEINALMIVRPGEIAQRLTPEERDTLYLKLKDKRTVSFATLRKTLKLDSAARFNKESENRTELKGDEVAAELGAKTRLGTRWQHLSGDQQWEVVHRLMALESQADEAAFRDWISQTYDLLPEQAAAVLGARLPQGHGRFGPTATTTLIDSLLHDRTEDGRVVVYSEAVQRSGLGHHSDLRHDRDDEDVTELPYYGVALERHIMPGTAEPTDPEEMRIGRLTNPTVHIGLNQLRHVVNRLIRAYGPPKEIAIELARELKLSEDEKKKRNSENRDNRLAAEGRSKKLEEIRQRDTGANRALLKLWEELNPGNVLDRRCIYTGEQISIDMLFSDRVEVDHILPFAQTLDDSNGNKLLCLREANREKRRRSPYEAWGHTDRWPDIAERASRLPKPKRWRFEPDAMQRFATEDGFLARHLVDTQYLGRLAREYLSWLYPGRGEGSGHVWVSPGRLTEMVRRKLGLNDLLPDHNFGGGADQPKNRLDHRHHAIDALVVAIVDRGMLQAIARASGQDGSEGRERIHIPAPWDGFRDDLRVAVNGIIVSHRPDHGTVAKAGLARGRDQTAGRLHNDTAYGLTGETDAKGNSIVVRRIPLSAIKKPADIARVRDPLLRNALAEFTKGLDGKAFEARIGRFHELGPLLYRGIRRVRVVETLTVIPIRDAEGRAYKGYKGDSNYRYDVWEMPDGKWRCQVVSMFDAHQSTEQARPHPAARKILSLQRNDILAIERTEGDRELVRVVKFSEKQFAVAPPHEGGSLKTRDGNADDPFRYLYPSPNTLKGWRARQVRIDELGRVLDPGFPARKSVRRTRPRAAPVD

SEQ ID NO: 262 - protein, 1170 aa, unidentified
  REGION 1..1170: note = Description of Unknown: Cas Enzyme sequence
MPPAPHRTIWSFDLGKASIGEAVRYVSDKPLDPLNHTFPHKASLLLPEDFAETRTAAGRRRMQRTREAHKAREAWLDAVWRAAGLTPLAGRRVEEREGKWQAAVETPEQKTEREDKLEREFPKKGDPTCYNSALLRIKLLREEKLEPWQIYKALHSAIQKRGYGRVPWAARDERRTGKTEKQMDEELAKKDPAYKAAVEAWPAFKREVPERFHYPCYYDAAKMKLWNPAVPDVLGERIDCHAENTRRVRFAREDVEKEIATLARNASAQLSALAEMFARVKHDGWTLRDEKSGRTKKFPVVAEDISGFLVHGPAGNPLGAPEDDFAAYLAFRTERGIHPGSSDDWMGVTAQKTPRFDNRIINDCALLDGHQVCNVTARYDAKNQRPHADSLLASEVTFLMKLKNTLVAGTNGQRKLKADEIGKIFRTVSAKAQAKTADVKDYSASVIHCYALTKAAWDSTKGIKELDLHPLKGHEIIKAPKTDGRSRFSRSALRLVRALILSGDKPSEFTRRLLAGDAVLLAKIGMDVLKAPPPPRAKVNGKPEPQRRPYILERDLKFLTDLAQANDTWEAIHIPEQRLEALETRHTNDGEIERDSAIREIIGSINDPIVRHRLTVFAGRLSELHARFGVPEEIVLEFIRTDFMGPKAKAVLATFQKKREEARTEAKKQAGKADALKYELAAAQGCICLYCGQPFQMSELGNYEVEHIVPRNKNGPDAMVNYVLAHRGCNDVKGEHTPFEWLRQTPGWDAYVERVEACATALRNKKVQLLQREDAPELVERYTALAETAWISRLAQKVAGLHFGWRNGIDFTGPKPVKRVTIISGGLTARVRRKYRLNSLLAPCPPGEDPKEWEAKVEKNRGDDRHHALDAMVINFLPQWSRDASKEHFFRFPDPIQKNAPAFFRKEIDEVMPVNIAFEKPALDEKFYGKRANESKAAREKRGRPVSMVRRLENVGDLPYKSDNNKKVFDASLKTAYTRIENIRDETVRKAFASYFNSHQPTEVDWRKKLEEGFFHPNGSRIRRLLLDRGSPDEYGNFAKDGTHAWRRGEPHRGQIVYRLRATTKKGAVKETIEVRPVYVFESRAAVEKKLKDEHGDAITIYGFFQSGCLIAVEREVTHEQKPLPAGTYLLNTVRAGGDVKLTTQDGRTHPEIPRYSLKNLIAAGLRRAD

SEQ ID NO: 263 - protein, 1069 aa, unidentified
  REGION 1..1069: note = Description of Unknown: Cas Enzyme sequence
MAYRIGLDIGITSVGWATVILLDGQMISIGDLGVRIFDKAENPKDGASLALPRREKRSMRRRLRRHRYRMERIKQLIEKSGVLSIDEIHHMYEDNLQVPDVYKLRSEGLDRLLTSKEWARILIHIAKRRGFKSNRKSETSNKKSDEGKMLTSVLENNKLMNEKGYRSVGEMLCKDEKFSRTKRNKSEEYSHTLSRDLLVQEIEKLFEAQRQFGNAGASEAIQEEYIKIFCSQRSFDQGPGLPSPYAGNQIEKMLGECTFEKGEKRAVKASYTFERFMLLTKINNMRIRTTGTGIRKLTDDERRLLLEEAYNKTDLKYSAVRKLLSLGGNDSFSGISYGRKSEEDVEKSSLVKLTAWHDIRKALDKIHKGYIEKLSKEALDEIGWALTVYKNDIQIKEYLSSAGIENQAVEKLLDLSFRKAGHLSLKALKKIILYMESGLDYDKACTEAGYNIHGLENTKTRKLLPIDDEYITNPVVKRALSQAVKVINAIIDRYGSPDAINIELARDMSRNFRERNEITKQMEENMQRNDNARQRIVSEFGIMSPKGNDIVKLKLFEEQDGYCLYTGEKMDVRRIFDDGYADVDHIIPYSTCFNDSYNNKVLVKSAENRQKGNLLPLEYLHDKPEKMEKFLSLVSTLQLSYPKKQNLLRKSIGEQEAEEFKERNLNDTRYITRCLKEHIRNQLLFADPDRKKPVVCVNGQVTAYVRKRWGLTKVRDEGDKHHALDAVVVACIDDGIIQKVTKYHKYQETRFLNREVLSNAPHFPEPWPKFRKELEARLSDRPQELIKSLRLPFYHNDEEIKNIFVSRAPRRKNRGQGHKDTISSPRIVPEGFVIKKTSITNLKYEKGEIKDYYNADSDRLLYQALCRRLDEFDGDAEKAFAGGFYKPKANGEQGPLVKKVKVIEKSNMGVALNQGKGYAANGDMIRIDIFSKNDKYYFVPVYAADTTKKDLPNKASASGKPYEQWPEMDESAGFLFSLYPKDLIRIEHKSGVDLTFNNGNKKKVTEGFFYYRKAGIATASIAVDNHDNSASIPSMGIATLKKLEKWQVDYLGNLTKVKKEKRMGFSNKG

SEQ ID NO: 264 - protein, 1098 aa, unidentified
  REGION 1..1098: note = Description of Unknown: Cas Enzyme sequence
MQVRDDVILGLDIGVGSLGWALLEEDLQTGEQRLLQRQTPQGETTYALGVRLFHVPENAKTKELLNVKRRTARMQRRTTARRAQRMRRVRALLDSLGVPGVRDADAFHLGKGRGAQCDPWQLRREGLERRLEAREWAVVLLHIAKHRGFRSNSKTDRSGSDKEMGQVLQAVSNLQQEVEASGLTVGALLASRERRRNRADHTGAPRYDLCMLRSLQENEVDILFTRQRELGNPLAGEEVRCRYAELAFAQRPLAPVSHMVGPCAFLEGERRAPRFAPTAELFRYVQALCNMRLRQETGEETPLSEEQRQAACAVFGSVQSVTYKKLRQVLRLPAGCRFAGLSYGVAEKGNVQDPEKADVVMRTGKCCQGTACLRGILGDAYEALHEQRLDEADAARLAATGALSAPAAALLARGMAGLRLTDAVARIVSELNDLDQIRAVLALLPLAAPRIAALSQAAGEGKLGIFQGSARLSLRAMEAILPHMLACGEYAAACELAGFDPRAAQKTDVTDIRNPVVLRVFREVRRQFSAICREFGFLPGRVHVELLREVGKSGEERNRISRGLERRTKEKEAARKAVAQLLGKSPETVSAGEVQRYELWRQQDGKCAYYMLWRHAGGERAYGDAMPQGSIPPDWLADGVNAVQVDHILPRSRTFDNSFHNLCLCCHAANQAKGGRTPWEWLGAAQPQAWHDFEQWVQSLPLKGLKKRNYLLRDLNAEVQGRFHARNLTDSGYVARLTLRWLEEEYARHDVPMQDADGRTRRRFFARPGQVTDFLRRHWGVQALKKIDGQRSGDRHHALDALLVAACSEGMLQRMVRAFQREENGPERLHIPCPWQDFSATVGRALGSVFVSRVERGRTKGPLHEETLRAIREERQPDGETRRVLYERKAVARLTAADLDKIKDAARCPDVVAALRRWLDAGKPGDALPRSAHGDIIRHVRVCAGEFSSGVVLQRGSGQAQASNGGMVRTDIYSRDGKFYMVPVYAKDVADKRLPLRACVAAKAEKDWREMTADYRFLFSLTPDCYVLTENRKGEVKEGYFAGANRNTSAISLSLAHDKQNVIQGIGITTLKRFEKYRVDRFGRLSLVRREADPRGRS

SEQ ID NO: 265 - protein, 1105 aa, unidentified
  REGION 1..1105: note = Description of Unknown: Cas Enzyme sequence
MRKDWITEVSKVTDEDLILGIDLGISSCGWALIRDPEKGGGIVALGVRMFDAPETDKERTPTNQLRRTHRGLRRVLRRRRQRMRDIRQLFKAHRLIADDDRGALRIDQLDPWQLRAAALERELTPAELAVALAHIARHRGFKSNSKRAQGANAADETSEMKKQIEGNRKRLGQYRTIGEMFAKDAEYKDRKRNRDGNFDRSVLRDDQLREVRLVFDAQRHAGNSLASTELEVAFIDIAFRQLPLQDSEDRVGFCNFEAGERRAAKRSPSFELFRFLSRLTTIRLKSGRNERALTPDEVVKAAQDFGTQNGMTFKRLRGILGLDAETFDGIPKDEEGKRDIVNRTPSNGCMQGTNAIRKCLGDPLFADLSASSDQLDSVAFVITFREDLASIRHGLEDLSLGTDAVTALIRGVEDGDFSTFKGAGHLSTKACRAIIPHLAHGMTYDKACSSAGYDHSAQAETSIDQIANPIARKAFTEALKQVKEITDEYGMPSRMHIELARDVGKSQEERKKIREGIEKRNKEKDRLREHFKATVGQEPTSAEDLMRFELWREQNGRCIYTDREIHPDAIVASDRTVEVDHILPWSRSGDDSFINKTLCYASANQQKKGQTPFEWLGSDAAKWDGIVARVETNKAMKGRKKRNYLLKDATILETKFRDRNLNDTRYATRVLLNTLARKYPRDSRVHVFSRPGPLTDRLRRGWGVQGMKKTTDGERLPDDRHHALDALICAATTQSELQKLTRAFQESERAGSHRDFSKLDPPWPGFVEETKARMAEVFVSRSERQRARGEGHAATIRSIGDYERKSITDLKLADLERIKDPDRNGTIIESLRRWIEAKKPKDQLPRSPNGDVISKVSLIMRMRTRGEVQATIDASISESEGSPEVYERKSIMDLKPADLERIKDPERNRHIVESLRSWIEARKPKDQLPRSPKGDVIRKVSLITSKKIDVLVRDGAADRGDMVRVDLFTKPNKRGKLEYYLVPIYRHQVADKVDWPTPPNHAVVGNTPETDWPNMDRDYSFYASIFPMSFIEIEQKDGTIIDGYFRGLDRNTGAIGISPHYSNGGLTKGIGARTLNAFRKFSIDRLGRRFEVNKEHRTWHGKVCI

SEQ ID NO: 266 - protein, 1015 aa, unidentified
  REGION 1..1015: note = Description of Unknown: Cas Enzyme sequence
VKSLGIDLGIASCGWALIETDMAQGQIIACGVRTFDAPETDKERTPTNQLRRQFRGMRRVMRRRRQRMAQLRVLFQQHGLLREAHRDALRFPELDPWQLRVVALDKKLAPEELAIALGHIARHRGFRSNKKNQGNEAGDDGRVLKAAAANQEILSKYRSVAEMFAKDARFARRKRNRDGEYTQSVNRIDLEHEARLIFNRQRALGSNLADADFEDDFAKLAFEQKPLADSDHLVGTCPFERTEKRAAKRAYSFEVFRFLSRLNALRIGDVRQERPLTEAELAAAMEGFGSQRGMTFTRLRKVIGLADGEAFRDVPRDEEGGRDVVNRSSSNGCMQGSSILREALGEHAWKTLLARPEKLDEIAFIITFRATPESIEKGLFEAGLDPDMLHAIMAAVEKGAFAAFTGAAHISAKACRAIIPGLQRGLVYSEACAAAGYDHAARPTTDISSINNPVARRALGEALKQVKAIIAKHDKPDRIHIEMARDVGKSKEERDRISKGIEDRNKARDKLRAAFVETVGGEPSGAEDMLRFELWTEQKGRCLYTDQAIPPSAIRAKDNSVQVDHILPWSRFGDDSFINKTLCFAKANQEKKGRTPFEWLKDDPKRWAEFVACVENNKGMKGRKKRNYLLRDAAAVEEKFRSRNLNDTRYACRILMEHLARLYPDDKNRYVFARPGALTDKLRRAWGLQDLKKVLEPDGEKRKHDDRHHALDAIIVAATSESALQLLTRAFKESEDRGSHRDFADFPPPWPGFIEDVRRHFREILVSRAERGRARGEAHAATISQLKQTEDGPVIYERKAVDKLTLKDLDRVKDPDRNAALIAAVRAWIESGKPKNAPPLSPKGDPIRKIRLKTTDKPAVAVRGGNAERGEMVRVDVFRKANKRGVFEYFLVPIYPHQVADRKAWPNPPNRAARAYTPENEWPTITDDFEFLFSLSQRAFIEVEKTDGTIIAGYFMGMNRATASIAISTAHSTKKPLDGIGVQRLMRFEKHRVDRLGKLSLVPRETRTWHGVVCT

SEQ ID NO: 267 - protein, 1021 aa, unidentified
  REGION 1..1021: note = Description of Unknown: Cas Enzyme sequence
MDWGKTLKSLGIDLGIASCGWALIETDVAQGQIIACGARTFDAPETDKERTPTNQLRRQFRGMRRVMRRRRQRMAQLRMLFQENGLLTDAKRDALRFPGLDPWQLRVAALDRRLTPEELAVTLGHIARHRGFRSNKKNQGNEAGDDGRVLKAAAANQEILSKYRSVAEMFDKDDRFARRKRNRDGEYTQSVNRIDLEHEARLIFSRQRALGSAHADVHLQEKFAELAFNQNPLADSEDKVGFCPFEKKERRAAKRAYSFEVFRFLSRLNALRIGDARQERALTEAELAAAMEGFGSQRGMTFARLRKLIGLPDSEAFRDVPRDEEGGRDVVNRSAGNGCMQGSATLRAAIGEHNWKTLLQRPEKLDEIAFIITFRATPESIEKGLFEAGHDPDMTHAIMAAVEKGAFASFTGAGHVSAKACRAIIPGLQRGLVYSAACKATGFDPTARPVTEISSINNPVAKRAVFEALKQVKAIIAKHGKPDRIHIEMARDVGKSKEERDKITSGIEKRNKERNTLRAAFNDTVGGEPSGPEDMLRFELWTEQKGRCLYTDQAIPPSAIRAKDNSVQVDHILPWSRFGDDIFINKTLCFAKANQEKKGRTPFEWLKDDPERWAKFVACVETNKGMKGRKKRNYLLRDASAAEEKFRSRNLNDTRYACRILMEHLAREYFEGTKHMVVGRPGALTDKLRRAWGLQDLKKVLEPDGEKRKHDDRHHALDAIIVAAITDSAVQRLTQAFKESEDRGSHRDFADFPPPWPGFIEDVRRHFREILVSRAERGRARGEAHAATISQLKQTDDGPVIYERKAVDKLTLKDLERVKDPDRNAALIAALRAWIEAGKPKSTPPLSPKGDPIRKVRLITTDKPAVAVRGGNAERGEMVRVDVFRKANKRGVFEFFLVPIYPHQVADEKEWPAPPNRAARAAPTEDQWSEITAAHEFIFSIGPRTFLEVEKRDGTIIDGYFMGMDRATASIAISAHHSTKNVKKSIGVLGLKRFEKFRIDRLGNRHAVPQETRTWHGAVCT

SEQ ID NO: 268 - protein, 1016 aa, unidentified
  REGION 1..1016: note = Description of Unknown: Cas Enzyme sequence
VKSLGIDLGIASCGWALIETDVAQGQIIACGARTFDAPETDKERTPTNQLRRQFRGMRRVMRRRRQRMAQLRMLFQENGLLTDSKRDALRFPGLDPWQLRVAALDRRLTPEELAVTLGHIARHRGFRSNKKNQGNEAGDDGRVLKAAAANQEVLAQYRSVAEMFAKEERFARRKRNRDGEYTQSVNRIDLEHEARLIFSRQRALGSSLAGADFQEEFAKLAFDQKPLADSEHLVGTCPFEPKEKRAAKRAYGFEVFRFLSRLNALRIGDARQERALTEAELTAAMEGFGNQRGMTFARLRKLIGLADSEAFRDVPRDEEGGRDVVNRSAGNGCMQGSAILRDAVGEHAWKTLLQRPEKLDEIAFIITFRATPESIEKGLFEAGLDPDMTHAIMAAVEKGAFASFTGAGHVSAKACRAIIPGLQQGLVYSEACAAAGYDHAARPVTEIASINNPVARRALGEALKQVKAIIAAHGKPDRIHIEMARDVGKSKEERDKITSGIEKRNKERNTLRAAFNDTVGGEPSGPEDMLRFELWTEQRGWCLYTNQAIPPSAIRAKDNSVQVDHILPWSRFGDDSFINKTLCFAKANQEKKGRTPFEWLKDEPERWAKFVACVETNKGMKGRKKRNYLLRDAQAVEERFRSRNLNDTRYACRILMEHLARLYPDDKNRYVFARPGALTDRLRRGWGLQDLKKEVLEPIGEKRKHDDRHHALDAIIVAATSESALQLLTRAFKESEDRGSHRDFADFPPPWPGFIEDVRRHFREILVSRAERGRARGAAHKAGISQLKQTDDGPVIYERKAVDELTLKDLDRVKDPDRNAALIAAVRAWIEVGKPKNAPPLSPKGDPIRKIRLITTDKPAVAVRGGNAERGEMVRVDVFRKANKRGVFEYFLVPIYPHQVADQKEWPAPPNRAARAATAEESWPDVTAEHEFIFSIGPRTFLEVEKRDGTFIDGYFMSMDRSTASITISIHHSTKNIKKSIGVLSLKRFEKFRIDRLGNRHAVPRETRTWHGVVCT

SEQ ID NO: 269 - protein, 1007 aa, unidentified
  REGION 1..1007: note = Description of Unknown: Cas Enzyme sequence
MNASFTTLGIDLGIGSCGWAYIRETEDKGEIVGLGVRTFDVPETAKERTPTNQLRRQFRGLRRVLRRRRQRMNALRVLLAQHGLLSDDARDALYSASHSPWQLRAAGLDRRLSPLEFALVLGHIAKHSGFRSNSKRDRGANAPKDSSDMLKVIEATRQRLADYRTVGEMFARDPDYAGRKRNRDGDYSRSILRQDQEREITLLFEWQQQLGNQLASHELEAAYAEIAFSQRPLADSEHMVGACGFEPNEKRAARFSYSFELFRFLARLTQIRIAEQPLSAEDIRIAIKDFGAKTGLSFKQLRKQLGLPDGARFDGVAPENEGQDVISRHGKPFMGTATLRSVLGPAWASMLAMPEKLDAIAFILTFREDINSIRTGLEQLGLEAVILDALMVGVEDGSFARFKGAGHISAKACRAIIPFMAQGLVYSDACAKAGYDHAARPVEDLDSIANPVARKALREAVKQIKAVVTEYGVPDFFHIELARDVGKSQEEREEIRFGIEKRNKEKDRLREKFKDDVGREPNSGEDLLRYELWKEQNGRCLYSDEYIDPNWIVASDNRVQVDHILPWSRSGDDSFINKTLCLAKANQEKKGQTPYEWFGKNEARWEKFTQGVESIKAMKGRKKRNYLLKDATLLEEKFRPRNLGDTRYATRLLLNLLKTIYPDSTVRARPGALTDRLRRGWGMQGKKKDADGKRIEDDRHHALDALIVATIGEAALQRLTKAFQEAERKGDHRSFTNLVPPWEGFRQEAEGKLRETFVSRAERRRARGAGHEATIRQIIATDDGDRVSERKSVEKLTEADLGRVKDAERNTALIDSLRAWIAAGKPKGSAPLSPKGDPIRKVRLISNGKPAVQVRGGAADRGEIVRVDVFRKANRKGKFEFYLVPIYPHQVADEKTWPKPPNQAIVAYKDEVDWPEMTPDYEFMWSLNPFCFVELEKADGTFIDGYFRGVDRTTGAIGLSPHETRSTSSRGIGVKSLTRLSKWQIDRLGRRFEIKQEIRTWHGVACT

SEQ ID NO: 270 - protein, 1020 aa, unidentified
  REGION 1..1020: note = Description of Unknown: Cas Enzyme sequence
MAILERRRFGIDLGIGSCGWAVVDMPYGGTSGAIVAMGSWLFDVPETAKERTPTNQIRRIMRGMRRVLGRRRQRMNGIRALLKRHGLIDSDAKSVFHAAGLDPWAMRAEGLDRRLTPLEFAVALAHIAKHRGFRSNSKRDRANAPADETSKMKSAIEATRLKFAAYRTAGEAFAKDPAFAGRKRNRDGDFTRSILRDDQAREVAILFDRQRRLGNTFASAELEAAYGPLAFDQRPMADSEDKVGFCPFEPGERRAAKHSYAYEMFRFLSRLSALRVGRGERALTPEEIVAAEKDFGTQQSMTFKRLRKLIGLDEAELFQGVPAAEEGKRDVVARSGKMCPGTAALKDVAGAAWGSLLATPARLDRIAAVLSFRESIGSIRAGLIEAGVETPLLEAILGGVENGTLSKFSGAGHISAKAARNLIPHLARGLVYSDACTAAGYVHTTQTEIVVTAIGNPIARKALSQALKQIKVMVERFGLPGAIHIELARDVGKSAEERDEITRGIEKRNKDKDKLREAFAETIGRPPSGADELLRYELWHEQGGRCIYTDAPIPVGAITSGDNAVQVDHILPWSRSGDDSFVNKTLCSARANQAKKGRTPFEWFSQENPGGWDGFVARVESLKSAKGRKKRNYLLKDASVLEKRFRERNLNDTRYACRLLAQAAAALFPAEATKDTRRVFARPGALTDRLRRAWNLQGFKKDPKGERIPDDRHHALDALITAACDEATLQRLTKSFQAAEAAGAPRDFTKFDPPWPGFRAEFDANYAKIFVARSERRRARGEAHAATIKSVETIDGAPIVFERKAVDKLSLKDLERIDSPERNAKLIENLRTWIEAGRQKGTKPLSPKGDPISKIRLRTTDNIAVPVRGGTADRGDMVRVDVFTKPDKKGKKQYFVVPIYPHQVADREKYPVPPGKAIQANTPELEWPDITAEHEFQFSLYPLSLVELVKPDGEIIQGYFRGMSRNTGAFVVSMPNSGIDLRQGIGARTLLSIRKFAIDRFGDRHEIPREVRTWHGAVCT

SEQ ID NO: 271 - protein, 1038 aa, unidentified
  REGION 1..1038: note = Description of Unknown: Cas Enzyme sequence
MIKENLSLGIDLGIASCGWALIDWPDINTPGTISGMGSWCFDVPETSKERTPTNQIRRANRLLRRVIRRRRTRMSELRKLFEQQKLIATRDPEHLKKQKLDPWELRARGLDKLLTGEEFATALLHIAKRRGFKSNAKRDAGANDASDDGKVLKALALTTEKLARSRYRTAGEMFARDPEFALRRRNRPGDYSRVIKRDELAHEMRKLFDAQQRLGSKYATPDFQKLYEDITFFQRPFQDSESLVGPCPFEPAEKRAAKYAPSFEQFRFLSKLINVRVSAPHEAPRALNDAERSRACTIAGKTQTVTWKALRKAMALPDDVRCVGVKLEDEKHDFGARTGESFHGMVKLRECLGENIPLALLDAIAFILTFRETPESIEKGLREAGVKEADIDGLMTNLAEGKFAKFKGAAHISALAARNLLPHLEAGLGYDKACAQAGYNHSQSRFSGYEQVKDRAAFKALLAELQESIANPIARKSMTESMKQVWALVNTFGLPGRIHIELARDVGKSTEERDEISKGIEKRTKDKEKLREELKGCLGVDRVSGDDLLRYELWKQQGGRCLYTDNEIHITQVRASDNSVQIDHILPWSRFGDDSFHNKTLCLASANQHKRNMTPFEWMGDNPDRWEKFSASVESNKNLKGLKKRNYLLRNAKEVEEKFRSRNLNDTRYATKILLEAVKLLYPQDRRHDCVRARPGPLTAALRKAWGIEGMKKTDGKRIANDQHHALDALVVAATSEGELNKLTISYQQSEARGEARSLGHVPEPWPGFRDDAIKGMNSVFVARPERRRARGEGHAATIKQVRASDGKVYARKAVDKNLRLEDLDKVKDAERNRATVESLRTWIEAGHPKDAPPLSPKGDVIRNIRMLTKDKPAVAVRGGTADRGEMVRVDLFSKPNKKGKMEYYMVPIYPHQVMDKRDYPAPPNQAIVGGKPESEWPVMTNDYEFLFSLYPRCWIEIVDAKGVIKEGYFKGVDRFTGAINLGLHLDVRDMKAGRGIGVKTLSSINKFAVDRLGRRSRIAREVRTWHGEVCISAVPPG

SEQ ID NO: 272 - protein, 1033 aa, unidentified
  REGION 1..1033: note = Description of Unknown: Cas Enzyme sequence
MIKENLSLGIDLGIASCGWALIDWPDTDAPGTISGMGSWCFDVPETSKERTPTNQIRRANRLLRRVLRRRRTRMSELRKLFEQQKLIAARDPEHLRKQKLDPWEVRARGLDKILTGEEFAAALLHIAKRRGFKSNAKRDAGANDASDDGKVLKALALTTERLARYRTAGEMFARDPEFALRRRNRPGDYSRVMKRDELAHEVRKLFDAQQRLGNKYATPEIQAQYEDIAFFQRPFQDSEALVGHCPFEPAEKRAAKYAPSFEQFRFISKLINVRVSAPREAPRPLTAEERALALAIAGKTQTLTWKALRKVMAIPEDTRFVGVKLEDEKHDFGARTGESFHGTVKLRECLGENALPALLDTIAFILTFRETPESIEAGLRDVNVNGADIGRLMSGLAEGKFAKFKGAAHISALAARNLLPHLRDGLGYSEACAAVGYNHSASKFSGYEQVKDRAGFKALLADLQDSIANPIARKSMTESMKQVWALVNTYGLPGRIHIELARDVGKSTEERDEISKGIDKRTRDKEKLREELKALLDIERVSGDDLLRYELWKQQGGRCLYTDREIHITQTRASDNSVQVDHILPWSRFGDDSFHNKTLCLASANQHKRNMTPFEWMGDDLDRWEKFSASVESNKNLKGLKKRNYLLRNAKEVEEKFRSRNLNDTRYATKVLLEAVKLLYPQERRHDCVRARPGPLTAALRQAWGIEGMKKTDGKRIADDRHHALDALVVAATSEGELNKLTKVYQQSEARGEARSLGHVPEPWTGFRDDAIKGMNAVFVARPERRRARGKGHDATIKQVRESDGKVYARKAVDKNLKLEDMDKVKDAERNRATVESLRTWIEAGHPKDAPPLSPKGDVIRNIRMLTKDKPAIAVRGGSADRGEMVRVDLFSKPNKKGKAEYYMVPIYPHQVMDKRKYPIPPNHAVVKKKPESEWPEMNVAYTFLFSLYPRSWVETVDADGEVKQGYFMGCDRSENRIGIGNHCDTSTFNRVGVKTLSSINKFAVDRLGRRFRIAREVRTWHGEVCISAVPPG

SEQ ID NO: 273 - protein, 1037 aa, unidentified
  REGION 1..1037: note = Description of Unknown: Cas Enzyme sequence
MINENLALGVDLGIASCGWALIDWPNTDTPGAILGMGSWCFDVPETDKERTPTNQIRRANRLLRRVIRRRRTRMSEIRSLLEECKLIPSRDPEHLKQQKLNPWELRARGLDKALSGEEFAAALLHIAKRRGFKSNAKRDPGSNTASEDGKVLKALEQTKERLARYRTAGEMFARDPEFAERRRNRPGDYSRVMLRDELAHEVRKLFEAQQRLGNSFATGALQEKYEAITFFQRPIQDSEFLVGSCPFEKAKKRAAKHAPSFELFRFLSKLINVRVSEPRAAPRALTDEERDRAANMAGKNAKLTWKALRKAMALPDTVNFVGVKTEEEGKYDFGARTGESFHGTVRLRECLGEHTPLPLLDAAAAIITFRETLESIEKGLREAGISDTDIDRLMTGLMEGKFAKFKGAAHISALAARNLLPHLEAGLGYDKACAAVGYNHSASQFSGYEQVKDKAGFKALLAELQDAVNNPVARKSMTEAMKQIWALINHFGLPGRIHIELARDVGKSKEERDEISKGIDARTKDKEKLRDELKVLLGVERVSGDDLLRYELWKQQGGRCLYTDTEIHIRQVRATDNSIQVDHILPWSRFGDDSFHNKTLCMASANQHKRNMTPFEWFGGEPEKWEKFQTIVEGNKALKGLKKRNYLLRNAADVEAKFRTRNLNDTRYATRILLETVKLFYPQERRYDCVRARPGPLTAALRKAWGLEALKKTDGKRIADDRHHALDALVVAVTTEGELNKLTKTYQQSEARGEARSLGNVAEPWDGFRNDASRAMNAVFVARPERRRARGEGHAATIKQVRSNGDGEQVYTRKAVDKKLKLEDLDKVKDAERNRATVESLRAWIEAGHPKDAPPKSPKGDVIRNIRVLTKDKPGVAVRGGTADRGEMVRVDLFTKPNKKGKPEFYIVPIYPHQVMDKRKYSAPPNQAIVAYKPESEWPEMTYDYEFLFSLYPRSWVEVVYATGEVKQGYFMGCNRALGAMNLGNSKDVRSGYNNIGVKTLSTINKFAVDRLGRRSRIAREVRTWHGEVCISANPPG

SEQ ID NO: 274 - protein, 1057 aa, unidentified
  REGION 1..1057: note = Description of Unknown: Cas Enzyme sequence
MINEKLTFGIDLGIGSCGWAVLQHPSAYGDVGKIVSLGSWCFDVPETSKERTPTNQVRRGNRLLRRVIRRRRQRMAEIRHLFHTTGLLSSNDRDVLKRPGLNPWELRARGLDEPLTPIEFSLALGHIAKRRGFKSAAKRKVENSSGDDKKMLAALNKTKERLARYRTVGEMFARDPDFTFRRRNRNGLFDRTCDREDLIHEVSRLFAAQRRLGQNFASPELEGDFKTTAFRQLPMQDSERLVGSCPFEPDEKRSAKLAPSYERFRLLTRLINLRIKTVNGERPLTSEELAKVTADIGKTAKLSARQVRKLINLAKNESFTNIKQEDEDRDIVARTGEAMPGTAALRKSFGETLWATMRHHAEQLDAIAHVLSFFETNKTIVQKLGDMGLEPEVDNALREGLGSGSFSRFKGAGHISAKACRTLLPHLEKGYRYDKACQLAGYNHAASSLTYRDQILNKTQFNELVKDMGENIANPIARKALTEGLKQLWAMRNCYGLPGAIHIELARDVGNSLEKRRELENQLDKITAQRKRERTEVQGLLNLTEVNGDTLLRYRLWKEQGGKCFYSGNNINIKQVVAADNSVQVDHILPWSRFADDSFNNKTLSLADENQRKKGRTPHEWFQREKSPEEWQTFVQRIETNKELRGFKKRNFLLKNAEDAEKKFRNRNLNDTRYATRLIAEAAKLLYPAGERQEKDGKRRIFTRPGALTAALRHAWGLESLKKVNGKRVRDDRHHALDALTVAAVHEGEIQRLTKSFQEWEQQGLGRLLRYVEQPWPGFRADVLKAYEKIFVVRPERRRARGEGHKATIRQVKKRDNSLVVFERRAVTEIKQSVVEAQKKKKIYQYQIKDPERNKKIDDEIKRWVNDGCPTDMPPRSPHGDVISKVRLESRDKPAIFVRGGTAGRGEIVRVDVFTKPNKRGKDEWYLVPIYPHQVMNKKVWPKPPDRSVVANKDEKEWTQINTEHKFCFSLYPRSYVEVTKKTGEVISGYFSAFNRATGAIDLASANNPANSTKGIGAKTLLKIKKYNVDRFGTRSEIKGEIRTWHGEACTSLKRPD

SEQ ID NO: 275 - protein, 1081 aa, unidentified
  REGION 1..1081: note = Description of Unknown: Cas Enzyme sequence
MRVLGLDGGIASIGWAFIEIEENNDGKSARGGIIDAGTWMFDAPEEKSQTGTKLKSELRRTFRGQRRVIRRRRQRMNEVRRILHRHSLLPSAERDALKQPGLDPWKIRAEALDRLLSPVELAVALGHIARHRGFKSNSKGAKSTDAADDDSKKMKKAAASTQEKLARFETPARMMCEDESFLVPGTDVRRFRNREGDYSRSLMRDDLAAEVRALFRAQRRLQADHATKELEDEYMDETRENGAFHQRPLQDSEKLVGPCPFEPEEKRSPKRGYSFELFRFLSRLNHLTLREGREERTLTVDEIRTAAADFGVTAKFTFAALRKKLRLPETTVFVGVKTNEEKNDVVARSSEAAAGTARLRRIIVDALGELAWGALVNAPERLDKIAEIITFRNDLDRIREGLQAAGFYAALIEALVKAAGNGALDAFTGAGHISAKAARNIIPGLYKGLTYDKACAQAGYDHTASRERNAFDVGVHGKEALKKILQEERISRELVGSPTARKALIEAVKQIKAVIEKYGVPDRVHVELARDVGKSIDERREIHFGIEKRNKQKDKLRELFEREVGRAPQDGDRGKEELLRFELWNEQKGRCLYSDAYISPTQLVASDNSVQVDHILPWSRFGDDSFLNKTLCTAKANQEKKGRTPYEWFKTDKTEADWDAFVARVESIQYMKGFKKRNYKLKTAEEAAEKFRNRNLNDTRWTCRLLAEALKQLYPANEKNAKDEGVRRIFARPGALTDRLRRAWGLQWFKKNEKGERIPDDRHHALDAIIVAATTESLLQRATREVQEIERKKAHYDPAKNGYDLMKNITAPWPDFREQALEAVEKVFVARAERRRARGKAHDATIRHIATRDGEQKAYERKKVADLKLSDLERVKDADRNAALVESLRKWIAADKPKDNPPLSPKGDPISKVRLVTKNKVNISLDTGNPDRLATVDRGEMARVDVFRKANKKGKYEYYLVPIYPHEIATMDVPPTRAVQGGGDDDKWPEIDSTFEFLWSINQLSLLEITKPDGEVIRSYFRSLDRNTGALTVSDISNSTATRKGIGTRTLLVFKKLHLDRLGRIFEVERELRTWRGKVCT

SEQ ID NO: 276 - protein, 1041 aa, unidentified
  REGION 1..1041: note = Description of Unknown: Cas Enzyme sequence
MTRILGLDVGIASCGWAVLEMNGESGGIVAAGARCFDPPLVAKTGEPKSAGRRTARGQRRVIHRRRLRMNRVRELLTRHGALPAADRDALAEVARRLAEASGEGGASPWRLRAAAHDRALSDDELAVALGHIARHRGFRSNSKREAGANAPDETSKMKKAMEQTREGLAKYRAFGEMIASDPKFAERKRNRDKDYSHTPKRSDLEDETRAIFSAQRRFGQQTANDALERDFAELAFSQRPLQDSETMLGDCPFEPGEKRTAKQAPSFELFRFLSRLVTLRLTTGRTERPPSADEIARASRDFGQATKGVTFTALRRKLDLDPNTRFAGVPADREKYDVATRKGEAAAGTHALRQALGEAPWASLMRTPEKLDRIAEVLSFREDFARIADGLREIGLDPLVSEQLLDATRAGAFSHFGGAAHISAKAARAIIPGLREGLDYSEACARVGYDHAARPSGALKDINSPVARRAFLESIKQVRAILRAFGPIDEVNVELARAVGKSAEERAKLTQGIEDRNKEKDKRAKEASELLGATVSADELLRYELCKEQNFKCVYCDAEIAPNGFSANDTRYQVDHILPWSRFGDDSYRNKTLCCVACNQHKRGRTPSEWFDDDKTSDEWDAFAARVEGFKEMKGLKKRNFKLKDVDKEVEDKFKARNLTDTQWATRLLADELKRIFPSKGDERRVYTRPGAITSKLRRAWGLEGQKKVDGVRVADDRHHAIDAVVLAATTEGLLQWMTKQVQQREREGRGDDIFHVAPPWRGFREDSIRVIYGEGGVGGVFVSRAERPRARGKAHDATIRQIREIDGEDVVFERKAIEKLTPADLDRIPVPAPYGAIVDPAKLRDATVAALRAWIAEGKPKGEDKLPRSPKGDIIRKVRVEAKNKVGIRLNGGAVDRGEMARVDVFRKANKKGVWQYYLVPIYPHEIATMDAPPMQAVQGGADEIEWPLMDSSFEFLWSINQMGLLELTKTDGETIRSYFRSLDRNTGAITVSDVSDSTATRKGIGTRTLLVFRKLQVDRLGSVSEVQRELRTWHGKGCI

SEQ ID NO: 277 - protein, 1041 aa, unidentified
  REGION 1..1041: note = Description of Unknown: Cas Enzyme sequence
MTRILGLDVGIASCGWAVLEMNGESAGILAAGARCFDPPLVPKTGEPKSAGRRTARGQRRVIHRRRLRMNRVRELLTRHGALPVAERDALAEAARRLAETSPDGRASPWRLRAAAHDRALSNDELAVVLGHIARHRGFRSNSKREAGANAPDETSKMKKAMEQTREGLAKYRAFGEMIASDPKFAERKRNRDKDYSHTPKRSDLEDETRAIFAAQRRFGQRAASDALESDFADLAFSQRPLQDSETLLGDCPFEPGEKRTSKQAPSFELFRFLSRLVTLRLTTGRMDRALSADEIARASRDFGQATKGVTFTALRRKLDLDPNARFAGVPADREKNDVAARKGEAAAGTHALRQALGEAPWASLMRTPEKLDRIAEVLSFREDFARIAEGLREIGLDPLVCERLLDATRDGAFSQFGGAAHISAKAARAIIPGLREGLDYSEACARVGYDHAARPIVALKDINSPVARRAFLESIKQVRAILRAFGPIDEVNIELARAVGKSAEERAKLTQGIEDRNKEKDRRAREASDLLGATVSADELLRYELCKEQNFKCVYCDAGIAPDGFSANDARYQVDHILPWSRFGDDSYRNKTLCCVACNQHKRGRTPSEWFDEDKTPGEWEAFAARVEGFKEMKGLKKRNFKLKDAAAVEDKFKARNLTDTQWATRLLADELKRMFPSKGDERRVFTRPGAITSKLRRAWGLEGQKKVDGARVADDRHHAIDAIVLAATTEGLLQWMTGQVQQREREGRGDDIFHVAQPWRGFREDSIRAIYGEGGVGGVFVSRAERPRARGKAHDATIRQVREIDGEAVVFERKAIEKLTEADLDKIPVPAPYGAVVDPMKLRDATVAALRAWIAAGKPKGEDKLPRSPKGDIIRKVRVESKNKVGIRLNGGAVDRGEMARVDVFRKANKKGVWQYYLVPIYPHEIATMDAPPMRAVVAYKDEGDWAVMDSTFEFLWSIESMVFLQAVKTSGEIVDGYFRGLHRGTGAVALSSHKNSEEVATGIGVKTLASFKKYRIDRLGLSRTEVTREVRTWHGKACT

SEQ ID NO: 278 - protein, 1037 aa, unidentified
  REGION 1..1037: note = Description of Unknown: Cas Enzyme sequence
MSESVIRRILGIDLGIASCGWGIIEVCEDAGKVIAAGVRCFDAPLIDKTGEPKSAARRVARGQRRVIRRRRQRMNLIRRLIVEYGLLPDNSPDALHHALLRIQPSVAGSQVTPWILRADAHKRLLTNDELAVVLGHIARHRGFRSNSKSEAGANAADETSKMKKAMEATREGLAQFHSFGDMIANDPKFADRKRNRANDYSHTAKRSDLEDEVRVIFRAQRRLGSAVATEQFEQSFADAAFFQRPLQDSEDKVGECPFEPGEMRTTRRAPSFELFRFLSRLAHLRLSVGRFERALTCDEIAKAAKSFGEQKSITFKTLRKLLDLDTNARFAGVAPEKEGTDVAARMGGAAVGTYVLRSVLGDAPWQSLQRSPENLDRIAEILSFREDLNSIRKGLGEIDLDPAVVDRLMQAVADGEFKDFTKAAHISSLAARNIIPGLRQALVYSEACTRVGYDHAARPSVSLEQIGSPVTRKAFAEAIKQVRAITHEHGPIDVVHVELARSVGKSAEERKAIQTGIEQRNVEKEKCRKEAEELLGRHPSDDELLRYELAKEQNFKCIYSGDPIAPDGIKANDTRYQIDHILPWSRFGDNSYLNKTLCCTKSNQDKRGRTPFEWFDAEKTEQEWMEYVARVENLKEVKARKKRNYCIKDAADFEDKFKARNLTDTQWATRLLAAELKRIFPFSVSTRPGTITSTLRRAWGLEGLKKEAGKRVEDDRHHAVDALVLAATTDSLLNRLTKEIQKREREGRQDDVFHCAQPWPGFRIGVQETIYGSASTPGIFVSRAERHRARGKAHDATVRQIREIDGETIVFERRPVEKLTEKDLDKIPVPKPYGNVADPKKLRDDLVENIRLWIAAGKPKDKPPRSPKGDVIRKVRIRTTDKVAVELNGGTVDRGDMARVDVFRKKNKKGAWEFYVVPIYPHQIVTLDTPPNRAVVAAKAETDWTSVDRSFEFAWSLNSMSYLELTKSNGELIEGYFRGMDRTTGAVTLSPMETNSKTIRGIGVKTLSCFRKFTIDRLGRKFEISREVRTWRGEACT

SEQ ID NO: 279 - protein, 1025 aa, unidentified
  REGION 1..1025: note = Description of Unknown: Cas Enzyme sequence
MRIFGIDGGIASIGWAVLDLEGEELTVVGTGVRMFDAPETDRERTPTNAIRRLHRGQRRVLRRRRQRMAEIRQLFRQDGLLATGERDALKQPGRDPWRLRAEGLERTLSGLELAVALGHIARHRGFRSNAKRDHSSNAANDTSKMKKAIEATRERLGQWQTVGQMFACDPAYSEQKHNRGQDYSRSILRRDHEDEVRALFSAQRRFGNPLATEALQEVYADKAFSQRPLADSEHMVQRCPFETGEIRTARRSYAFEMFRLLSRAANLRLVSGGQEWKLSADQIERIASDFGRQKNITFRGVRKLLDLDPRTRFAGVSEKDETRDIVARSGGAAEGTKALRDAVGDAGWRALMHHPLQRDRIAEVLTFRENPTSIREGLEAAEIETPILDAIMDGVANGTFAAFNGAGHISAKAARTLLPPLKRGLMYSEACAEVGYDHAARPEVNLEDIRNPVARKALTEMLKQVRALVIEYGRPEFIHIELAREIGKSVEERDKIAKGIEDRNKVRDRLRAELADILPNHRPTTEDLLRYELWKEQGGRCLYSDDPIEPTWIAADDNRVQVDHILPWSRFGDDSFANKTLCTARANQAKRGRTPFEWFSEDKSEPDWAAFAARVEGCKELKARKKTGFYLRRNAKEVEERFRNRNLGDTRYATRLLLDLLARQYPADGRRHVLARPGPLTAKLRRAWGVEDMKKGPDGKRLDDDRHHALDAIVVAATTEAMLQALTRAAQEAERRGGPRGFDFAHIPCPAGFRETARAVVGDVFVSRPERRRVRGEAHAATIKQVRQVNGSTVVFERKAVEKLTLADLETIPVPSPYGNVGDPAKLRDELVASVRQWIEAGRPKDNLPRSPKGDLIRKVRVATKDKLAVPIRGGTADRGEMARVDVFAKANRRGRNEYFLVPIYPHQVADRRGYPRPPDRAVVASKPESEWTLIDASHQFRFCLYQNSLVEVTTSDGEVVRGYFKGLDRSTGAISLAASNTPTKLRRGIGARTLRGFQKLSVDRVGRISVVGSEGRTWHGEACT

SEQ ID NO: 280 - protein, 1079 aa, unidentified
  REGION 1..1079: note = Description of Unknown: Cas Enzyme sequence
MRVLGLDGGIASIGWALIEFEENDGSKSAHGNIIDAGTWMFDAPEEKSQAGTKLKSELRRTFRGQRRVVRRRRQRMNEVRRILHCHGLLQSSDRDALKQPGLDPWHIRAEALDRLLEPVELAVALGHIARHRGFKSNSKGAKTNDPADDTSKMKKAVNDTREKLARFGSAAKMLVEDESFVLRQTPTKNGTSEIVRRFRNREGDYSRSLLRDDLAAEVRALFAAQARLQSAIATADLETAFTKAAFFQRPLQDSEKLVGPCPFEPAEKRAPKRGYSFELFRFHSRLNHMTLRDGKEERTLTPDERARAATDFGATMQITFAALRKKMKLPETTVFVGVKPDEESHLDFVTRTRSGKAAEGTARLRSVIVDALGELAWGPLLGSPEKLDKIAEIITFRSDLGRIREGLAQAGFDAPLVDALVAAAADGRLDPFTGAGHISSKAARNILPALRQGKTYDKACCTAGYDHTASRERNAFDVGVHGKDALKRILQEERISRELVGSPTARKALIEAVKQIKAIVEKYGVPDRIHVELARDVGKSIEERVEITRGIEKRNRQKDKLRALFEKEVGRPPQDGERGKEELLRFELWNEQMGRCLYTDDYISPAQLVATDNSVQVDHILPWSRFADDSYANKTLCTAKANQDKKGRTPYEWFKAEKTDAEWDAFIARVEAIPYMKGFKKRNYRLNNAEEAAERFRNRNLNDTRWTCRLLAEALKQLYPEGEKDKEGKERRRVFTRPGALTDRLRRAWGLQWVKKNAKGDRIPDDRHHALDAIVIAATTESLLQRATREVQEIEDKGLHYDLAKNVTQPWPGFREQALEAVEKVFVARAERRRARGKAHDATIRHIAVRDGEQRVYERKKVTDLKLSDLERVKDAERNAPLIESLRMWIEADKPKDDPPLSPKGDPIFKVRLVTKNKVSITMDTGNPDRLATVDRGDMARVDVFCKTGPKGSRLFRFVPIYPHQIARLASPPHHAVTRGKNSTEWEPMDETWQFCWSLNPFCYVQLIDEAGVARVGYFRRLNINDACIILSEHNDATAESGKIGTRKLLDFKKFTIDRFGYPSEVPREMRTWRGKVCT

SEQ ID NO: 281 - protein, 1049 aa, unidentified
  REGION 1..1049: note = Description of Unknown: Cas Enzyme sequence
MGKRILGIDLGIASCGWGIIEVGEPDGKINAAGVRCFDAPLVDKTGEPKSAQRRAARGARRVIRRRRRRMNLVRKLLHTNGLLPDSTTEALHEAMRRVSPKGAHPPITPWTLRAVVHDRLLTNDELSVVLGHIARHRGFRSNSKSEAGANAVDETSKMKKAMEQTRDRLMGRTFGQMMATDERFVDRKRNRDKDYSHTAKRSDLEDEVRKIVSAQRHFGNAVATDDLANTFSEAAFTQRPLQDSEKLVGKCLFEPDQLRTARRAPSFELFRFLQRLAHLRISVGRVERPLTQEEIALASKGFGETKKTITFGSLRETLDLDPNARFAGVPKDKESKLDVAARTGGAAYGTKTLKDALGDAPWQSLIKTPEKLDRIAEVLSFREDMDSIRKGLNEIGLDAVIVQCLLDAAAKGDFKDFTRAAHISALACRNIIPGLREGLVYSDACAQVGYDHTARPSIQLTEIGSPVTRKAFGEAIKQIRTVAREYGPIDLVHIELARDVGKSAEERREIQDGIEKRTAEKEKRRKEAAEHLGRASSDDELLRYELAKEQNFKCIYSGDPIEPAGIAANDMRYQVDHILPWSRFGDDSYINKTLCTTKANQDKRGRTPFEWFEVDKTEAEWMEYVARVEALKEVKGRKKRNYTLKDAASVEEKFKARNLTDTQWATRLLADELKRMFPPRPEKRAPDGTDERRVYTRPGAITSKLRRAWGLEGLKKVDGERVPDDRHHAVDALVLAATTESLLQKMTKEVQQREKEGRQDDIFHVQQPWPGFRIDVKRAVQGEDGSGGVFVSRAERRRARGKAHDATIKQIREIDGEKIVFERKAIEKLTEKDLEKIPVPEPHGKVADPKKLRDDMVEALRKWIADGKPKGEDKLPRSPKGDIIRKVRVETKDKVAVELSGGTVDRGDMARVDVFRKKNKKDKWEFYVVPIYPHQIATMEAPPDLAVTAAKPESDWPKMDQSFEFAWSLGNMDYVEAIKSGGEVIEGYFRGLDRATGAIGISPHLTNTEVAKGIGARTLHSFKKFTIDRLGRKFEVSREVRTWRGKACT

SEQ ID NO: 282 - protein, 1095 aa, unidentified
  REGION 1..1095: note = Description of Unknown: Cas Enzyme sequence
MGERQRILGIDLGIASCGWAIIEFDGNIWRIVHVGVWEWDAPEYIDKGKTRKSNLKERGVTRRRRRLLDVRQKRMHDLRQLLAEYNILKRTDRNALHFPKLNPWRLRKEALERKLSAEEWAVVLGHMAGHRAYWSNAKRKKNETDDDRKKLLKALKENEREFETARMERTARTVGEWLANKDTQRNRSGDFRHSIKREWVKQEAALLFKRQHELGNPFALSSLCDRYAPLAFEQGAITPPEIGPCTFEPHEPRAAKHSYSFEQFRLLQRLTNIRIISAPDVPPRSLTEAEIEKIESKLGIQAKITYTTIRRALKLPDKESFARINDAEQEEHEIVTGSKSGQTAPGTRALQTVIMTNFGAREWESLIAKPDALDAIASAIAHRDDLELIRTELEKLDIKPAVIETLAKQSDGGDLGFFKGTGHLSVKALRKLIPHLFAGRDYHNAQIAAGYDPSKDRYSRRPGIVGEGPQAVAAWLKKDQLEELIRNQVVSRAVREVFKQVLALWRAEGPFDAVHLEMARDVGRSAAERDKIDADNIKRRDRRNALRNAFIENFKKNPSDREFERWTLWTEQKGKCPYTPFKDAHIPCDAVVDGDDRVERDHILPGSRFGLESLDNKVLCLTGANRDKSSFTPYQWMSKNLGKLSWDDFCNQARVIFKDNPRKLDNLLIIDTTKLEKSLSSRALNDTRWISKFLLAGFEKLGTTDHPLRVQPVNAALVGTLRWAWGLAGWKHDPKNRSKRQSDDRHHAIDAAIVATIDAGLVNRLTRAYQRAEQRGEYFEARGFKPPWDTFREELLNQLYGDGAAKARPSEFTPDSTIGVLVSRGERRRARGQMHKETIYSLTSVNGTAADTTRRVKIERKAVDDRLTLDDLSLLKNADRNYKLADLLRSWIEKGHPADEQPVWKYKLSDGTERYEPIRSVSLVTSDSPAISPKRLRRKGDDKEVAFAAVDRIEMVRIDVFENGDADADARYLFVPIYVHQTVDPKPPDRAFKRDRPYIDWPITRSNDNFLFSIYKFSLVEIKTDRKKPLLGYYRGFDVDDGRIKLTPQYSRDEKLSDRFSPTTISSIRKFTVDRLGRKFPVSREVRTWRGKACT

SEQ ID NO: 283 - protein, 1047 aa, unidentified
  REGION 1..1047: note = Description of Unknown: Cas Enzyme sequence
VRILGVDLGIASCGWGVIDTSESDGNIVAVGVRTFDAPLVDKTGEPKSAQRRAARGQRRVIRRRRQRMNAVRRLLHQNGLLPDASPNALHDALRRVSSHGTHPPLTPWALRAAAYQRALTNDELAVVLGHIARHRGFKSNSKSEGNTNVADETSKMKKAMEATREGLAKYRSFGEMLAIDEKFKNRKRNRDKDYSHTAKRSDLEAEVRAIFAAQHRLGNPAATETMAASFADIAFFQRPLQDSEMLVGRCPFEPGQMRTARRAPSFELFRYLSRLAHLRISVGRAERPLTSDEIALAAKGFGETKKTFTFASLRETLDLDPNARFADIAKDKESKLDVASRKGGAAYGTKTLRDVLGDAPWQSLARIPERLDRVAEILSFREDLDSISKGLDEIGLDDGVIKCLIDAAANGAFKEFTKAAHLSARACRNIIPGLREGLAYSDACARAGYDHTARAAVSLDSINSPVTRKAFGEAIKQIRAVAREYGPFDFVHIELARDVGKSADERAELTKGLEKRTAEKERRRSEAAELLGRPVTDDELLRYELAKEQGWKCIYSGDSVDPKGFAANETRYQIDHILPWSRFGDDSYLNKTLCTTKANQDKSGRTPFEWFEADKTEADWALYVARVESLKEVKGRKKRNYMLKATDIEEGFKARNLTDTQWVTRLLAEEFKRMFPPRPEKRAPDGTDERRVFTRPGAITSKLRRAWGLEGLKKVDGERRPDDRHHGVDALVLAATSESLLNRLTREVQKREREGRQDDIFHVRQPWPGFRIDVERAVYGENGNGGIFVSRAERRRARGKAHDATIKQIREMNGEEIVYERKPVEKLTEKDLTLIPVPEPYGKAADPGKLRDEMVEALRAWIAAGKPKDKPPRSSKGDVIRKVRVATKDNVAVKINGGTVDRGDMARVDVFRKKNKKGKWEFYSIPIYPHQIAAMEMPPCRAVVAYKPDEEWTPIDSSFEFLWSLNAMSYVEITKSNGEFIEGYFRGLHRGTGAANISKHWTLEKAGASDGIGIKTLADFRKLTIDRLGRKFEVSREVRTWRGKACT

SEQ ID NO: 284 - protein, 995 aa, unidentified
  REGION 1..995: note = Description of Unknown: Cas Enzyme sequence
MFDAPETAKERTPTAAVRRLHRGQRRVIRRRRQRMTDLRNLFHTSGLLVDSSKDALAQKRGEQQSPDPWTLRADGLQRALNGTEFARALGHIARHRGFRSNAKRDAAANAADETSKMKMGIATTKERLAQYRTIGELFARHPDYKGRKHNRGLNFDRSILRSDQEHETRILFAEQRRLGNALATKALEDDFARIAFTQRPLQDSEHMLADCPFEQGQKRTARRGYAFEKFRLLSRLAAIRLTERGKDWPLTPEQIGKAAEDFGFQKKLTWRWLRKTLDIHPSVRFAGISEKDEIHDFVARTGSAAEGTYTLRLALGADGWRRLMEAPERRDRIAEILTFREDPATIRRGLEEAGVTDDILDALLAGVEAGTFSAFTKACHISAKAARTLLPPLERGLVYSDACKDVGYDHSAQIDVNLDDVGNPVARKAVGEMVKQVRALIAKYGLPEYIHVELARDIGKSSDERDEIKRGIDKRNAQRDRLRAELGGILGREPRLPDLVRYELWKEQNQECLYTGEKINPAWIAADDNRVQVDHILPWSRFGDDSFVNKTLCMASANQAKKGRTPFEWFSAEGLDWAAFSARVEDCSEMKGRKKGSFYLRKNATEVEETFRNRNLGDTRYATRLLMGLLARLYPKDGEVHVRARPGQLTAKLRRAWGLDDLKKGPDGKRVDDDRHHALDAIVVAATTQSMLQQLTLASQEAERKGLPRGFDFDFVKSPVEGFTEIVRGVIKDVFVSRPERQRARGKAHDATIKQVRRIDEVDVVFERKAVDKLTLADLEKIPLPEPYGKIIDPGKLREEMVVELRRWIEAGKPKDALPRSSKGDVIRKVRLRTTDKVAVAVRGGTADRGDMARVDVFAKANKRGKREFYLVPIYPHQVADRNKCPVPPNKAVAAYKLDDDWVPIDDAFDFLFSLYTNSLIAVTKVDGEIVSGYFKGLDRTTGAISIALHQNQQQVRGGIGARTLLGFRKLVADRLGKVTEVKGETRTWHGEACI

SEQ ID NO: 285 - protein, 1023 aa, unidentified
  REGION 1..1023: note = Description of Unknown: Cas Enzyme sequence
MRIFGIDGGIASIGWAVLDIEDEAAAIIGAGVRMFDAPETDKERTPTNAVRRLHRGQRRVIRRRRQRMAAIRQLFQHHGLLADARRDALKQPGHDPWRLRAEALERSLSGVEMAVVLGHIARHRGFRSNAKREAGANAADETSKMKKAIAATQERLGQWQTVGLMFARDPAYADRKHNRGMNFDRSIQRSDHEAEVRTLFATQRRLGNALATEELEVAYADKAFSQLPLADSEHMVQRCPFEPGAMRTARRSYAFEMFRLLSRLTNLTLTSGGQEWRLSAEQIGQVAADFGRQKTITFRSVRKTLDLDPRTRFAGMTEKDETRDVVARTGGAAEGTATLRDVVGDAGWRALMHAPARRDRVAEVLTFREDPTSIRKGLEDAGVEPLIRDAIMAGVEEGRFATFSGAGHISAKAARALIPPLARGLVYSAACEEVGYDHAARAEVKLEDVRNPVARKALTEMLKQVRALVKEYGLPTFMHVELARDVGKSSEERDKITKGIEDRNKQRDKLRDELAEILGRDVTLEDLIRYELWKEQNCRCLYTDDLIDPTCIDARDNRVQIDHILPWSRFGDDSFMNKTLCMAHANQAKRGRTPFEWFTEDGRDWAMFAARVEACKEMKGRKKGGFYLRKNAQEVEERFRNRNLGDTRYATRLLLDLLARMYPADGKRHVLARPGALTAKLRRAWGVEDLKKDANGKRLEDDRHHALDAIVVAAVSESKLQELTKAAQEAERRGAPRGFDFDHVSPPAAGFREIVRDVVKDVFVSRAERRRARGEAHAATIKQVRKIDGVSIVFERKAVERLTLADLENIPVPEPYGRIGDPAKLRDAMVAELRRWIEAGKPKEALPRSPKGDLIRKVRVASKDKVAVDVRGGTADRGDMARVDVFAKEDKRGKRRFFLVPVYPHQVADREAFPQPPDRAVVAYKPEDGWTPIDRTYEFCFSLSQNALAEVATSDGEIIRGYFKGMDRSTGAIALAAPESPRRLRRGIGAKTLVGFTKLSVDRLGNISIVEREIRTWHGEACT

SEQ ID NO: 286 - protein, 1021 aa, unidentified
  REGION 1..1021: note = Description of Unknown: Cas Enzyme sequence
MRVLGLDGGIASIGWAVLEIEGDAAGIVAAGSRTFDAPETAKERTPSNAVRRLHRGQRRVIRRRRQRMTALRALFAEHGLLPAAQRDALKQPGLDPWLLRVEGLDRLLTGVELAVALGHIALHRGFRSNSKRERGANAANDTSKMLTAMDATSARLGQCTVAQLFASDPAFADRKRNRNGDYSRSVQRKDLEREVRALFSAQRRLGNTATSPDFEAAFADKAFSQRPLQDSEKMVERCPFEPDNKRTAKRSYAFEMFRLLSRLANLTLTAGAAEWRLSPEQIGQVAADFGTQKQISYRRIRKLLDLDPRTRFASVSPEDEIRDVVARSGNAAEGTATLRDAVGDTAWRTLLHAPETLDRIAEILTFRDDPGSIRAGLDETGAEPLIVEAIMAAMERGAFARFTGAGHVSAKAARALIPHLARGLKYDEACTEVGYDHAAPREIQLEDVRNPVARKALGEMLKQVRAVVQEFGLPERIHVELARDVGKSAEERDEITSGIEKRNKEKDRLRGEFAELLHHEPGSGDDLLRFELWKEQNCRCLYTDEMIPPESIVATDNTVQVDHILPWSRFGDDSFVNKTLCMAHANQAKQGRTPFEWFSADKPAEWAAFEARVEGCKAIRGRKKRGFYLRRNAAEVEVRFKARNLGDTRYATTALLNKLKRLYPTADLRARPGAPTAKLRRAWGLEDIKKDESGQRREDDRHHALDAIVIAATSESMLQALTHASKEAERQGRPRGFLFNDVPEPWPGFREATRDVVMNVFVSRAERRRARGEAHAATIRQVREIDGQSIVYERKPVEKLTLADLEKIPVPVPYGRAVAPETLRDAMVDDLRRWIEAGKPKDAPPLSPKGDVIRKVRVASKDKPAIDLRGGVADRGDMARVDVFGQADKRGVRRFFLVPVYPHQVADQESFPRPPDRVVIQSKPEEEWTVIDARFDFLFSLHGNSLIEVITPEGEVIRGYFKGLDRSTGAISIAMPQNQRLLRRGIGARRLVAFRKLTINRLGRIDVIKSEVRTWHGAACT

SEQ ID NO: 287 - protein, 1078 aa, unidentified
  REGION 1..1078: note = Description of Unknown: Cas Enzyme sequence
MFWKSSNLGRVMKIAENLVLGIDLGISSLGWAIIDAVNKLIIDAGVWTFNSPETDKEKTPTNQIRQQARSARTVTKRRRQRMNHIREMLVEAGLLPNASKDVIAQQLIQSKTSPWALRAEGLNRKLTGAELAVCLYHIGKHRGFQSNRKGGDNAAAGEDQKALKAMEGLGQQIAAYRTFGEALFKDAELSRHKRNTPNNYGRTPQRKWLRDEVALLFDKQRQFGSDFASGELEAMFAKLAFTQGALQDQADRVRDCPFEHGEKRASKHSPSFEKFRFLQKLAHMRLYMKGMEETALSPEQIQSLEAKFGTVAKFTYKAVRDILDLDPNVRFRAVAKDEESHDVATRKSGGAVGTRVLKAALGPLYDHLTPEQLDDAMFAIAFHESNDSVENALKKVGLPEAVLAALTAAVADNDFRDVKGAAHISAKACRAIITGLRTGAVYSDACEMAGYDHSAPDASPLAQLRREVKGLSPSEIRRKFSALMSDPKQSLIGSPVARKALIEAVKQFVALVNDHPALQGKLPGKVHVELARDVGKSATERNDIKNGIEKRNKALDKAAEKFEECFGRPPRRGSQDLLTYELAQEQGWKCLYTGEAIEPACLFDGQTYQIDHILPWSRFGDDSFINLTLCLARANQAKKHQTPYEWASSGQPGAPDLDLYLARVEACKEMRGRKKRNYTLKNAADVEDLFRSRNLNDTRWACKLYLQSLQLFYPSDEDARRLFARPGSLTSKARKAWGLERLKKDADGNRLEDDRHHALDAITVAAISESMLQALTYAHQQAEDGGSGRAFERFDPPWPDFRAQVIAMLGTILVARAEERRVSGQTHLDTIRGLDETTQTVFERLSPEKLLDQVKKEAEKSDWKTALEKRFVKPERSQAIINALLNWQDAGRPTDHPPLGPTGDRIDKIKVISASGKPAVIVRGGTADRGDMARVDVFSKPNPKGKKQYFLVPIYPHQVASEITPPDRAVTAHKPESSWPQIDTSYQFECSLIRKCWIEVTKSDGEVIEGYYRGLDRGSGNIEISPHYSLQKVTRGIGARNLHNLSKYQVNRLGTKHLIAKEKRTWRGEVYISGKPPE

SEQ ID NO: 288 - protein, 1016 aa, unidentified
  REGION 1..1016: note = Description of Unknown: Cas Enzyme sequence
MAGEVFLGLDLGIGSCGWAVVTEDSLVALGTRTFDVPETDKERTPTNQLRRMARGMRRVIRRRRQRMNAVRALLCRHGLLTEECKSALADRLDPWLLRAEGLDRRLSPRELALALGHIAKHRGFKSNSKRDRGANAPDESGKMLAAAAKLREKEGAWRSVAETFLNDPELQGRRRNRDGLYDRSVLREDLEHEVRTLLRAQRSLGNAHASETLEADFVETAFFQNPLADSEDKVGFCPLEPTEKRAARPSPSFEMFRLLARLTSLRIDGAPLTAEQIAAATRDFGHQQGITFARLRKLLALPPTARFDGTAPEDEGKRDVVARSGKAMPGSAALFKVLGEAGWDSLRKRPDILDRVAAVLTFREDVGRIRAGLAELALDAPILDVLMTGVADGAFAAFRGAGHISAKACRALIPHLAQGKVYSDACTAAGYTHSDQPETDLDSIANPVARKALGEALKQINAVIRAHRVPDAIHVEMAREVGKSAEERAEIERGIDKRNRQKDKLRQQYRDTVGGEPNAEDLLRFELWKEQSGRSLYSDRDIPPALIASDRNEVQVDHILPWSRSGDDSFINKTLCFTEENQRKKGRTPREWFEQDGLDWSAFAARVENSKEMKGRKKRNYLLKDAAVLDEKFKNRNLGDTRYACRLLLNILKKTYPDITIAARPGPLTDRLRRAWGLQGLKKDAEGKRVEDDRHHALDAVIVALTSASRLQRLTTLFKLAEQQGWPTDWHRTHHLAEALRGIGAIPREISALEPPWPGFRADILAALERITVSRAERRRARGAGHAATIRQVSERDGEPVVFERKSIETLTEKDLERIKDAERNHRTIDALRAWIAAGKPKDAPPVSPQGHVMRKVRLSTSKKVDVPVRGGAADRGDMARVDVFRKASRKGKAEYYLVPVYPHEVATLAEPPNDYVVAHKPPEPLTPDHEFLWSLYPLCWVEVVKPSGEVIQGYFRSMDRSSGAIAISPQHSKAEVSRGIGVKTLTSFRKFAVDRLGNRSEIQQETRTWHGKACT

SEQ ID NO: 289 - protein, 1039 aa, unidentified
  REGION 1..1039: note = Description of Unknown: Cas Enzyme sequence
MIQDELRLGLDLGIGSCGWAVIRQWKDEREGEIVAMGSRTFDVPETAKERTPTNQLRRTARGMRRVLKRRRHRMAEVRRLFAEAGLIESVGSNALKLAGLDPWDLRAEGLERALTGPELAVALGHIAKHRGFKSNSKRDRGANAADESSKMLAAIGVTRERMARYRSVGEMFARDAAYAGRKRNRDGNFDRSVLRDDQAAEVRALFAAQRRFGSAVATSDLERAFAEMAFFQRPLRDSDDLVGPCPFEPGEKRAARRAPSFERFRLLSRLAALRVGTGRDERSLTADQMGRAEADFGHHKKFSYTNLRKVLGLDAGLRFVGVAPADEKNDFVARSGNAAEGTASLRDAIVDGAGELAWLSLLNAPETLDAMAAILTFRDDLDSIRQGLAGLGLDEPVLAALARGVENGRFAVFKGAGHLSAVACRKIVPFLRERLVYSEACARAGYDHAARPKTDLAAVNNPVARKALIEALKQVKAIVAEFGLPGAIHVELARDVGKSKDERDEIKSGIEKRNKVKDRLRDEFLDTVGAAPAGPEDLMRFELWKEQGGRCVYTDRAIDPHSIVASDNAVQVDHILPWSRSGDDSFVNKTLCLASANQEKKGRTPFEWFGTDDRRWEHFVATVEGVKGMKGRKKRNYLLRDATVLVEKFKPRNLNDTRYACRLLLDALKDLYPKDDLKPDQHGELHRPVRVLARPGPLTDRLRRAWGVQALKKGPDGKRVADDRHHALDALIVAATTNSALIRLTKAFQDAEALGSHRDFSGFPPPWPGFVEAARAAFEQVFVSRAERRRARGEAHGATIRAVGEEDGKQVVYERKAVDKLTLKDLDLLKNPERNKEVIAELRRWIEAGKPASAPPVKRFGGKTEEAHCEPIRKVSLRTNKKPDVLVRDGAADRGEMTRVDVFKKKNKRGIDEYFLVPIYPHQIFDAEGWPGPPDKAVVQSRPESEWSVITGEHEFCWSFYPLCFVLVELPDRGIEGYFRGLDRSTGAIHLSRQTSNDDLVRSIGVKTAKSVRKFAIDRLGRRFEIRQETRTWRGAACT

SEQ ID NO: 290 - protein, 1025 aa, unidentified
  REGION 1..1025: note = Description of Unknown: Cas Enzyme sequence
MTKCDMFLGIDLGIGSCGWALATDKSVVALGARTFDVPETDKTRTPTNQMRRTARGLRRVANRRRQRMNLVRGLLLRHDILDCDNKNALAESGLDPWRVRAEGLDRLLERREIAVALAHIAKHRGFKSNSKRDKGENAPAESSKMLAAVARTQEALSQWRSVGELFWKSPDFQDRKRNRDNDYTRSILRSDLEAEVRLLFRRQREIGNRLASFDLEREFIDAAFFQRPLADSENKVGFCPFEIEERRAPKHSPSFEMFRLLSRLTSLRIGERALIPEEISAVTADFGNQQGMTFKRLRKILDLPDTQRFQGIPVEEEGKRDIVARSGKMAPGSASLRMVLGEAGWQSLRRTPARLDQIAAILAFRDDAGNIRAGLQELDLAGPILAALIQGAEDGAFGSFKGAGHISNKACRGLIPHLAQGMVYSDACKAAGYDHARRADTDLEAIANPIARKSLTESLKQIRAVINAHGMPTHIHVELARDVGKSLEERQEIEAGIEKRNKEKDRLRLQFVETVGCEAHGPEDLLRYELWKEQNGRCLYTDREIHPDAILSTDNRAQVDHILPWSLSGDDSFTNKTLCWAKANQDKKGRTPFQWFGHDSDRWQAFSAAVEGCHAMKGRKKRNFLLKDAGILEEKFRSRNLNDTRYATRLLLNILQRDYPQVTVAARPGPLTDRLRRAWGVQSLKKAPDGNRIYDDRHHALDAVIVALTSQSVLQRLTKLFQEAETRGLPTNWHGIGHLAQLFRETGGLPADFAALEQPWPGFRAELAGALEMVTVSRAERCRARGEAHAATVRQVRERDGVKQVYERKAIDSLTERDVERVKDAERNAALVASLRNWIATGKPKTAPPLSPKGDPIRKVRLETAKKVDFEVRGGAAERGEMTRVDVFRKQNKKGKWEYFLVPIYPHQVANQKVWPQPPAQAVVAYKAEDEWPEMNASFEFLWSVHPYSWIEIEKSDGTFIDGYFRGMNRSTGAIMISPHHNKSLVVQGIGAKTLATFRKYAMDRLGNRYEIVRETRTWHGVACT

SEQ ID NO: 291 - protein, 1054 aa, unidentified
  REGION 1..1054: note = Description of Unknown: Cas Enzyme sequence
MSIPNGLSAQSLQDRYEIQNGLVLGLDIGIASCGWALLDTKKQRIVDAGTWGFEPPEVAKTRESKAKARRTFRGQRRRLRRRRQRMRDIRKLLHEAGLLPSPLPPRDEKGVGKPAYDPWALRAQALERALSGEDFATCLLHIAKHRGYRSNSKSEKAQSAPAEDKKVLAGLAAVEERSARWRTVGQMFACDERFAEKKRNRDGDYSHTIRRSLHEDEVRELFKAQARFGATFATSELEERYSQIAFDQRPLQDSEVLLGHCLFEPNEKRASAVAYSFERFRFLSKLVHSRIDDGSAAGRAFTPEELTAAVQCFGTTSKTISWKKLKTLIGLPRDARFIGIGEDMEGRDAARASKGAAFGSNTLYRALGETAWQSLIKTPEKLDAIAHVLTFREDVGRIRAGLEELSLDPLIHNALMQAAEDGAFAGFSKAGHISTAAARSILPHLKTGLVYAEACAAAGYDHSVQIQEDLAALNNPVAKRAILQTLKQINALIRAFEVRPDRIHVELGREVGKGPEERGRIKKGIDDRTATREKAKRDFCDLVDRTDCSPGELQRYELWQEQEHFCMFCDPANDGSGRRHIDPYDLIDGRNTVEIEHILPQSRSQDDSWSNKALACIKCNREKKNQTPWEWFGGRDAERWQRFETYAQSLKRDGRLKGLKVRNLLMKTFEDRQEAFLNRNLNDTRYAARVVQAELKCLYSKAEQDGIRRVFARPGQITGSLRRFWGLDPFKYLPGDKSAKERIEDERHHAVDAIVVAACSESTLQNLTKAIQKEEEQGLPIRGKDFKPLWPSFRDDVAAAHDAARVARSENRRARGAGHAATIRKLREEDGRRIAYERTAIDKLTPSALERIKDPERNRDVMEALSAWLAAGKPKDAPPRRNNGHPIHKVTLRSESNPRTERAGFEAHKGLVDNADMVRLDIFEKEGKTYLVPVYAHQIADRAGWPQPPDRAITAHKPESEWLPIDGSYTFRFSLFPFSWIEAVDRKGVVYEGYYRGTDRSTGAITYSHEVSRLKTERFGTRLLASFKKFQVDRLGRRHEVKGEPRQWHGADST

SEQ ID NO: 292 - protein, 1040 aa, unidentified
  REGION 1..1040: note = Description of Unknown: Cas Enzyme sequence
MTQGAQRTFGFDIGIASCGWAVLEEGSRIVDMGVWLFDAPETDKERTPTNQIRRTARGLRRVLRRRRQRMRDIRVLFEEHDLIDTIRPEAFAAPSKDPWTLRAEGLDRALSPRELAIALAHIAKRRGFKSNSKRDRGANAPKDTKGMLGALEQTRVRLANYRTAGEMIGRDASFAGRKRNRDGDYSRSLERVALEREVTLLFSAQRRLGNDAASPELESRFAAIAFHQRPLADSEDRVGACRFFPEERRAPRRGYSFELFRHMARLANLRLRVGRSERSLTADEIRLACADFGTQRGMTFKTLRKIIALPDPERFDGVPPDEEGKRQVVSRNGDSAAGTYALRKALGPAWSGFLTNPEQADRVARVLSFRESDESILAGLQEIGLEPLVTQTLERALANGDLADFSGAADLSSKACRTLIPHLTQGLDFTKACAAAGLRDPDGRAGSLAALVMAGDAEKALSEFRTLAREIIDAIGNPVARKALSEASKQFVALAREYGIPSRIHVELARDVGKSKEERDEITAGIEKRNAEKDKLRKYFADLLGRQVHNDDDLLRFELWHEQQGFCLYTGREIPVSLLAAGDNAVQVDHILPWSRSGDDSFINKTLCFASANQEKKGRTPFEWFRDTKSVEEWDAFAARVETTRPMKGRKKRNYLLKDASELEGKFRNRNLGDTRYATRVFADLLRALYPKADAARSVFARPGALTDKLRRGWGIQGLKKDATGERIPDDRHHAIDALIVAATSESMLQSLTRAFKAAEDLGSSRDFKQLDPPWPGFVEEVHRAYEKVFVARSERRRARGKGHDATIKGVEETPDGPIVYERKAVEKLSLADLARVPDPDRNARLVDALRVWIETGKKKGSKPVSPQGHPISKVRLRTTHKVAVHVRGGTADRGNMVRVDIFMKPNRRGKAEFFAVPIYPHQVMNLADWPHPPNRAVQGGTDEEQWPIIDEGYRFIFSLYPLSFVELVKPDGEVVEGYMRSLDRSTGAITLSGMQSKTVLHRSLGVRTVLSLRKFQIDRLGRRFEIQGEQRTWHGVACT

SEQ ID NO: 293 - protein, 1112 aa, unidentified
  REGION 1..1112: note = Description of Unknown: Cas Enzyme sequence
MGVRIYTDGRDPQSGASLAQERRGPRGARRRRDRYLDRRADLLKALIRCGLMPADPIERKNVEALDPWRLRAEGLDRPLTGHELGRALFHLNQRRGFKSNRKAERTRDDKEAKDTQDMKAAARKLQDAIGPDHKDARTLGEYLYKRHRAAVDTTGAWQPITPAKAGSVRARPTTVKGRNNYEFYPLRSMIEAEFQALWAAQAAHHPELTEAIRDEIADIIFYQRPLRPVDPGPCTLDEEEDLDKRDRRAPLALPIQQDFRILQELANLELFHKTNPTVRRRLTLAERDALFSALKHSEKVTFKRIRILLKIDAIWSFNLESEKRDHLKGDGVSVQLARDSAFGKRWFEGLADVERQKIVLTLLNEESTDELVRIGVDYWGLTADQAQTVADISLPDGYGSLGLKALSRIVPILRERADRDGGPIGYADAVLEAGYHHHSDFRDGDLLDALPYYGEALQRYTAQVRSESAPEWEREFGRLANPTVHIGLNQLRKVVNALIDRYGPPEEIVVELARDLKRTQEEREEVQKQQAENQKKNERRRELLESMQRSQPGWKPPRDALLRLRLWEELDLENVANRRCIYTGKTISQRMLFSDEVEIEHILPFTLSLDDSPANLTVSLRAANRDKKNSTPYDAFGHNPAGYVWDEIMLRVSALPRNKQWRFRPDALDLVRSRIARENARLEGSLPKDALDDIEKTGGFLARQLVDTAYLARVTRQYLWKVCDPNRTWVIPGQMTALLRRKWGLNSLLGDHNKKNRADHRHHAIDAFVVGLTDRAMLMEIQRAAGITRERIVEDMPDPPWDDWRDQLKAALDRIVVSHRPDHGIDPKADATQRLSTSGKLHEETAYGLVKDAEREGGNVVARKSIDALSENEIDRVRDPLLRAKLKAHLAPFLPDEQSLENAKGRLTTARRAKDVKAQERAKAEIARLKVEAKARRKAGAKDFKAALAAFGQQYGIRRVRLVKPEGAVVVIRDKAGTPYKAYSAGDNLRVEIFERADGSWGREIVTAFDGNRRDFRPKWRDMVPEPKLLWRIHKNDLVRLQDSGEDRIMRVVSIWERYLQLAGHREANLVERYRDDEFKWTFGNYDKLKELNFRRVSVSPVGELRDPAKGP

SEQ ID NO: 294 - protein, 1156 aa, unidentified
  REGION 1..1156: note = Description of Unknown: Cas Enzyme sequence
MNESTIRKSRPWRLGLDLGTNSLGWCAFDLAKGEDGRQRPVGIRRMGVRIYTDGRDPQSGASLAQERRGPRGARRRRDRYLDRRADLLKALIRHGLMPADPTERKKLEGLDPWRLRGEGLDRALSLHELGRAIFHLNQRRGFKSNRKTERGGEKKNEAEEQGMKAAAKTLGAAIGPDKTNARTLGEYLYKSRRADLADGIWTPKTQAKAKTVRSRPTFEKNRNTYEFYPTRDMIAAEFTALWGAQVLHHRALTDETRAEIEDVVFFQRALKPVDPGPCTLDDEEDLKKRDRRAPLALPIQQDFRILQELANLELFRRDRPTERKRLTLAQRDKLYEALKRKDKVSFAGMYGLLNLEKIWDFNLRSEKRKDLKGDIVSMRLGKGTAFGPRWFEGLREQQGNYIVARLLDEESESEIHRIAVEDWGLPPDAAETVAVIPIPDGYGSLGLKALNKIVPILKERADEKDGGPIRYSDAVRLAGYRHHSDFRDGVLHPALPYYGEALKRYTAPVTNVAASAEEQEHGRLANPTVHIGLGQLRKTVNALIEKYGPPEEIVVELTRDLKRSQEEREEVQKFQAENQKRNDLRREEIEALRSATPGWKAPRDAMLRLRLWEELDAENVVNRCCVYTGEPISRKRLFSDDVEIEHILPFTQSLDDSVANLTLSLRQANRDKGNRTPYDAFHTNPGRYDWNAIMLRVNVLPRSKQWRFREDAIGLVKDRALREKVKFGGELPKEALDDIDNASGFLARQLVDTAYLSRLTRQYLWQICDANKTWVIPGQMTALLRRKWGLNRLLGDHNRKNRADHRHHAIDAYVTGLTDRSMLQEIQKAQGVNRERIIDDMPDPWDGYRDQLKAALDRIVVSHRPDHGIDPKAGAGRRTSTSGKLHEETAYGIVKEPEREGGNVVARKPLESLSENEIDRIRDPELRETLRAHLAPYLPDGQSMDNAKARLAAARKAKDAKAIERAQAEIGRLKVENKTRRKAGAKDFKAALAEFGRAHGIRRVRLVKPEAAIVVVRDRFGTPYKAYSAGDNLRVEIFERADGSWGREIVTAFDANRADFRAKWRDVTPEPRLKWRVHKNDLVRLDVDGEERVMRVVSIWDRYLQLAGHTETNLAERYRDGEFKWTFGNYDKLKELNFRRVTVGPFGELRDPAKTP

SEQ ID NO: 295 - protein, 1154 aa, unidentified
  REGION 1..1154: note = Description of Unknown: Cas Enzyme sequence
VSIRVSRPWRLGIDVGTNSIGWCAFDLKKDETGRQHPSGIRRMGVRIYTDGRDPQSGASLAQERRGPRGARRRRDRYLDRRADLLKALIQHGLMPADTAARKGLEGLDPWRLRAEGLDRALPLAEFGRALFHLNQRRGFKSNRKAERTRDENDAKDSQDMKAAARKLDAILGPDRKDARTLGEYLYKRYRAEQDDKGEWRPITPAKAGTVRVRPSTVKGRNNYEFYPLRSMIETEFQALWAAQARHHPSLTDAVRDEIADIVFYQRPLRPVDPGPCTLDPEEDLDKRDRRAPLALPIQQDFRILQELANLELVHKTNPTVRRRLTIDERNKLYEALKRRDKISFDAIRKKHLHVEAIWSFNLESERRKELKGDIVSNRLAREGAFGKRWFDGLTEIERQKVVLTLLEEESTNEIIRIGVDYWGLTPEQALTVADTPLPDGHGRLGLKALSRIVPIMRERTSTDGGPIRYSEAVQEADYPHHSDFQDGKLLDELPYYGEVLQRYTAPVRSDSAAAWEREFGRLANPTVHIGLNQLHKVINALIDKYGPPTEIVVELARDLKRSQEEREQVQKQQAENQKKNDLRRELLADVQKSQPGWKPPRDAMLRLRLWEELDQENVANRRCVYTGKTISKRMLFSEEVEIEHILPFALSLDDSPANLTVSMRTANRDKGKHTPHDVFGHSPAGYDWDQIILRVSALPKNKQWRFRPDAMDLVRSRIARENARLEGSLPKDALEDIEKTGGFLARQLVDTAYLARVTRQYLWKVCDPNCTWVIPGQMTALLRRKWGLNPLLGDHNKKNRSDHRHHAIDAFVVGLTDRSMLQEIQRAAGNTRERIVDDMPDPPWDGWRDQLKAALDRIIVSHRPDHGVAPTADGTTRRSTSGKLHEETAYGLVRYPEREGGNVVARKAIEALSENEINRIRDPLLRERLRSHLAPLLPNEKSLENAKSRLAAARKARDKAAQERAQAEIARLKVEAKARRKAGAKDFKAALSAFGAAHCIRHVRLIKQETAIVTIGDRNGRPYKAYSAGDNLRVEIFERADGSWGREIITAFDGNRRDFRPRWRDISPEPRLLWRIHKNDLVRLDMAGERPMRVVSILDNYLRMAGHEDTNLRERYADGEFKWTHANFEDLKDQNFRRVSVGPAGELRDPAKGP

SEQ ID NO: 296 - protein, 1154 aa, unidentified
  REGION 1..1154: note = Description of Unknown: Cas Enzyme sequence
MTALSSRKSRPWRLGLDLGTNSIGWCAFDLKLDQSGRQHPAGIRRSGVRIFTDGRDPQSGASLAQERRGPRGARRRRDRYLDRRADLLKALIHHGLMPGDPVARKKLEDLEPWQIRSEGLDRPLTLHELGRALFHLNQRRGFKSNRRADRSRDEKEAKDAQDMKAAAKKLDAVIGPSHENARTLGEYLYKKHRAVRDGDAWLPLTPAKAETVRARPTTVKGRNTYEFYPLRSMIEAEFDALWSAQSPHHAGLTDAARDEIRDIIFYQRPLRPVDPGPCILDPEQDLDKRDRRAPLALPIQQDFRILQELANLELFHKTNPSIRRRLTLAERDALFSALKRSEKVTFKRIQILLKIDDIWSFNLESEKRDHLKGDVVAVRFGKDSAFGRHWLDGLSDIERQNIVLKLLDEEDPDEIVRIGVEIWNLTPEEAQTVADTPLPVGYGSLGLTALSRIVPILRERADRNGNPIRYAEAVVAAGYEHHSDFRDGELLDELPYYGEAVRRYTAPVRSESAPAWEREFGRLANPTVHIGLNQLRKVVNALIEKYGPPEEIVVELARDLKRTQEERETVQKQQSENQKKNDLRRALLDDMQKSHPGWKPPRDAMLRLRLWEELDAANVANRCCLYTGKAISKRMLFSNEVEIEHILPFTLSLDDSPANLTVSLRAANRIKENRTPFDAFGHSPAGYDWDAIMLRVSALPRNKQWRFRQDAMDLVKDRIVRENARLEGSLPKDALDDIEKTGGFLARQLVDTAYLARVTRQYLWKICDPNKTWVIPGQMTALLRRKWGLNGLLGDHNRKNRADHRHHAIDAFVVGLTDRSMLQEIQKAHGVNRDRIIDDMPDPWDGYRDELKTVLERIVVSHRPDHGIDPNASGKRTSTSGKLHEETAYGLIADPEREGGNVVARKSLTSLSEADIDRIRDPLLREKLRQHLSPYLPDGKTLENAKSRLTAARRAKDAKAIEYAKAEIGRLKMENKTRRKAGAKDFAAALAAFGQANGIRRVRLVRPEGAIVTINDRTGRPYKAYSAGDNLRVEIFERPDGSLGREIITVFDGNRPDFQPRWHGDSPQSRLLWRVHKNDLVKLDVDGEERVMRVVSIWADLLRLAGHAETNLIARERDGEFKSTFKMYDKLKEAKFRRVTVSPSGELRDPAKTP

SEQ ID NO: 297 - protein, 1055 aa, unidentified
  REGION 1..1055: note = Description of Unknown: Cas Enzyme sequence
MVNMNIHENRTLGIDLGIASCGWAVIERDEKGGGRIVGMGSRTWDAPETDKERTPTNQLRRMHRGMRRVIKRRRLRMNAIRKLFRDHGLIEVQGPTGLRIARLDPWELRAAGLGRRLTGPELAVALGHIAKHRGFKSNRKGERNANAGDDSSKMLKAIDLTRTERLNKYTTVGEMFFKDEAYTGRKRNRDGTFTNSILRDDQAVEVQILMDRQRRMGNALASTELEAAFANAAFFQRPLQDSDDLVGSCPFEPTEKRAARRAPSFERFRLLSRLAAIRLTEGREERALTPDQIAAVDGVFGQQKSISFKTLRKALTLADGTGFAGVSSDDEKNDFVGRASNAAEGTASLRQVVQAGAGDIAWLTLLNAPETLDAAAAVITFREDIASIRNGLTEIGFDPVVLTALMAAVEDGRPFKAFKGAAHISARAARNILPHFAAHSLYSDACAAAGYDHARPPETDVDAITNPVARKAVREALKQVKAIVMEYGLPGAVHVELARDVGKSKEERDEIKSGIEKRNKALDRLKGEFVNVVGRESTSREDLLRFELWQEQGGRCLYSDREIHPNMIVASDNTIQVDHILPWSRSGDDSFVNKTLCFAKANQDKRGATPFEWMGGDAARWETYRACVESNKSMKGRKKRNYLLKDAAVLTEKFRPRNLNDTKYATRLTLDLLARIYPESDRFTGVPRKPEEEKKRRRLFARPGGLTDRLRRAWGLQGLKKDDNGKRIADDRHHALDALIVAVTSEGALLQLTKAAQLEEERGSSRFIAGFPQPWPGFRDEAHAMMREVFVSRAERRRARGEAHAQTVRRIEDTPDGQVVYERKRVDDKFKREDLARIKDPARNTAMIAELTRWLDAGRPKDAPPVKRFGGKNMDGIEKEPERFEPITKVRLITTKKVDVLVRDGVAERGEMVRVDVFRKKNRRDAWEYYLVPIYPHQVFDAKDWPEPPNAAVAAFKDEGDWFDVSVGYDFLWSVHPFSFLEMEKPDNTFIDGYFRGMHRGTGNLNVSAHYSRDVLIEGIGPRRLRALKKYNIDRLGNRTEIVSEKRTWRGAVCT

SEQ ID NO: 298 - protein, 1132 aa, unidentified
  REGION 1..1132: note = Description of Unknown: Cas Enzyme sequence
MSNNPLFGSNSPLPQIPQSFPTEIDSDLFLGLDLGIGSCGQALVRAKESSGEKNRIIFTGSRVFDIPEDRTQSGVKLRNPDRRAARLSRRTIRRHAHRMERLRNLLKREGVLPSDYHISSKKWQDWHSRMTSGDNGELGQSGPWVWRAEGLDRKLAPLEWAALLLHLTKHRGFKSNKKSELALERKVIEATTKELKKDNKTGKEDSIGTLKGTAANHDRLSDHDYRTVGEMAAKDGFFSEQKRNRSGEYLRSILRDDLTDEKTLLFSRQRSLGNRHASETIEAAFTKIFLGQRPLQNPIKLLGHCSFEPEEKRGAILAYSAELSRALQKINTLTLVHQDSEEEALQRYISDSDNKYSNFVSSFGNQAKISWNDLRKHFGIPETTQFKDVASDKKTQTADFATASSKRSAAHGSNILSNVLGDEVWSCLTNEDPRSLDELAFALTFFEVIGDAGTKDSMLGYLHWKRINPVALGIITAALENREEGILKFSGKTNLSHVAHRNINTHLQDGLVYSVACEAAGYDHTKRDFNFDTIVNPIVKSVVRETCKQVVHLICKNGKLPGKIVVEIGRDLGKSIPERKEITLGITKRTKNKNANRLNFATALERPESEVSNEDHLRYELYKCQSALCPYCGEYLGRENELLNTHFQIDHILPRSRSHDNSFHNKVLVHTHCNQNKGSQTPSEWFGLGTEQWQKFSAWVSTGTMPSLRKQTRRNLLNTTFSDPERESRFRESHLNDTRYISKLITAYLNGLYIALGESPGSKGSTRRVFVQPGPLTALVRRSWGLEDLKKDLSGQRIGDKHHAVDALVCALTSEGQRQFITSLEKTYKEMEKRGRTGFAPKDLPLPWSTLRKDVVNSIDAMTVSRKVKHITSGALHDETNYGLSDKGYPFLRRSLIKEEKGKRVGVLQDLGDLARVKDVELPCNSWLKASLTDWINRGSPVEELPKDNQGNTFSKVKMFTNLTKAGIPSKKTLREQPQGLIAGGTLSRIDIFSKPDKRGNLNYSIVPIYVHDLNKPEPPMRAIVAAKEESEWTLVTHEFEFCFSLSKNMAFSFEKKGSAKKPVGDKGTLLFNGVNRNNAKIDGIDPNDSQKITGVSIKTGCLSFHALIIDRLGNVRPKPYQPRQWRGAASI

SEQ ID NO: 299 - protein, 1047 aa, unidentified
  REGION 1..1047: note = Description of Unknown: Cas Enzyme sequence
MENSVSERLSRIAGRYPIDETLVLGLDVGIASVGSALLRHGEKPEILFAGSRCFDPPENPKTRALENMKRREKRLLRRVIRRRAQRMAKVRSALARAGILTSTDPTAFHNNPNAKPADPWQARAESLDRLLTDREFAAAVLHIAKHRGFRSNSKSGQADNAPEDDKKMLGAVKDNRELLARYRTVGQMVASDPKFAKRKRNKDGEYTHTFARDDVRHELAKIFKSQRRFDNPHATEELQEELLDVVFFQRPLKDSEEMVGYCPFFDGERRSPKHAPSFEKFRFLAKLNTVKVRGPDGTLRRLTREELSKAVDGFGQKSKSITWNALAKLLGLGSGTAFDGVDERRAKGDIATSTGSAFASKIFYDILGPTGWNSIKDRPDILDEAARIISFRDDLARIEEGLAEIVGLEPVIRDALMEGVRSGAFSRFAGAGHISAKATRTILPHLGEGLIYSDACAAAGFDHTASRRVVLEDIRNPVVQRSLREATKQVETLIHHFQARPGRIIVELARDVGKPARERDEITRGIEKRRRERLKHREALKDELNLDREPNDEELQRYELWKEQEYRCIYTDTVISPPDILSDRTQVDHVLPRSRSHDNSYANRVLCMTKVNQEKKNRTPWEWKGSDAAWWEAFEARVDALNIKSYKKRLLKTVTFDKRAAGFVERNLNDTRYASRALLSGLRALYGGEEPATPGPSAPQPGQPRRLFARPGAVTALLRRAWGLDRLKDREDDRHHALDALICAAAPGEWLLNKLTQEYQELETGGRSRWTPRVPLPWKGFERDTRDAYERVFVARSEKRRGRGGLHKETIYAVGEEDGQKVTYERKAIANLTKADLNRIKDADGGNRPVADALRAWIEAGKPTTPEEALPRSPKGDPIRKVSLRRKGVSGFTVNEGHVDNGEMARVDIFTKPNKKGEDQFYLVPIYRHQVIDCKNWPKPPDRAIVAYKEEAEWVQIDDGYMFRFSLYADCYVRAVKRNGEIIEGYYRSTHRGTGAVTVSLHNTRGKLISGIGVKTLSAFEKFEVDRLGQQHTILQETRTWHGAAFI

SEQ ID NO: 300 - protein, 1008 aa, unidentified
  REGION 1..1008: note = Description of Unknown: Cas Enzyme sequence
MRIFGLDGGIASIGWAVIDEDGEQSRVVAAGTRMFDAPETDKERTPTNAIRREKRGQRRVVRRRRQRMAAIRQLLCEHHLLEQAGADALAIGLNPWDLRAAALDRVLTNTELASVLGHIAKHRGFRSNARAQPGANAATDDKKMLGAIEATRERLAQWRSVGEMFACDPEFAGRKRNRGGGYARSILRADQETETRLILEKQRQLGHPHATPALHKSFAQLAFSQKPLQDSHNLVGFCPFVPAERRAARRSAGFELFRLASRLNTLNFTEHGGAEQRLTADQTARALEDFGAQKKLSYKWLRKRLDFAPSVSFGQDDEDRDIVARSGSAAEGSYALRQAVGDAGWRALLAQPAVLDCIAAILSFRSDSGSIANGIRLLGLDSVLAEAIIAAEMDGAFGAFKGAGHVSATAARAMLPHLAAGMGYAEACHEAGFDHSAAAEVKLEDIRNPVARKAISETLKQVRAMIAVYGEPDRIHLELARDVGKSAEERDEISKGIEKRNKQRDRMRDRFTELLARPPSGADEMLKFELWNEQQGRCLYTDREISKGALIAGDNLVQVDHILPWSRFGDDSFVNKTLCYASANAEKHGRTPYEWLTAEKGVAAFEMFERRVQGCLEMKGYKKRGHYLRRNAAEVEERFRARNLGDTRYATRVTGMLLARMLHKDGKKTIFARPGALTSKLRRGWGLEGLKKDEAGKRRTDDRHHALDAIIVAACSESMLQTLTKAFQQAEDRGMGRDFSALDQPWPGFRDQALAAFNAVFVSRAERHRARGEAHAATIRQVRERDGKMVVFERKAIDGLTLKDLARVKDADRNGAVIASLRDWIEAKKPKDQLPRSPKGDVIRKVRLQTDGKVSVSVRGGSADRGDMARVDVFEKKDAKGRLKYYLVPVYPHQIARSPAPPNRAVDAGKEEVEWTIMDRGFDFRFSLHSNSYVEITKPTGEILVGYFKGLDRSTGAVSLATDIDPLDQKSGIGARTLLSLRRFSVDRLGRKSEIKREVRTWHGVVCT

SEQ ID NO: 301 - protein, 1019 aa, unidentified
  REGION 1..1019: note = Description of Unknown: Cas Enzyme sequence
VAGRHLQDNLILGLDLGIGSCGWAVIDETRASDRIVAMGARTFDVPETDKKRTPTNQLRRQHRGLRTVIRRRRQRMNALRRLLSDAGLIADDRKGAIKIPGLDPWSLRADGLERKLTGPELAVALGHIAKHRGFKSNSKRDRGANAPKDSSEMLSAIDATRERMKSFRTIGEMFAKDPAYAIRKHNRDGDYTRSILRDDQEQEVRLLFDRQRAANNRLATEELERKFIDTAFFQRPLADSEDKVGDCPFELGETRAAKRCYSFELFRFLSRLTAQRIQSSSGERPLTALEIDAASKDFGAFRGMTFKRMRKLTALSDDYRFAGVPFEEEGKRDVVTRAGDLAAGTYALRKVLGSAWQTLLAIPDKLDGIAFVLSFREDVKSIQTGLDDLRIEPVIRDALMKGVRDGDFGDFKGAGHISAKACRNIIPHLKQGLVYSAACEASRYDHAKRPETDPAKIGNPIARKALTEAIKQVRAIVQEYGLPGRIHVELARDVGKSKEERDKIRSGIERRNKQKDWLREQFVATVGKEARSGEDMLRFELWREQNGRCLYTDREIHPNAIVASDNSVQVDHILPWSRSGDDSFVNKTLCFASANQEKKGRTPFEWFGKDEQRWAHFVAGVETNKSMKGRKKRNYVLRDASLLEEKFRPRNLNDTRYACRLLADALARMYSENSRRRIFARPGPLTDRLRRGWGIQDLKKDAEGNRVDDDRHHALDALVVAATTEGALQKLTRAFQEAEKIGAHRDFARLDPPWPEFVVEARAKLLNVFVSRAERRRARGEGHGATIRQIIGTDGNQIVYERKSVEELTEKDLARIKNPERNAKLIEALREWIAAGKPKDRKPLSPKGDPVAKIRLQTNKKADVLIRDGAAERGEMVRVDVFRKQNKKGAWEYYVVPIYPHQVANFVEWPTPPMRAVQAGKPEEGWPEISTTYEFCWSLYPLNFIELVKPDGEVIEGYLRGLSRSTGAFTISPHHTKEETRVGIGARTLSSIRKFSIDRLGGRFEIPRETRTWHGVVCT

SEQ ID NO: 302 - protein, 1083 aa, unidentified
  REGION 1..1083: note = Description of Unknown: Cas Enzyme sequence
MDGIGRTTFSFDIGTNSIGWAVLGLDAQDEPASIIDAGVRIYSDGREPKSGTSLAEGRRVARGMSRRRDRYKRRRKAVLRTLTEFGLMPDSDAARKALVAETSDKRFDRIATDVYALRTRALDEKLPPFYLGRALFHLNQRRGFKSNRKTDKRDNDQGKIASGISRLAVAIHDAGARTIGEFLQRQRGAGGWVRVRPSRVPGKDDKEEDGYGFYPERSFLEQEFHAIWDAQAPHHPALLTEERRDHLFRVMFFQRPLKRPKIGKCTFNPDEDRLPKAHPLFQQFRLYKEVNELALVYPDQHVEKLSLEQRDMLVKQLQSQREAAFTALRKTIKAPHGTRFNKETPARLRMKGDEVAAEMSGKTRFGQGWFDLAPDARWEIVRQLRDTEDPLALLHWLEQNCSLSIEQRDAVAAAHLPEGYGRLGKTALTEILVELKADVIPEAEAAHRAGYDHALFGKADAVDELPKYQEVLGRRIPPGTGEPDDPYDVQKGRITNPTVHIGLNQLQRVLNRLIVRYGKPEQIAIELARELKLSEDEKAEVNRRIAKNTREAERRSDQLRKLGQPDNGYNRLLLKLWEELDPAQPLNRLCVYSGKPIGISMLFSADVDVDHILPWSKTLDDSQANRILCLREANREKGNNAPADVPQWQGRYDEILERANRLPLNKRWRFGRDAMQKFKDEESFLARQLTDTQYLSRLAHEYLGALYDDEEPNEWGVFARRNHVRVIPGRMTEMLRRQWGLNSIIADHNHKNRNDHRHHAIDAAVVGVTTRRLLQRIATVAGGREALALEETIDKIEPPWPSFRDDLKRVVDRIVVSHKPDHGSLPKAGEGGRTAGQLHNDTAYGFTGEEKNGVPVVVRRVPFMSLTEKDIAAIRDKPLADELFRAIRGLSGKELIAALERFRADGPYKGIRHVRVTEVVGVIPIHDHAGRAYKAYKGDANYRYDVWELPNGKWLHEVVSMYDAHQAGWQSAIRLAHPAARKVLSLHQNDMVAYDHPKDGPTIGRVVKFSGSGQMALAGNRDAGALKARDADPEDSFKYFYKSGGAMKDVNLRQVRVDETGRVFDPGPQDRDSRRLRNHPKGG

SEQ ID NO: 303 - protein, 1089 aa, unidentified
  REGION 1..1089: note = Description of Unknown: Cas Enzyme sequence
LQQKLFSFDIGTNSIGWCVFALDEHGQPEQIKDIGVRIYSDGRDPQSKTSLAVARREARAMSRRRDRYLRRRKATLRTLADYGLMPTDKAAQAALLRETGDMKKEVGEENATPYDLRRRALDERLPPFHVGRAIFHLGQRRGFKSNRKTDRKDNDKGKIALGIEELHAEMRKAKARTYGEWLAMRREDGHVVRLRAGSEAFDGDGYAFYPERSLLEDEFRQIWDSQAEYYPDQMTPERKAHLFDVMFYQRPLKKPKVGKCAFNPKEERLAKAHPLFQEFRLYKEVNELELVMPDQSRRKLDLDQRNALVRLLRGNREVSFKKLRATLKLSPDVVFNKESESREKLKGDEVHSALSDKKRFGPQWGDFSRASQWEIIRRLQEEESPGRLFDWLRTEFGLDGERAEAIANCPLPEGYGRLGETALSSMLEELKAAVIPEAKAAELCGYDHSRLGEDRDEGEPFLPPYQEVLERHIPPGSGDPEDIYDIRMGRITNPTVHIGLNQLRRLVNALIARYGKPQQMVVELARDLQLSEEQKRKINKQIASNTRDAEARSRKLIELNVPDTGYNRLLLKLWEELNPDKPEDRVCIYSGKPIGIEKLFSAEVDVDHILPWSKTLDDSQANKLLCLKSANRQKRNRAPADVPEWRERYDEILARAARLPRNKRWRFAPDAMEKFEAEGGFLARQLTDTQYLSRMALEYLDCLYPSEEPDADGVLRKRRHVRVSPGKLTEMLRRNWGLNNLLPDHNLGEMAQEKNRKDHRHHAIDAAVVGVTTPGLLQRISSAAARLDDVDFQNLVKKMVAENPPWPGFREDLQRAVNAIVVSHKPDHGTVSRAGYAEGKGQTAGKLHNDTAYGLGRDRDGNPVAVRRKPFLSLEPKDIPGIRDEELRTELYGAIGGLADKKALHEALERFRKTHPKFKGIRRVRMAEKLAVIPIRDREGRPYKGYKGDANYRYDVWETLDGMWHSEVVSMFDAHRPGWRSEFHGKNPTARRVLRLQQNDMVAYLHPVDGYQFGRVVKFNVAGQIFFAGHKEAGSLKARDEDKGDPFKYFSKSANGLKDILCRQVRIDETGRIFDPGPQDRLSRMTRKS

SEQ ID NO: 304 - protein, 988 aa, unidentified
  REGION 1..988: note = Description of Unknown: Cas Enzyme sequence
MARILGLDVGIGSVGWAVVETGVDEATGEVTGAFEVVVCGARCFDVPEVPKTKDLKNKARRLFRGQRRVTRRRRQRLQAVRRALRARGLPVATVGTPPGTPAGRVWGLRAAGLDRRLEPVEWSAVLVHIAKHRGFRSNSKRDRDNRSEGGKLLRQIAETGQKLAGFRTFGEMLAPKGSASPPPRMRNVPDDYRLTPLRRDLEVEAGKLFEAQRRFGNPAADATLEAAYRDAAFFQRPFDQGDLLVGACRFEPAEKRCPKQSPSFERFRFLSKLNNTRIHPIGEPPRFLSAEERARAKPLFASVQKLTFKAVRKQIGLPAGTVFDGLATRKGDPEAATFAVFDGSRMLAQPLGEQRFHELQATHPSWLDDAMEALVFNETPERITAEMERAGLDGATIAQLTTDAALAAASAFKGVGHISALACRKLMPGLEDGLVYSAACEKAGYDHSAIGESRIADIRNSVVSKVLREAKKQIEVIVAEHGMPDLVHFEMARDVGKSAEERGEIKKGLDERTAERERHAAEYETLLGRAPNGDELLRFEMWKEQSHRCPYTGDYISPAQLAATDNSVQVDHILPYSRSGDDSFRNKVLCAAKANQDKRRRTAFEWFGDDAARWAEFKTRIEGSPHLHKQKKRNLLTTAFKEREEGYRERHLNDTRYALRVLRMEIERMWPVLATRKDERRRIFVRPGAVTAMVRKSWGLNSLKASGELGDRDHALDAIVLACTSERLLQQLTRAAQELEEIGSGRATPLVPTPFGSEPADRERLRQLVAEKVRAVFVSRPETRRGRGPAHKSELFAFKPNGDGSVTRFKRIAVDELKRDHLKLLKGGDRADCLRQQAERWLAEALAKGHKEGKLQKWAATNPLRAPSRDGAVAPVVRHLRIELPERVRGGIEVVRGSKPAHADTETMVRVDVFAKEGRFFLVPIYELTVTDKRELARLLVADTVLDGQRMSVLTGIERMVDGLLAAITAKDAAKLPLPEPAAPDLPG

SEQ ID NO: 305 - protein, 1091 aa, unidentified
  REGION 1..1091: note = Description of Unknown: Cas Enzyme sequence
MGNTQFSFDLGANSIGWAVFGLDSQGGPDRLIESGVRIFSDGREPKSGTSLAEGRRVARGMARRRDRYKRRRKAVLRTLTEYGLMPGDAKARRDLVAETRDGKAGQAASDVYALRARALDEKVPLYHLGRALFHLNQRRGFKSNRKTDKRENDQGKINTAIADLQDRLSGRTLGQYLFEQRGDDPENRGWVRVRNVLKTEGEKLVEAYGFYPQRAMLEDEFNRIWDAQAEHYPDVLTEERRAHLFRVMFYQRPLRKLLVGKCSFNPLEERLAKAHPLFQQFRLYKEVNELKIITLDNSQGTPLTLEQRDVLLTLLRDTKERSYKSLLGKILKGQPDARFNKATDARDKMKGDEVAAVLSNKKLFGQKWFDMSEAEQWRVIKKLRETEDPLELSTWLKMEFGFDPERRDAVAAARLPEGYGRLGPTALAAMLEEFKRDVIPEAKAAKRAGYDHALAHTGEGADELPYYQEVLERRIPPGSGEPDDPYDTRMGRITNPTVHIALNQLRRVTNALISKYGKPDQIAVELARELKLSDDQKKDVNAKIAKNTKDAQRRSSEILELAEKYKHIEDNGYNRALLRFWEELDVLNRVCVYCGGGIGRSTLFSGAVDIDHILPWSKTLDNSRSNRILVHNTCNRLKRNFAPFEVPEWKANYQDILDRAAKLHPSKRWRFAPDAWERFKDEDGFLARQLTDTQYLSRMAHEYLASLYPDEEPDEWGVFHRRNHVRVVPGRLTEMLRRVWGLNSVISDHNRKNRNDHRHHAIDAIVVGVTTRGMLNRISHEAARGEELGEEDAMRKFAPPWQTFRDDVKAVVDRIVVSHKPDHGTLPTPDRPGSTAGQLHNETAYGLTGEEQKGAPVVVRRKPFLSLEPKDLPLIRDLLLRDHLETETYGCSGNDFKKVLVDIQQKDPRYKGIRRVRITEVVSVIPIRNSSGKAYKGYAAGGNHRCDIWELPDGRWDAEIVSVYDAHRLNRRSVMLEAHHNPRKIMSLQQGDMVAYERPDTGERVIARVRKFDQRNKQIYLDAHNEAGELDKRHKDVDDAFRNFSKTPNALRGVNVRQIRVDEIGQVFDPGPQDRESRQARKQAGVKVNNR

SEQ ID NO: 306 - protein, 1054 aa, unidentified
  REGION 1..1054: note = Description of Unknown: Cas Enzyme sequence
MTTRLGLDVGTNSIGWCLVDVEADRIVDLGSRIFSDGREPKSGESLAVARREARAMRRRRDRYLRRRSVFLEELVRFGLMPSDVDQARLEAPKDPYDLRLRALDQALTPHEVGRVLFHLNQRRGFKSNRKAERKAKETEDGKIEGGAKALDAAMAEVGARTLGEFLAGRATKRVRLNGENQAYDFYPQRRHVRAEFDTIWAAQAPRHPGVMTDEARDRLAQVLFFQRDLKDQEVGFCTFAGWNGVPEDERRLPKAHPLFQERRLYEEVNNLRIVSPGAADRELTLDERDRLILKLRVTRKSSFSALSKLIKLGDGERFNKESETRKDLLGDEVFAEMSDKKRFGNQWSHFDLATQLEIIDRVQNEETPDVLFDWLKSKYGLDEDAAVAVGKAHLPEGYGRFGETATRALIDALKAEVITYDKAALAAGFNHSDQRTGEVWDQLPYYGQVLTGEIAPGKAEYGDADERRFGKITNPTVHIGLRQLQKLVNAIIARHGRPDEIVVELARELKLNDEEKKKHEARIRRDTAAAIARGELLAHEGITDTGANRMLMRVWEDLNPGNPLDRRCPYCGQQIGIRQVFNGEADIDHIIPYSQSLDDSAGNKVVAHRSCNRQKGDKTPYERWGHDDARWEIISAQVARMHRSKQWRFGPDARARMEKDGGFIARQLTDTQYLARLTRKYMAGLYAPDEGVRVYVTPGRMTAMLRRVWGLNSLLPDHNFVENEHSNAPKNRLDHRHHTIDAAVIAVTSRSLLQRIATAAAKAEEKELERLFEDLDPPWERYRDELKDRLSRVTVSHKPDHGRKGKPSRHKDVTAGRLHNDTAYGLTGETAADGKTPIVVHRVPFTSLKPGDIADPSRIPDEALRDALYDATRDLSGKSYDQALARFAAEHPVFKGIRRVRVREPLTVIAIRDRAGRTYKAYAGSSNDRYVVWRMPDAKWESHVVPTFSAHQRDFVDKRPHPAAKRILCLRQNDILAVEPGGGKTEFMRVVKFTLNGQVTLVPHNEGGKLDVRHKDPKDRLQITNPTASGLKRMKARQIRIDPLGRVFDPGPRE

SEQ ID NO: 307 - protein, 1052 aa, unidentified
  REGION 1..1052: note = Description of Unknown: Cas Enzyme sequence
MATRLGLDVGTNSIGWALIDGDQIIDLGARIFSDGRDPKSGASLAVDRRDARAARRRRDRYLGRRSAFLETLIQYGLMPADADDARLLTAKDPYDLRVRALDEGLDPHEIGRALFHLNQRRGFKSNRKAERGRKENEDGKIESGAKALDAAMAEVGARTLGEFLTGRETKRVRMGGESQTYDFYPQRRHVEAEFAAIWGAQAQHHPALLTETARAALHRILFFQRDLKDQEIGFCTFAGWNGVPEDERRLAKAHPLFQERRLYEEVNALRIVSPGAPDRELTLDQRDHLIMKLQGTRKSSFSALGKLIKLGDGERFNKESETRKDLLGDEVRAELADKKRFGARWGFFDLTEQLKIIARIQNEVDPEILLDWLKAEYALDEDTALAVARTRLPEGYGRFGETATRRLIEALKAEVITYDKAASAAGFHHSDQRTGEVWDRLPYYGEILTREIAPGKADYGDEDERRFGKVSNPTVHIGLRQLEKLINAVIKVHGRPDEIVVELARELKLNEEEKKKHEARIRRDTTAAIARGEKLTATGITDNGANRMLMRMWEELNPANPLDRRCPYCAEVIGIRQLFSDDTDIDHIIPYSQSLDDSAGNKVVAHRHCNRAKGNKTPYEKWGPDEARWEIISTQVSRMHRSKQWRFGPEARERLDKNGGFIARQLTDTQYLSRLTAQYLSSLYTPNEGRRVYAIPGRMTAMLRRLWGLNSLLPDHNFVENEHSNAPKNRLDHRHHTIDGAVAAVTSVSLLQRIATVAARAESQDLDRLFEGLEPPWPTFRDDLKERLAGVTVSHKPDHGRKGRPSRHRDMTAGRLHNDTAYGFTGQVAADGKTPIVVHRVPFASLKPADIADPTRIPDETLRDALFEATRDLTGKSYEQALARFAKQHPVFKGVRRVRVREALNVIPVRDKTGRPYKGYAGSSNDRYNVWRLPDGKWEHRVIQTFDAHKPHFIEDRPHPAAKKFMCLRQNDLIAVERGGVPIEIMRVVKFTLNGQITLVPDNEGGKLADRHKNPDDRLQIINPTVSGLKKMKARQVRIDPLGRVFDPGPRD

SEQ ID NO: 308 - protein, 1055 aa, unidentified
  REGION 1..1055: note = Description of Unknown: Cas Enzyme sequence
MPIRLGLDVGTNSIGWALINTDTGRIIDLGSRIFSDGRDPKSGASLAVDRRDARAARRRRDRYLGRRSAFLETLISHGLMPENADEAKLVEVKDPYDLRARALDERLEPHEIGRALFHLNQRRGFRSNRKAERGRKETEDGKIETGAKALDAAMKDAGARTLGEFLNGRETKRVRMGGENQSYDFYPQRRHVEAEFGEIWNAQAPHHPGLLTEETRAALHRILFFQRDLKDQEVGKCTFAGWNGVPDDERRLAKAHPLFQERRLYEEVNNLKIVSPGAADRDLTLAQRDALILKLRSTRKSSFSALGKLIKLDDGERFNKESETRKDILGDEVRAELADKKRFGDRWGFLDLDEQLKIIDRIQNEENPEVLLDWLKAEYGLDEEAAVAVGKARLPEGYGRFGETATRRLIEALKAGVVTYDKAAQAAGFHHSDLRTGEVWDRLPYYGQILTTEIAPGKAEYGDENERRFGKITNPTVHIGLRQLEKLINAVIAVHGRPDEIVVELARELKLNEEEKKKHEARIRRDTAAAVARGEKLEAEGIPDNGANRMVLRMWEELNPSNPLDRRCPYCGEVIGIRALFSGEADVDHIIPYSQSLDDSAGNKIVAHRSCNRAKGNKTPYEKWGHDEARWEIISAQVARMHRSKQWRFGPGARERLEKDGGFEARQLTDTQYLSRATAKYLSALYTPDEGRRVYALPGRMTAMLRRVWGLNSLLPDHNYVENAHSNAPKNRLDHRHHTIDGVVAAVTDIGLMQRIATAAGRAEEKELDRIFEELAPPWPTFRDDLKDRLARVTVSHKPDHGRKGRPSPNRDVTAGRLHNDTAYGFTGEVAADGKTPIVVHRVPFASLKPGDIADPTRIPDEALRNALFAATRDLSGKPYDQALARFAKEHPIFKGIRRVRVREALNVIAIRDKEGRPYKGYKGDSNARYDVWRLPDGKWVADIVSMFDAHRPDSGDRRPHPAAKKVLSLRQNDLLAVERDGETQILRVVKFSSTGQITLAAATEAGALKARDAAPQDTDPFKYIYSSGSGLKKMLARQVRIDPLGRVFDPGPRP

SEQ ID NO: 309 - protein, 1055 aa, unidentified
  REGION 1..1055: note = Description of Unknown: Cas Enzyme sequence
MTTRLGLDVGTNSIGWALIDTDAGRIIDLGSRIFSDGRDPKSGASLAVDRRDARAARRRRDRYLGRRSAFLEALIRHGLMPEAAEEARLLAAKDPYVLRARALDEPLTPHEIGRALFHLNQRRGFKSNRKAERGRKENEDGKIESGAKALDAAMAEAGARTLGEFLNGRTTRRVRMGGESQTYDFYPQRRHVEAEFAALWAAQAPHHPARLTETARADLHRILFFQRDLKDQEVGFCTFAGWNGVPEDERRLAKAHPHFQERRLYEEVNALKIVSPGAADRDLTPDQRDKLILKLKSARKSTFSALGKLIRLDDGERFNKESETRKDLLGDEVFAEMSDKKRFGPRWGFFDLDEQLKIIDRVQNEADPEALLDWLTTEYGLEEEIAVAVSRARLPEGYGRFGETATRRLIEALKAGVVTYDKAAQAAGFHHSDRRTGEVWDRLPYYGHILTSEIAPGKAEYGDENERRFGKITNPTVHIGLRQLEKLVNAIIAVHGRPDQIVVELARELKLNEEEKKKHEARIRRDTAAAIARGEKLAEEGIPDTGANRMALRMWEELNPANPLDRRCPYCGEGIGIRALFSGEADVDHIIPYSQSLDDSAGNKVVVHRHCNRAKGNKTPYEKWGHDDARWEIISAQVARMHRSKQWRFGPGARERLERDGGFIARQLTDTQYLSRATAKYLSSLYTPDEGRRVYALPGRMTAMLRRVWGLNSLLPDHNFVENAHSNAPKNRLDHRHHAIDGAVAAVTDAALMQRIATASSRAEELELERIFEDLAPPWPAFRDDLKERLARVTVSHKPDHGRRKRPDRTRDVTAGRLHNDTAYGLTGQMAADGKTPIVVHRVPFAGLKPGDIADPARIPDQALRDALFAATRDLTGKSYDQALVRFAEQHPVFRGIRRVRVREALNVIPIRDREGRPYKAYKGDSNARYDVWRTPDGKWIADIVSMFDAHRLDGGDRRPHPAAKKVLSLRQNDMLAVERDGEKQILRVVKFSSTGQITLAPQNEAGALKARDASPQDVDPFKYIYSSGSGLKKMRARQIRIDPLGRVFDPGPRE

SEQ ID NO: 310 - protein, 1090 aa, unidentified
  REGION 1..1090: note = Description of Unknown: Cas Enzyme sequence
VHTKTSFAFDIGTNSIGWCVFALDRMNDPVGILASGVRIFSDGREPKSGTSLAEGRRLARGMARRRDRYKRRRKAVIRTLIEYGLMPGDPAARRALVAETNDRRAGQIAVDVYALRARALDEKLPLHHIGRALFHLNQRRGFKSNRKTDRRDNDQGKIAEGISRLRNEIANTGARTFGEYLHRRRLEGKWVRVRPSRVPGKDDKPEEGYGFYPERSLLRDEFNAIWTAQARHYPEVLTEERRQHLETVIFYQRPLKPVQVGNCSFNPAEKRLPRAHPLFQEFRLYKEVNELALIDRAQQSSKLTRDQRDAIVTQLKAQREATFAALRKTARAPVGTRFNKETESRIKMKGDEVAAELAAKTRFGQSWFSFPLEERWAIVDMLRRLEDPLELTAWLEQNYALPPERIDAILAARLPEGYGRLGETALTEMLAELKADVIPEAEAARRAGYDHALLARDGGHDELPKYQEVIARRIPPGTEAPEDPYDVRKGRITNPTVHIGLNQLRRVLNALIRRHGKPEQIAIELARELKLNEEQKRDRNAEIARNTRAAERRSAKLVELGVPDTGYNRVLLKLWEELDLGAPENRVCIYCGQPIGIGTLFSSEIDIDHILPWSKTLDDSQANRLVCHVACNRQKGNHAPADVPQWQARYDEILERANCLPLNKRWRFGREAMKKFADEETFLARQLTDTQYLSRLAHEYLAALYPDEEPDAWGELARKNHVRVITGRMTEMLRRQWGLNSILADHNQKNRNDHRHHAIDAAVVGVTTRALLQRIATVAGNREALALEETIGKIDPPWPNFRDDLKTVIDRIVVSHKPDHGTLPRPGQMGQTAGQLHNDTAYGLTDEIDERGNPIVVRRKPFLSLTEKDIPNIRDAELRTRLHTATSGNKDFGAALLAFKENDPRFGGIRHVRITEGLKVIPIRDDAGRAYKGYKGDANYRYDVWEMPDGKWVAKVVTLFDAHQPDFDWGSLRPHPAARRVLFLQQGDMVAYDHPRDGETIGVVVKFGQNGQITLVPHTASGDLKRRDALPSTEEEAIARGIRDRNGDPVFDPFKYFAPTAGGLKKINLRKLHVDEIGTVRHLKRRGMEA

SEQ ID NO: 311 - protein, 1005 aa, unidentified
  REGION 1..1005: note = Description of Unknown: Cas Enzyme sequence
VLDTLTQFGLMPDTAEARKALVAETNDRSGTIAANVYALRARALDEKLPPFHIGRALFHLNQRRGFKSNRKTDRRDNEQGQIASGISRLGTAMDAAGARTLGEFLFKRREAGSWVRVRPSRMSGEDGKEEEGYGFYPERSFLEAEFDAIWAAQAEHHPALLTPERGEHLKRVMFFQRPLKRPKVGKCSFNPSEERLPKGHPLFQQFRLVKEINELRLVLPDLSSRNLTLYERDALVKQLTSQREATFASLRKTIKAPHGARFNKETESRTKLKGDEVAAELSAKSRFGQGWFEFAPERRTEIVLKLLEVEDPLALHAWLEAEFSLGPEQRDAIVGARLPDGYARLGPTALTEILAELRAEVIPEAEAAKRAGYDHALAKTGDALPELPKYQEVLARRIPPGSEDPDDPYDVRKGRITNPTIHIGLNQLQKLTNALIRKYGRPEQIALELARELKLSEDEKRKVNLDIARNTREAERRSEHLRELGQADNGYNRLLLKLWEELNPEQPLARECIYCGEPIGIATLFSAAVDVDHILPWSQTLDDSQANRIVCHKECNHQKGNHAPADVHQWTGRYDAILARAQRLPRNKRWRFGRDAMDKFKEEESFIARQLTDTQYLSRLAHEYLGALYDDEEPDEWGVFQRRNHVRVIPGRMTEMLRRQWGLNTVLSDHNAKNRNDHRHHAIDAIVVGVTTRSLLQRIATAAGGREALALEETIGKIEPPWPTFRDDVKAVIDRIVVSHKPDHGSLPRPGEGGRTAGQLHNDTAYGFTGETRKGVPLVVHRIPFGSITEKELPLIRDRRLADALYGAIRGLSGKDLTAALQAFAASGPYKGIRHVRIVEPVSVVPIRDAEGRAYKGYKGDANYRYDVWELPNGKWVEDVITMFDAHRPKSNGEDRRPHPAARRVLSLHQNDMVAYEHPDQGYTIARVVKFSPGMVAFAGNREGGALKARDADRDDPFKYFYKSAGAMKAVKLRQVRVDETGRVFDPGPQDRDSRAARRGIGRSA

SEQ ID NO: 312 - protein, 1137 aa, unidentified
  REGION 1..1137: note = Description of Unknown: Cas Enzyme sequence
MHKLVGGSLFAFDIGTNSIGWAVLGLDQKSEPRAIVDAGVRIFSDGREPKSGTSLAEGRRAARAMARRRDRYKRRRKATLRTLGEFGLMPTEIAAQKALLLETSDQSDATRADGPLTDPYNLRLRALSEKLPLSHIGRALFHLNQRRGFKSNRKTDKKSNEKGAIELGVDRLRTMMAETKAPTLGAFLAMRRAEGKPVRVRGGAVDGKGEEVGGSGTSYDFYPDRALLEDEFDRIWAAQAAHYPEILTEARRAHLRKVMFFQRPLKPAVVGRCSFNPSEPRVPRAHPLFQEFRLYKEVNELELVDGRQHHVKLDKEQRDRLVQFLRTTSTKGGKAKTHSYASLRTTLRVARDLRFNKEKGARESMLGDEVASALSAKDCFGQRWLDLSREEQWRIVDRLREEQDPDVLRNWLESEHGLSGAAAKAIAEVQLPEGYGRLGETALSTMLDYLKQEVIPEAEAAKLAGYDHALLRNGDAYDLLPNYQEVLERRIPPGTNNPEDPYDVEKGRITNPTVHIGLNQLRRVVNGLMRRYGKPERIAIELARDLNQSEEQKKKVNKRIAQNTRDAEQRSLKLRELGQRDNGHNRMLLKLWEELNPEKPEDRCCIYTGRPISLSMLFSGAVDIDHILPWSKTLDDSQGNRILCLREANRVKGNRAPADVAEWAGHYDEILDRANRLHEGKRWRFARDAMERFEKDRDFLDRQLTDTQHLARLAHDYLGALYPDEEPDGDGVLFRRNHVVVVTGRLTEMLRRHWHLNDLLHDHNYGETAKGKNRKDHRHHAIDAAVIGVTTRGMLKKIADAARQGENQGAEDAARQLPPPWDGFRDELREKVSAIVVSHKPDHGTLPSAANGKGKGQTAGRLHNDTAYGLLRTPLPNGDNVVRRKMLSSLKEGDLAHVADAEIRRRLQAATAGLSGNAFKEALLHFARTDPVFKGMRRLRVTETLHVIPISSGAPIPYKGYKGDANYRYDVWEMPDGRWISEVVSMFDAHRPRWVSEVRATSPTARKVLSLQQNDMVAYDHPTFGPVVGLVVKFGQNGQITLVPHAEAGDLKRRDALPSTEEEANAFAAKSKAGGKGEQIEFDPFKYYSPTAGGLKKIRLRQVRVDETGRVFDPGPQDRESRLARKAAFGLPPVNNK

SEQ ID NO: 313 - protein, 1103 aa, unidentified
  REGION 1..1103: note = Description of Unknown: Cas Enzyme sequence
MPYRLALDIGANSIGWCLLDLDAAGAPSGIRDMGVRVFPDGREPATGKYASLAATRRKARSARRRRDRYLQRRTALLNALTRHGLMPAEPIARAEIARRDPYALRLEGLHRPLTPHELGRAIFHLNQRRGFLSNRRAERTNKDKTGVIEAGIQALSSRLGGAPGMTLGALLAERHRQGLPVRFRPGGTATKVTYDAYPARQMILDEFDAIWSAQSGWNPALVPEAGAELRSILAFQRRLKPVLRGRCFLETSRRRALRIAPSSARFRIFSELAQLRLMLPEGERHLTAEERQDFATDLMAGEHLKFAVMRKRLGCKRSVRFNLENSKRSELNPCLAARILAGRKSGKSHEGPLRPIWSSLPLATQDAIVVALEMTDCEALAVRWLTRLGLAEAQARAAFARWNPPEMGTASLSRRAMLRMLPFLQQGMLYNDAALAAGYPSHSEWRTGEARDRLPYYGELLHERIGTARFEGDRERDPEGYWGRVSNPTVHIVLNQLRRLVNAILEREGPPDSIVVEMLREVAAGAEKRFDIMARQKENQERNRLIDARLAELNVRISRDNRDRYRLWEELGADPKDRCCPYTGQRIGCASLFADPPVFEVEHILPRSMTNDDGLANLTIAAVQANRDKMGRTPWEAFHGNPAYDWAWIESNLANLPEGKRWRFRRTARAEWEARQLQDGFLPRHFTDTAYATRLACLYLEVLAPANPAPRIWPVSGAITGMLRAGLGLNAVLRRQREALQQGKAMPLAGAPGPLKDRTNHRHHAIDAVVVGLVDRRLVQKLTRAAQDAEARGERTRALAGEGKDWPWPGFVAEVERKAAAIVVSHRHDVWPTGRLLEETAFGRARDPRGKTIEGMFVVRRDVGEIAAKWGPPDARKKGQAEVVDAKLGERVDQVLANTEDVAERVRELLAFGTPGKPVRRVRSRQPASTFHRIEHGPDMRGRQHEKFYESAANHAFQLWRLPQGVALEGQLRSPQGAWPRIVQLIEAAKEDSARRAAKERGQHWQRWRPHPAAELVLELCKSDMVAVGEGALRRIMVVRSIWDSTIVEMVDAHESGSSAPRKKAGFPLNIYRRSAATILSDGLRKVVVAPHGRVLDPGPLQW

SEQ ID NO: 314 - protein, 1027 aa, unidentified
  REGION 1..1027: note = Description of Unknown: Cas Enzyme sequence
MSALAEGTAPLKYRLGIDLGSGSLGWALLELDEHDRPCRIIDAGSRIFGTGREPKSLSSLAANRRQARQARRRRDRSIQRRKRLMHELVNFGLMPEAEEERQALKSLNPYELRHRGIRERLEPFEIGRALFHLQQRRGFKSNRKADRKNDEKSAMKAAIRELEAAVGPEETVGSFLYRRLTTHGSTRMRPTQRGGQNTWEFYVGREMLEHEFDRLWETQRAYHPELLTEEARQRIREAIFRQRPLKPVDPGRCTLEPDEKRAPIMLASSQLFRIFQEVNALRVIEGDSLDLRPRPLTREERDAAIALLRSKPKVTFAALKTRVFGKGADVRLTHEEGERAHLLGDVVSAELARDGALGSRWHDLTLDEQDEITRILHDADSDEDVVGALTTRFGFSEHEARGACEASLPDGYYRFSHKAIRRILPYLIDWDEDADAARTFDKAVAAAGYSSHSDIHSGEIFDQLPYYGRVLYRYTQDLANRSEDHVKERTNPDEWEFGRIANPTVHVGLNQLRVIVNAIVKRYGPPFQVHVELARELGQSAVKRLEASRKRSENERRNEALAQDLQALGQINNHANRERLRLYEELAPLDQMCVLCGERIERSRLFQPGVYEVDHILPFSRTLDDSFSNKHLIHTQCNRFKKNRSPYEAYGELPEWPQILERAEAAYRNTKAKLARFASTAMERYESGGQDFIARQLTDTSYLARVAREYLTYLRLSGDDGFHPERIVAMPGRLTGLLRAKWGLNDLLSSTGAKERSDHRHHAIDAIVIALSDRATLKAVTDANRRAADKYAASNDDGFRKLLDDLPEPWTGFTEDARAAIGRIVVSHKPDHNEKGALHEETALGVRGGPDKEGRFLVRKKGEDERWRPVVPVYRRGEGPDSSLPYKAYVGGSNYCIEIVRTSTGKWEGEVISTFQANQRDYQAFMRDRRRFLRESFSGRPLVMRLIAGDTVAIEREPGKREIWRLYKMSSAGQMYFAPVNEGNVAARVSAGLLKAFTPRADPLRKVRARRVFVDPLGRVHDPGFRE

SEQ ID NO: 315 - protein, 1037 aa, unidentified
  REGION 1..1037: note = Description of Unknown: Cas Enzyme sequence
MKLLIEHGLMPADPATRQTLEALDPWALRGEGLDRALTRHELGRALFHLNQRRGFKSNRKTDKKADDKESQGMKAGAVALAAKLDGETPGRRTLGDYFYTAHRKGRTPRGAPQDSVPATAPVRFRAHAGKGNKLEWELYPTRDMVEAEFDRLWAAQVAHHPDLTEEARAAIRDVIFYQRPLRPVEPGPCTLDPELDPRKRERRAPLALPLQQEFRILQELANLELRHRRTGQIRRLSRQERDKVLVELKRREKFSFSQIRKLVGIDAVWSFNLQDDRRDGLKGDIVAYRLAKGGFGKSWHDLPIDQQDDVVRFLLDEEREDEVIRVATTSWGLSAEAAERVANTALPDGYGRLGRTALAKVVHHLRQGVSARDGGLMHYDEAVQAAGYKHHSDFRTGQVFDTAPYYGQILERYMVPVSGTSGSDDERQYGRITNPTVHVSLNQLRQLLDAIIRAYGHPDEIVVELARELKQTQEQKRETQTRQLENQKKNERRKEQLKAANIALRGDALLRMRLWEELGESVADRACIYTGEQINITTLFSDKVEIEHILPFTLTLDDSPSNLTVSMRRANRDKGNLTPHDAFGTSPTIGGHLYDWDAIALRASALPKAKQWRFRPDALQLIKDRLLREEQRAKGSLPKDVMADIEKTGGFLARQLVDTAYLARVARQYLTSVVPSETVDGVTRSNVWVVPGGMTGMLRRLWGLNRYLWGNRPDAADEGPDDWRGKLRTDHRHHAVDAFVLTLIDRPLLNSIQYQAGQSGRRTIDDMPDPIRWPTFREDLKARFDRIVVSYKPEHSPSGRLHEETAYGIVRDPEREDGATLVYRKAFADLNANEIARIRDRHLRTQVLAAVDGIPADKKKLKEALTTFANGERQSLRHVRLLKVERGVERIADRRTGRAYKAVIPGENHAVDVVETADGRWFGEGISVYAANQRHTTPPWKQSHPDARLIMRVHKGDLLKIDHDGAERIFRVVKLAPGNGRFVLAGHLEAGNLEQRHSDSSDLFRWVFLAFGQMKNRRARKITVDHLGRTKDPGVPR

SEQ ID NO: 316 - protein, 1026 aa, unidentified
  REGION 1..1026: note = Description of Unknown: Cas Enzyme sequence
VHRMITLGIDLGTNSLGWCLIETKGEPGSHGEGRIIDIGTRIFSSSEMAGRDAKSKESLAVARRQARTMRRQRDRRLRRKGRLLRQLIEFGLLPQDEPERKRLLRETGDGKGADLAHSVYALRARALDEALPAHQLGRVLFQLNQRRGFKSNRKADGKDNEAGKIAVGVSRLHQAMDADGARTYGEFLHQRRLAGKSIRTRLRPEQAAETNPDADAKGDGYDFYPDRAELENEFDRIMAAQAAHHPELLTEERISALRETILFQRNLLPPKVGKCSYNPDEIRLPKAHPLFQEFRLYKEVNELALLDEHQVSHKLAPEQRDALVLKLRGAKTASFASLRKVLKLGPEYRFNKETETRTKLDGDAVAAALSAKECFGPVWSTYSLDRRREIVRKLRDEADPETLRAWLRDDCGLDEMRVEAVMKVRLPEGYGRLGETALAHLLDALKHDMDENGRVITEAAAARKIYGRTNSEDDPNREALGVLPKYQEVLTRHVPPGDGSPADRPDDKDPSYDRHMGRITNPTVHIALNQLRRVVNALIRKHGRPDRIAIELGRELKLTDRQREEVNRVINKNTRDAERRSEELKKLRQADTGYNRLRLKLWEELNPGQPLNRVCIYTGEPIGVHDIFSAEVDIDHILPYSKTLDDGLANKILCKTRANRVKRNRAPADVGEWEAIYDDILARAGNLPKNKRWRFGRDAMDRFSENEGFAARQLTDMQYMSRMALSYLAALYPAEEADIDGVLRRHSRIRALPGRMTEMLRRVWNLNDILHDHNFTDPTKPKNRKDHRHHAIDAFVIACTSRALIQRIASASEEIEAQGSEKVLAGVPEPWAGFREELRDRVLDSVVSHKTDHGTVSRTGYANGMGQTAARLHNDTAYGLTQELDDNGNPLVVRRMMLDAFESQKDLMAIRDEDLRDALWEATRDLSGKAFKQALRDFSRAPRLNGAANPFRGCAVSGCWNRCTSSRSATGTAGLIRLTRAIPIIVTMSGNWRMADGWPRSCRHSMPIGRIGGRGSGRRTRRPRKC

SEQ ID NO: 317 - protein, 1225 aa, unidentified
  REGION 1..1225: note = Description of Unknown: Cas Enzyme sequence
MPTPFARIPGRYDDTARRQEIDNAIGRRRRSTRVANLGVFTGYRIGLDLGNGNIGWGILFERERTPFFMTAETLAAHNASLPPGATRTQLPDPHLFVPLGTHKFEARNSDGKALSKVRAEARAKRRTLDARQRRRWTLKQVLQRHGLYPTAAEATRGLTIPGRQGPVPVKADVLRVRLLQPGTASHPHDLGRALYNVLKRRGWMQVLGRTGAQETSAFGRKATAAYKAALDKFGCRTVGEFLNRCQHDALIADHRRIRKRHKTLAWQETHKVKQRKPEDLQHSFQVMETLSPTFELMWEEACALRVAQKDAVPISDEAWQEIREAADFRRPLRPKEPGLCEFLPQKRRCVRALPSFQQFRILQQVDNLRQDGRELPEHVFEQIVDHLCTRDRSTVQAVGRELGLRRLGLAEKDQSRALAGAKTDVGLAEVLGPGWMEIEDIEQRDRWTMRFLRRHPMPVVDSPPRAWSPDDEERLKRDAERAFGPGALERVDERASQLFDDKFANISTLAARLLSKGIRQRLPHEERLAILQREGGMESPHIDLYERLPYYARVMPDLAVPAANFAPLERTAEEERECGRAANPDLHVVLNRVRKVVNAIIDMMGGILPTQVIVEVAREALSEEAAEKHGKVVRDRTALREAVVADIARVLDGQRMPVGPSLDRIVDRWLAAIRQGWRDYDGSEIAKSHLVDGTIYQLDHVVPAAFGQFQKDNLFVSKTALNRRKGRRLPWEAFPELRPELMTFALFGKRRQLEGLKAAETRLRRGSVSRRELDRIGARITSLQQELEALCAANPAADDPRILGSLERTRSTRLESLLDPAGTPDDARGSGRGPVRPGEQAALFARLGPDAAVPEEQHQARDVANIGWSTKVTTRYLGCLGPRTLTVKPWAVHALRCMFDINKERKDLRNHAVDAFLIAHFDEHVMRPAFARLRGTRYEDLYTAKPLEDALGEVSDGPAVFDAFRENLRRLDDILPTIATAHRPDNKWNPGDRPGGSFGALGGENIYAFRPDKDALARLSKIVNNARGIENGPTYTKAQLRALLEAAVDQINDPAERQACLALRKATTLSYRGRKKPVSFEIFVKNKSNPGSFLNISGKFGVTSRKNVSELEIISIHDFSKSDISKRNSYFSPELIFYRNSDCIVYNGFLCTISAFSENNQITIFPVDDIQVKSNRIQPTVKKFPSKLLEKFPSDVLGRRLHRRRKNPGDLQPVPYPLLRREDRG

SEQ ID NO: 318 - protein, 1060 aa, unidentified
  REGION 1..1060: note = Description of Unknown: Cas Enzyme sequence
MAKIRYRVGLDVGANSIGWCVFQLGSGDEPEKIVRMGSRIFSDGRDPKTLASNAAERRQARQARRRRDRLLKRRQRFMLALIEGGLMPTGDAERKLLEVSDPYALRAKGLDSALTLHELGRALFHLGRKRGFKSSRKDRKDADTAKELGKVSSAIAALKERIAEANCRTVGEYLASQRASRLPVRGRRSADGGYVLYLQRDMVAEEFDTLWEAQLPHHGASLSEELREKLRDILLHQRKLLPVLPGRCLFENTDYRAPLCSPLQQRFRILQELNNLRLVEGRSESALTLDQRNLLRDALLSSSKLTFSEARNLLGVPKRSAIRFNLEDGKRKDLKGDFTSVQFVRADALGERWWTMTAPQREALALLVERADDAEELAAALRNLPSSIDAAKQAARLQAHEREALDPLLELDSGFTEAQVHTLAKIQLAEGFGSLGLKALARIVPALEGSVITYDQAVQAAGYAHHSHFYTGELHMQLPYYGELLTGYTSPMPRSHVGTERLHGRIPNPTVHIGLNQLRLLTNALIKRYGHPEGIVIELTREFGLSGERRREIQKEQEQAQDRNQRLNTELEALGIRPSRENRQKLMLWNELGKADALSRRCVYSGRSLSKALLFSDEVEIDHILPFSRSLNDGVGNKVLCTRQANRDKGDRTPFEAFGHSPGTYQWDDIEARIAELPVRKARLFREDALETFLDGREFLDRHLSDTAYFGRAARQYLSAICPPARIAVSSGRLTSLLRGKWALNELLSEDRSKNRDDHRHHALDAAVIGICSRSLIQRMATAAARAEADGQNRLLERLELPWPTFRDELRRMLTGIVVSHRPDHGTEGALHNDTNYTWRGDADKTGNLLVGRRVLVEGFSKAADVEGVADPELRAALLACTEAGDKKEVKAALVAFTTATGVRRVMKEERLAVIAINDRRTGQPYRYVKGDGNYCYDIWQKPDGRWDGEVINRYAANRRDFDAMARHRADGTPLRMRLRRNDLLAIEPENERRIMRIARLSDGKITLAEHREANVDARARDKASAFNYTLKSPGALRELRARPVGVDVLGYVNDPGWRE

SEQ ID NO: 319 - protein, 1083 aa, unidentified
  REGION 1..1083: note = Description of Unknown: Cas Enzyme sequence
MSDQWGNLVGRNAAEGGSSVGLRVGLDIGIASVGWCVIDPDAEQIVGVGVRIFQRAENPKTGASLALPRRMARSARRRLHRRRIRMQRLRELYVSTGLLSPDAIESTFVLTPNDKTPYELRVEGLDRRLSEREWSRVLSQLCKRRGYKSMRLGEEKDSDDGVVKAAIAANKQRMAEMGYRTAGEMLLLDEAFAEGKRNKGDYKGVISRELLLDEIALLFEAQRTAGNPFASTDFEHQYLEILTWQAPIKEGDELIAMVGKCSIDGKNRRIPLACPTFERFRLFDKLHNIRYTPSPGQPRVGLSAEQRATVVSKAFELVTPRTYADVRSLLGLPLEARFVGVRYDSRTPEDTSAEKKEKLPHPKAWHEMSKAVKALSPELWARLARQPELLDQVATVLTYYKYDESVERELTALGLDADVVGALRSLRFSGNGHLSRETLTTILPHMEQGLSYSDACAACGLHHSKAEETRRHTKLPAIPADELRNPVVLRALSQSRKVLNAIIGEFGPIQGLNIELGRDVARSYDDRRKIERTQKKNRDANESVLEDLRSKYGKANPRPVDLVKHKLWQEQGGKCVYSGTPIDPIRLVSGEPGIAEIDHVLPHSRSFDDGYMNKVLVTTKENRDKREQTPFEYMGGDPDRWHEFEERVLSMHLPRPKQERLLRREFDERAAEEFRDRNLTDMQYIARFFKDFVEQNLEFEGDAKLPVMTVNGRATAYLRTAWQFQKVRADGDLHHALDAAVIAATTRSMVQQVSRFFSVRPLRNPDGVYVDTRTGEVIDAKHVPEPWEGFRVQVEALLESKFSADPFADLQDAELSPKPILVSRMPNRTVRGEAHKETVKRLEGNDEKGRIKTSKKVRLEDLTPRLLQNMVGAGQDRDLYDALDRQLAAHQGDGAKAFKEPFYKPTRLGRTAPRVRSIRVYDDPSSGGTAVRGGLADNGVMVRTDVFEKDGKYYLVPVYLKDVAAGVLPDKAIVQGRAENNWRPIDDTYRFAFSLHINDLVRLVKKSGDGADTWFGYFKGTNRSDGGILVEPHDSSADPKKLGVAQGVISFDKIDVDVLGREVHRVMRGHRHGFSNRGDRERS

SEQ ID NO: 320 - protein, 1042 aa, unidentified
  REGION 1..1042: note = Description of Unknown: Cas Enzyme sequence
MAHVKYRLGLDLGTNSLGWCVYRLDQNDEPDKIIRMGSRIFTDGRDPKTLASLAATRRQARQARRRRDRVLKRRQRLLQALIRYGLMPQNVDARKALQQADPYELRARGLDQPVAVYELGRALYHLTRKRGFRSSRRDGGNAEEEKETGKVKEAIRRLREQIQTARCRTVGEYLARQHAERLPVRARRSSDGQYVLYLQRDMVAEEFDLLWQSQRRFHPDVLTDAARDYLRDTLLFQRKLLPVLPGRCLFEGDELRAPLCSPLQQRFRILQELNNLRLIEGGAERALSLTERNVLLELLLRNREVSFAKLRHAIGRGRSSTARFNLESDKRKGLKGDLVGTQLGASQCIGDAWFRWPLEQQEELAMLVASADQKDELLATLCAGPWQLAMDTANAVADCRLPDEYGNLSRKALLRIVPELEREVVTYDVAVQRAGYAHHSQLHTGEFFERLPYYGQILRGYTAPAERARVADEKQYGKIPNPTVHIGLNQVRQLVNALIVRYGHPHEIVVELTREFGLSGERRREIDKRQADNQRRNERYDAELERLGQRISRDNRLKLQLWDELGSDDALDRYCIYSGQRLSKALLFSDEVEIDHILPFSRSLHDGVGNKILCTRQANRDKGNRTPYEAFGHSPGTYRWDDIAARVERVFAAGTNPALRHKARLFRTDALEAFLGDQNFLSRHLTDTAYLARAARQYLSYICHKDNVWVSSGKLTGMLRGKWGLSALLSDDGRKNRNDHRHHALDAAVIGICSRSLIQRMAIAAGRAEEHGENRLLERLELPWHTFRDELRECLHQIVVSHKPDHGREAALHNDTNYGWRGEPDKKGAPLVGHHVPLESIVKAADVERVADVELRAQLRTLLRPLDSTKDIKAALAAFSERTGIRRVMIEERLSVIPIHDRRTGQPYRYVKGDGNYCYDIFRRSDGRWEGSVISSFQANQEADASKTGSASDGGEHVMRIHKGDILAIEDGAVTRYMRVARFSAGIIALVDLHEANVDARTRDKSDALSYFFKAPGTLRPLRARQVGVTILGYVNDPGFKD

SEQ ID NO: 321 - protein, 1098 aa, unidentified
  REGION 1..1098: note = Description of Unknown: Cas Enzyme sequence
MNSWRLGLDIGSNSIGWAVIELSQPDDNSAFTPAGLVDMGVRIFPDGREPAATDKKTGMPRIGESLAVTRRMARGMRRNRDRRLQRIRAFADKLVEFGLVEQHGVAGRHEYKVGIIDLGIDPYEARSNAATTQVSKEQLARALFHLCKRRGFLSNRKADGEDKESSERKSAMNGLAEILQKRELTLGQYLKKRIDAGLHVRFRGEEFDDSENSAIYPKRSMYADEFAAIRKVQGNRFFPDEQWDELFDIFAFQRPLLPKEPGACSFEHGRDGREKHPRASRHLPITNSFRILQEVNNLRYQSTDGEMELDADQRQVLCEALEHQKEMKFSKIRTLLKLKKTSKFNLESDRRKGLKGNATACDMRSLFVAHDMVWDDLDTDIQNDVVQTILDADDLTDFIVANRKNEWLLPPELVRELSQKYYPSSHGHISRRCMEKLLPLMESGMQYWEAAREIYGDHTDYSQFATGEVLEELPYYGEVLRGTTTPVRVTPTTPEDEKTYGKIANPTVHVALNQLRKLINALVKRYGSPYEIHLELARELKTAGKSYQELLKGLADNTKKNEMRRKMFEECFPGQTPSGLDMVKMRLWEELAEDDGDGGSPAMARMDVYTGRTIGFRQLFSDEIEVEHILPYGRTYDNSIANRTVTFREVNRRKGGDKLPYDFANVDTEIDAEDMLARAQRLPRAKRWRFQPDAAEIYERILTKNMTASERKQYDADSSGAFIDRQLVDTQYISRIAARYLVPVVGAPSRVIPVNGHVTNLIRNKWHINAVKAKGKENERQDHRHHAEDALIVALADRGLIKRIADETRIQQKGRKDYRAKLRFPERPAWVTDERIKEVADRINVSFRQDHSREAKLYQETAYGLLPEGDRWWKKGYNAVMRRSITSLKESEINQIRDDAVRKAVVDFLYRPEVQSIKKWEDRLALLARTKLQIGSAVKKVQIRRVRIVIKNQSVRQIPSAPYKGYVPDSIAFCDIWHAPKYNKKGKANGKWGYVGAFVNYADAIRFEGEEDSLHEKYKPHPAAKKIMRLFKNDMVMLSDSLGVESPFRVAGYATTANKIDIQLHTESAGKQNFKAIPVLMEKMFMRKVHVDVDGRFS

SEQ ID NO: 322 - protein, 1132 aa, unidentified
  REGION 1..1132: note = Description of Unknown: Cas Enzyme sequence
LLPKGIGAQKLLKYLFSFDLGTNSIGWWVYELDPTGEPSASKDGGVRIFSDGREPKSGNSLAEGRRVARGMARRRDRYKRRRKAVLRTLSEYGLMPADPKARAALVAETGDAKEGQQASDVYTLRARALDTRLPLHHIGRALFHLQQRRGFKSNRKADRKANDNDKGAIALGADRLIFEMREDGARTLGEFLAKRRGHDPSARGNVRVRIDVDSGDQTTDDGKPAKPGYNFYPQRAMLEHEFNCIWDAQAAHWPDVLTDARKAHLFRVMFYQRPLKAPIVGRCSFNPSEQRLAKAHPLFQAFRLYKEVNELEIVMPDQSHRKLTLDERNALIAKLRSVKSAGFPALRRTLKLSERGARFNKEGEARDKLLGDEIYSALADKTIFGGRWAKLSVERQWEIVEKLREEADPFALHQWLVEHAGLSDDEAVKAADVKLPEGYGRLGPTALNAMLEELKAEVITEAEAAKRAGYDHALARVGDAVDVLPRYQDILERRIPPGTNDPDDDYDIRKGRITNPTVHIALNQLRAVTNRLIARYGKPERIHIELARELNQSEEQKREATSRNAKNRREAERRSKCIEDMNEGFRNQGSRSRIDDNGHNRQLLKLWEELNPDCPHDRRCIYSGTVITPTMLFSGAVDIDHILPWSRTLDDSQANRLLCTREANREKRNYAPSEVPQWADRYDDILARAQRLPQPKRWRFAHDAMARLEKDRDFLDRQLTDTQYLARLAHDYLGALYPDEEPDGDGVVKRRNHVVVVTGRMTEMLRRRWGLNGILPDHNFADPTKAKNRKDHRHHAVDAAVIGTISRSLLKRIADAAREGEAQGAEDAIRAIQPPWPSFRDDLKAVVDRIIVSHKPDHGTLPKPGDRGRTAGQLHNDTAYGLAKDDDSNPIAVHRKPFLSLEPKDLPSIRDPQLREWLEANTKGLSGKDFTARLMKLRKDGDNRRARRKKPGRYSGSPFQRIRRVRVVERLALIPIHDATGRAYKGYKGDANFRYDVWEMPDGKWQADVVTMFDAHRPDIDWQARRPHPAARKVLSLKQNDMVAYEQPGVGFAVGRVVKFNTAGQIYFAGHLEAGALKARDADPDDPFKYFSKSANGLRDVKARQIRVDEAGRMSDPGPRDRSSRGRKAPPG

SEQ ID NO: 323 - protein, 1060 aa, unidentified
  REGION 1..1060: note = Description of Unknown: Cas Enzyme sequence
MKKHVRYRLGLDLGANSLGWCIVQLDDDNNPIGLIRIGVRLFRDGRNPKDMASLAVARRMARGMRRRRDRWLKRQKRFMAALIDYGLMPADETARKALSTIDPYSLRKRGLDEALTPHELGRALFHLNQRRGFKSNRKVDKADDKDSGKIKSALKDVRERLTAQGARTIGEWLAVRHSERQPVRARLRGQGAKAAYDLYIGRDMIADEFDKLWAAQTALQPAICTAAAGAELREILLRQRPLRPVKPGRCTLEPDDERAPLALPSAQRFRILQELNNLRFETALGESQALSLEQRNLFAKLLEGMTGDGKRDKADAHGLLKFDTMRRMLGLGDHTKCNLESDKREGLKGNATSLTLAKSDRFGAGWHSLALDQQDAIVDKLLTVESESEIVSWLMQEHGLAEANAIKLANTGLADGHSNLGRRALARVLPPLQANVITFDKAVIAAGYAHHSQLHSGEYFGNTALPYYGQLLQSAVGFGSGDPKDTDEKRYGRIANPTVHIGLNQVRRLVNAVIERYGPPTQIALEVTRELKQSQEQKDRVQKQQAENQRQRDADRADLAQWGQRDTGGNLLRMKLWLELKRAGDGIARCPYTGRVIGQDKLFSEEVEIEHILPFSLTLDDSIPNKTLSYREANRYKKNGTPFEAFGQSLHGFDWESIQQRASALPHNKKWRFAANAMEMFREKHGDDFLARHLTDTAYLSRTAKAYLSYVCHPNDVWVTPGRLTALLRGKWGLNPKGAKDRNDHRHHAIDATVIAVTDRGLLQKMSTLSGQERLERLRDRILVPYPWEGFKEAIEAALPRVVVSYKPDHGHQAGLHNDTAYGFAEPYEAGKASKVVHRVPLLSLKKPTDLESIRDHSLRERIKSATGGTEGKEFETKLAAFASKTGVSRVRVTETLTVVPLHRDVRAGERGGEDRSQPYKAYKGDGNYCVEIYRDENGKWCSNILTSFEAAKIARHSSARLRQKSWAVNGRPLVMRLCADDTVAMELDGGARKLFRVNNFSTNGVFFAELHEGNTDERNRKKIDGYHYISKSASSLFTAKARRIFVTELGFVLDPGFKP

SEQ ID NO: 324 - protein, 1025 aa, unidentified
  REGION 1..1025: note = Description of Unknown: Cas Enzyme sequence
  MOD_RES 394..397: note = Any amino acid
MESLVNREVGGLGKPRYLVMGMDPGIKSCGFALLDLNNQEILEMGSRLFDAPTHPKTKQSMAVIRRGYRSTRRNIDRTQDRLKHCLKTLKRFDVVPEDADKEFFHTVKGDKQPILLRTDGLNRLLTSREWALVLYSLCKRRGYIPHGEGSDSGTSEDGKVLAALKANERAFADAGYRTVGEWLASLPQSRNRGGNYDKCVTHAQLTDEVRTLFEAQRGFGSPVASQELEDAYIEVFDWERSHEEFDKRTYGLVGTCSYFPNEKRAARCTLTSEMVAAYGALGNITIVKRDGSTHPLSAVERDQCIDILFAVDPMKGNKTCAVKYGFLRKRLDLESGDYFKGVPLDDEKNREVFKPKGWRSLRSVLHETNRELLVKLHDDRDLADAVMEAVAYSXXXXLKSQLSSLDLSNGEIESICAMPYSSKVLNGYGNRSKKALDILLGCFEDPDVLSLTDAEDASGLGAVRMQGAAIDKGERLIPYETWIALTGRTNNNPVVIRALSQMRKVVNAVCRKWGVPDEIHVELDRELRLPKKAKDEIAKAKKRNEKDRQRVAAQIAELLGCSADDVKGDYIEKYRLWEEQECFDIYSGEKIEVDRLIREETYTQIDHVLPFSRTGDNSRHNKVLVLARSNQLKREQTPYEWMTSNTEGAPSWDAFKRRVEENKKLSRRKKNFLLEKDLVSKEGEFQSRNMTDTAYMSREVCAYLSDCLQFPDDGLKNHIVPIAGRATAWLRRQWGLNFGATGEKDRSDDRHHATDACVIAACSRSLVIKTAKVMKQTHWQVTRDMTREQRRSARMKALEGTMPWSTFANEVRERWKVTVPTRFVPRKGRGELYGQTVYSYLGVDESGKDLGRKKGSNKKIVMGNAVISKDGKSMVKISEMLCLRLWFDPDAKGRGGKKGRWYSDPVYKADLGVIQSNAYIPRVAKAHRGRKAWSPVPQAALRRSPVVIYLGDVVKVGDVVGRFAGFDIDSANWSFVDCLDGKGIAFPTVGSLTSELRPEVIREKVLGNAEVYRSTQDDGTSSGAD

SEQ ID NO: 325 - protein, 1004 aa, unidentified
  REGION 1..1004: note = Description of Unknown: Cas Enzyme sequence
MEITINREIGKLGLPRHLVLGMDPGIASCGFALIDTANHEILDLGVRLFDSPTHPKTGQSLAVIRRGFRSTRRNIDRTQARLKHCLQVLKAYGLIPQDATKEYFHTTKGDKQPLKLRVDGLDRLLNDREWALVLYSLCKRRGYIPHGEGNQDKSSEGGKVLSALAANKEAIAETSCRTVGEWLAQQPQSRNRGGNYDKCVTHAQLIEETHILFDAQRSFGSKYASPEFEAAYIEVCDWERSRKDFDRRTYDLVGHCSYFPTEKRAARCTLTSELVSAYGALGNITIIHENGTSRALSATERDECIAILFSCEPIRGNKDCAVKFGALRKALDLSSGDYFKGVPVADEKTREVYKPKGWRVLRNTLNAANPILLQRLRDDRNLADAVMEAVAYSSALPVLQEQLQGLPLSEAEIEALCRLPYSSKALNGYGNRSKKALDMLLDCLEEPEVLNLTQAENDCGLLGLRIAGAQLERSDRLMPYETWIERTGRTNNNPVVIRAMSQMRKVVNAICRKWGVPNEIHVELDRELRLPQRAKDEIAKANKKNEKNRERIAGQIAELRGCTADEVTGKQIEKYRLWEEQECFDLYTGAKIEVDRLISDDTYTQIDHILPFSRTGENSRNNKVLVLAKSNQDKREQTPYEWMSHDGAPSWDAFERRVQENQKLSRRKKNFLLEKDLDTKEGEFLARSFTDTAYMSREVCAYLADCLLFPDDGAKAHVVPTTGRATAWLRRRWGLNFGSNGEKDRSDDRHHATDACVIAACSRSLVIKTARINQETHWSITRGMNETQRRDAIMKALESVMPWETFANEVRAAHDFVVPTRFVPRKGKGELFEQTVYRYAGVNAQGKDIARKASSDKDIVMGNAVVSADEKSVIKVSEMLCLRLWHDPEAKKGQGAWYADPVYKADIPALKDGTYVPRIAKQKYGRKVWKAVPNSALTQKPLEIYLGDLIKVGDKLGRYNGYNIATANWSFVDALTKKEIAFPSVGMLSNELQPIIIRESILDN

SEQ ID NO: 326 - protein, 1121 aa, unidentified
  REGION 1..1121: note = Description of Unknown: Cas Enzyme sequence
VILGLDLGVGSIGWCLIEHSISHRDVGEEGGAKIIDMGVRIFPAGSEGSERDWASGKEKSLAEPRRMARSMRRQRERRRRRLIALAHDLQRLGLFPTEPVETPVERDEFFKKLDATLRPPAVAPTVEHHTWLHRLFAAGIEGTKLTPHQLGRVLYYAAQLRGFQSNAKERGKAKQDPKNASVVYTGISKTRALRTSPDEALVATLARLNPEADGQRIRGRYTAREDRRSDVERLLAAQAVHYADVLTDATREKLLKRIFDQRPLKNNSHLVGRCALYPDEPRGELALPSLQRLRILQKVTDLEVIPPDGDRMPRPLDAVQRALVRDHLYSHESISFTQLRKLLGFPAKKPKAKADNPSLPPIQPPFHEFNLEREDSDEKLIGDRTHCALAPLLGEKWNDLDLAGRDELVATILEAEDEETAKEALIARYGVDNELAQAVVERALETDRGRFCARAARELCTRLDTSEDKPTRLATALESLRGRTSPQERAAEEGLDFLPPYLPSHPGVEAFHDSPHALRNPSVLRVLRELRLVVNALIRKHGKPARIRIEFARELKNPPKKRQEIARRQKERESEREKARKMLVELGLRSNIVAVTPTDIEKWLLGEECAWHCPYSGTPIPPALVFGDTGAVQIEHIIPRSISFDNSFANKTLALAEWNIRKNNRTPYTAFSASPEWPEILRRVAGFVGSGARGKLARFQWDEREIEVRYGGFTSRHLQETAWAARLAKDYLAVLFGAEKTDAIDATGTRRIETISGVATGLLRQAWCFSEALLQSPQLPKLPPDSEDRPKSGAADKLRIDHRHHAIDALVVALTTPSAIAALSSALASEQDLRRVRLPLPSANFENQLREKAESIIVSHRVNRRVAGPLHKAIYYQAPRPNGRRFQRKELKDLKTGDFDYIVDARIRTAVLDAWAKRPANQNDPANLFGTPENLPRLADGTTVKRVTLPIKEVTTVALGSPETPARQLHVLTGGNFCVVIVECPSKNAKGKPHWEFRPITLLDAARAIANRSNEDRRTPLSPAQMLLGDDALKPGEKVVFTVRSSEALRLRKGPKKGIIVVGTASKDGIEGAYHHDSRGDAIRKRLGASERIRLSPTALKEADTQKVVIGPLGEIYPARD

SEQ ID NO: 327 - protein, 831 aa, unidentified
  REGION 1..831: note = Description of Unknown: Cas Enzyme sequence
MGLPSLQRLRVLQRINDLEVTPPGEQTRPLTGIERAKVRDYLFVHDDITFTQLRRLLGFPAKRPQRKGDSTRTPFHEFNFERENSEERILGDRTYGVVAPVLGEAWGRFSLAQKDALVADWLGADTEDEAKERLITRHGLSEDQATALVEVALETSRGRFCAASARSLCERLDTMDDTPVRLATALKALRADRGLSTSAADKGLDFLPPYLPTHAEVEAFHDSPHSLRNPTILRVLRELRLVANALIRKHGKPDRIRIEFARELKNPARKRQEIDRKQKARAAERERARQQLVENGYRPSVAAVSSADIEKWLLGEECAWHCPYSGEPISPNRVFAPQSDVHVEHIIPRALSLDNSFANKTLAVADWNARKARRSPHAAFSSSDHWPDILRRVSGFIGAGSRGKLARFQWDDEELQRRYGGFTARHLQETAWAARLAKEYLAVLFGAEATDAVDATGTRRIETISGIATGLFRQAWNCSEALLQSPKLPKLPTDAPDRPRTGAADKIRADHRHHAIDALVVALTSPAAVRNLSMALEREVDLKGLRLPSPAPDFDAQLRSALEKITVSHRVNRRATGALHQATYYQAPRADGRRFQRVALEDISAPEKLQAIIDARVRAAVLAAWDKRGDFRGDPSKWFAAPANLPRLPTGAIIKRVTLPIDRIETVALGPVDDPNRQLHVKTGGNFCVVVVESAPTGKKTQATWSFRPITLLDAARQIMSRPGGVNAPPLKPAQMLTGEHRLKAGDKVLFTLRSSEAILLRKGARQGVVIIGDVGAAGIEGALHNDARGASIRKLLGASERIRLSPSALKAADPEKVTIGPLGEIHPARD

SEQ ID NO: 328 - protein, 1099 aa, unidentified
  REGION 1..1099: note = Description of Unknown: Cas Enzyme sequence
MLNSVADIVTTKSVSLVWAFDLGKASLGEAVRFGDEFLHTASWLIPEKLAQRGPATEAGSPASRYRAMKTREAHLAREARLRTICAEAGIDVLAAKRTERDPQTKKFRTVQEADEKLTREFPRKGDDTCYTSCLLRIKLLRGEPLAGWQVFKALHSAIQRRGYDAELAWKNRGRKKEEDEKDSGDTKKLADAFRAELEKIAPGISGFHLPCYLDASRMGLWNPAQPDAMRLRIDHLAGPARNRNGVPALVAPRDLVVAEARQLLEAAAKLFPKLAGRADEILFGPGGKAYASFYSNLRKAHGLRRGGAGDWDGILGQKVPRFDNRIIPKCALLPRLNACSAAPRQLADGTFAPESLLAAECTFLKKLHDASVQRGTGGIDQLTPAELRQLFESRHDEGPTNYSFTERQWERGLERLGLRPAPGHSEIAKPNLTGRSRFCRPVLRILRDLLLSGRTPLEQHALELEKLAGNTNTQRGLVPTDLAFLRRMGDSWTGLSVPDQQHVQLLTLRENEGRDAAIRALIGSCNNPIVRHRLEVFWKRLQALELGSKDNPAFGVPDEVVLEFVREDFMGPEAKQKLKDFQTKRAAARKLAREDALKLDSTGKGTALKLELLRAQGGECLYTGAQLAPTDVDSLVIEHIVPRGSPYFGPDAMVNYTVTKQMTNAEKRKRTPYQWFQDRGFPLWDVYVARVKKHATSLRAKKVRLLTEPDAAEQVQRYTALAETAYIARLAQTLTALYFNWPFGSQEGARRITIVNGGLTARVRRNYKLNSLLNPCPADKNPRDWEETCEKNRDDDRHHALDAMVISFIPGWARDPGKEGFFRLPKDITRDMFAAKLQATFARPLAYERSTLAETAYAGRIGEDGRPIITQRVKLLSLGYRSENMKQVFSVETAQKKTPDIRDSNIRQLVMTFVASDFDEAAWQKFCSEVRVTRPDGSPGARIKKISVYFAEPDEYKDLAKDGSGAWRKRFAEHRGQFIFLNSVGEAGACPVYAFDSAYQVRERLAAKGLTPLMFLQSGCLVQTTGVTAHARQPLLAGTFLLNSVRSNTDAQLRITKRSYVQLSLQDGTTYRAKPKPGQRSIPLYQLQTLLAAGFRRAD

SEQ ID NO: 329 - protein, 1007 aa, unidentified
  REGION 1..1007: note = Description of Unknown: Cas Enzyme sequence
VLAAKRVARDAADKKKWSVICEADPRLTREFPKAGDYTCYNSALLRIQLLRGLPLEGWQVFKALHAAIQRRGYDADLPWKHRVRDDSDADEDGDTARRAGTYRDVLSQIAPNQPEYQLPCYLDAYRQGLWDPAKPDEWHLRIDHHAGPARNREQSGNEAIVPPRDLVVAETKALLAAAAKRFPKLAGRENEILFGRGARPYASYHDDTRRAHGLRIGGANDWEGILGQKIPRFDNRIIAKCALIPRLNVCKASPRTDATGAVVTASLLPSEVSFLFKLKNARVQRPDKSIGGLAASEIRQLFEDAKRAPNKLSYTKKQWQKELLTRFACLPAAGHEEISAPYFGGRSRFCRPALEILKKLILSGEAPAVAHARELAERVAGNTDPRRGLVAADLEFLSPARLGGTWETIHVPDQQHAALLRLAAERGSAVAIRALLGRVNNPVVRHRLEAFWNRLRVLEGDMQKRFGRGPDEIVLEFIREDFMGPKARAELQKFQNERAKARLEARAQVGKLKADGRASPLKYELWKAQGGICLFTSETLPPTDIESLEIEHIVPRALGGPDAVINYIVTRPTTNKVKDNRTPYAWFAAGGFHNGFMSWDAYVKLVEDRATTLRGKKVRLLTAPDAVELADRYTALAETAYIARLAQTVAALHFGWPINSQAGERRITVINGGLTARVRRKYLLNSLLNPCPPDEDPALWEEKADVAKNRNDDRHHALDAMVISFLPAWTRDPAKERFFRLPEEMTPEAFNRVLAGVLPRQLNYERPQLEATAFGRRHIDGKTFGVGRVEFRNLVVRVSQNQERSLNVKPSGSGEADTVVDEVIRRDVQTFIDQNRATLTLEQWDVWCANYRRRDKKGPRVIKVLVTLTKPDALDEYADLAKDGSGQLRRGKRHKGYLVVRVPRPTKKEPNKTTVEVRPVYAHASSHDLISDIQSSSTGEILLDLVSGCSVEISRPIDHPKTPLAAGIYRLNSLWAQGNAVVTSQSGLTSAPIGIAKFIEAGIRRVK

SEQ ID NO: 330 - protein, 1076 aa, unidentified
  REGION 1..1076: note = Description of Unknown: Cas Enzyme sequence
MKEYTLGLDMGVASIGWACVSENEQQIDSGVRVFPAGVDAFNSPKEKHPNLDRRSARGMRRRIRRKAERKALIKTILQRLGWMPSDESEIQAWLGLDVYELRSKAISDKVSLSELGRIILHLNQRRGFLSLRKKDETNADKDTSGILGEMTALQKEIDEGDFKTLGNYLHHLYQNDQYVTPNGKIAKISRLRNRHIRRSMLHHEFSLIWETQALHHPELTDELRYGSHGKQDNPIAVVKPTQRIKGASLLEQFGVENFTFFQRKVYWPTSSIGKCEWETNERRAPIADRRFQEFRLLQEVNNLSILDSSEPRHPIERALSKEERDAVIGYLSGKKEAKFDALKKHLIKQKHLSLPDSIDQFSFNLEQGGRTKISATPTDSLLAGKNLLSTAWARLPEKDQNTIITLLTSPDATDDDLAEELAKIESLSPAQVTKLLTVSLPTGYCHLSVKFLENVLPFMRKGMTYMARDSSNSAIHAAGYQRRDEKIFNSYDSLPPFEQVTRSESVFYQPHQTVINNPVVLRSLTELRKVVNALIKKHGKPSRIHLEMARDLKMSPKQRTEHQKKNNKLQKDRDAAAKEIEKLGIVPNRDAVDTYRLWKDQSEQCIYSGKPIAAHQLFTGETDVDHIFPFSKSADNSYFNKVVCLAEENRLKGQRLPYTWLAHSDPEKYEEVLQRARKLERGKFKKFIAEQIPEGFVARNLNDTAWMTKAARQYLSLVVENPAKNITCLKGAHTATMRSQWELHSLLRSDGIDLKLRDDHRHHALDAIVIALCNQARIQEITRKLKHETRIKEAKEAGKRIYRLKPTEPNHEKLALPWKDFRLDVAASLNKIWVSHRAKRKISGPLHKETNYGKTPEGLLTVRKAVQALSQKDIEHIRDSATQRFIKDYISEHGGDITVLKNVPENAPLHLPSGIPIKKVTVAIPYAHLTIRKGTPQETHVQSASTHHLAIFSLGDGKYHFEPVTLFEASYRLKNNQDVIQKHFLNMPPEAEFLFHLCSGDSMMARIDGKDQLFVFKTMNGNTKQTFFAYHTDASQGNRSPDNKDLRRSSREGTFARNFPNARKVTILPDGSLRNA

SEQ ID NO: 331 - protein, 1051 aa, unidentified
  REGION 1..1051: note = Description of Unknown: Cas Enzyme sequence
MRWLLGLDAGTNSLGWAAFEIHGDEKDDNSHLRLIDLGVRLFSDGREPSSPGRVGESLSVERRTERGMSRNRDRGKNRKKALLVKLQALSLLPKAQEELDQLFRQNDASDPLARNPYRLRAEAAEGPVSAYHLGRALYHLGLRRGYLSNRKETTEDDGGSLKAKMDAMTDQLAGRTLGQFLWDTYQSSIAKDNPDPIRFKEGSTLYPARHHYRVEFEAIRKTQENHHSLSQDDWDTLRDKHILFQHPLRPVERGSCDFYPEEPRHWQATPVAHRFRILQDLNNLRVVAPDLSSAPLTTEQYAAIKAQLLKTQTVKFTALRNLKDGNKARLFDRLSSFNLESEKRKDLKGDYFSAKMRKDAVLDPVYGRHYASGTLDDIVEVLHSADTDDEARDTLSSQFDLDAAEIDALIALPLPSGTTNLSRKIMDSLIPIMEDQGLGYAHAVDELTRITGQDFHHSKREGAIYNELPYYGQALTGVTLGRNADIDPAQDVEGHYGRINNPTVHTALNTLRQLVNTLVRRFGAAPETIHVEMVRALKLPKKLREDMERQHAKNQRINDQIRDFCRENGVMDPHPRDIKKVKLWQELGKNQLERLCPYSGTPISAAMLFNGDVEIEHIIPYSQTLDDSLSNMTLATKAANALKGNQTPYAAFGSDFHADKGFVWSEIAERIQVLPRNKHWRFGRDAHAQFEDGNGFIARQLTDTAYMSRIGARYLRTLSGVKDVVPNRGKLTGMLRGRWGLNGLLSDDNQKSRDDHRHHAVDAFVTALVSRSVLAAISRDSGKTSVGDMHIDIPQLDAGLVESLSARIKTVIPSVKQDHGLSGRMYKETAYGFTKDKGYKNPLGNLVTRKPITGLSLREIGQIIDPDLRRAVEDAVSLSRSAGEKYEDGLARFGRNHGVKRVRIFVLDQTVKPIASAPYKGYTADSFVCCDIWRIPPKKKGGKPRFTGRYWRYDEMRGSAPDADLKRPHPAAKFCMRLFKKDTVAIGPTDAPTLLRIYGFSTTNNKLDLRPLEKAAPDRSYVSINQLGQDSLRRLTITVDGRILKDRGGYL

SEQ ID NO: 332 - protein, 1057 aa, unidentified
  REGION 1..1057: note = Description of Unknown: Cas Enzyme sequence
MKWMLALDMGNTSIGWWVYEVIADGKGGWQPVASIDGGVRIFSDGREPSSLGRVGDSRAVSRRTARGMRRNRDHHRVRIKALVNCLIENGLLPASKSARDALFITPSKTAGDPDANNPYRLRAVAAEEKLPPHPLGRVLFHLGLRRGYKSNRKEASDDEGGKLKDRMAAMQAKLAGKTLGQFLWAELSHENTKGTDGPLEGRPKPIRFADGNPFYPSRAMYEAEFERIKAVQAPHLALDEPTWQRLAALILEQRPLKPVERGRCEFFISEPRHWRDTPTGHDFRIHQEMNNLRVVDSKLENHLLTHEQRAAVLGKLMSQKTVTFGALRKLKDTAGNKLFPHSSRFNLEGEKRKGLNGHKVAVEMKANPLLAPIWQKYSENTDSSRLDEVFTLLFEAEDDTSATAKLQEDFDFDTDTAEALTALKLGRATASLSLKAMHQLVSIMRDQGLEYWEAVGEVCDENGEPLHHSNRTGTVRFARLPYYGKVMPENMLGANPEFPEKENPEKHFGRINNPSVHVALNQLHKLVNTLTDRFESAPVKSHVEMTRDLKKPKKIREELERNQAKGERYNNEIRNLLANEHGIYSPSMQDIKKYKLWEELGKNSIARQCPFSGKTISANQLFNGDVEIEHILPFSRTLDNSMSNQTVAFRWANQLKGSKSPFEAFGTGTFAGKNILWDEILQRIKSLPKNKRWRFGPDAMERYDEDSGFIARQLTDTAYMARISRRYLLSLRGVEDVFSLPGQLTALVRGKWRLNGILADDSKKSREDHRHHAVDAAVIGLIDRNLLQGISNLSKRGVDHRLHIHVPPLDERLEQAIRARVPAILPSFKPDHGLGGKMFKETAYGFTEVEGEVVTRKPLTALKPAEIGQICDENIRDELSYRIKTHDEKPEKILAEFSEEFGIKRVRLLVKDQTVKPVPSAPYKGYRPDSYVCCDIWRLPPKKKGGRHTYEGRFWNYVEVMQKNGATTPNKLAKKPHPAAKYITRVFKDDLIELGAPGSGEILKVAGFSTTNNKLDVRPPEVAQSKQIYKSINQLAADGLRRLYVSPDGRVLRGGRQ

SEQ ID NO: 333 - protein, 1074 aa, unidentified
  REGION 1..1074: note = Description of Unknown: Cas Enzyme sequence
MYWRLGIDLGTNSIGWWAFKVVKDGTGENARWRITESLDGGVGIFPEGREITTSGLVGDSNAVQRRDARSMRRNRDRGNNREKSLKKILTETGLLPKVQEEKDRLFRNQKKTNGDPERFNPYRLRAEALKRPLEPFELGRALANLGKRRGYKSNRKEASDDDGGKLKERIDELHKTLKGRTLGQYLWEAFQEQNTREAAGEKRSGIRFRGENPFYADRSLYEAELAAIRNEQESHHALTPDDWEAIRSKVLDQFPLKPVERGWCEFYTEEKRHWSDTPIGHDFRIYQELNNLKWIDENEVPRPLTSEQRQAVQNALLTRKSEVTFASLKTLKDPEKTKLFPSLGRFNLEGGKRKGLKPHKIAATLQDNPVLAPLWQTREETGASLLDDAFETLHHAEDNAKAVTELVEKFGLTDKQAKALCRLKLSSGTASVSRRFMEEIVPVLRDQGLIYSDAVKELKDEYGHPLHHSLRDDGMRWKRLPYYGEVAPHSMLGADKQADPEHEPEKHFGKINNPSVHSALNALRRLVNTLTDRFGTPPVQIHVEMTRDLKQSRKQRDDAAKQNRANEAENDRIKKFCAEQGFPEPSALDIKKVKLWEELNGDGLVRLCPFSGKPISAAQLFNGEAEIEHLLPFKRTLDDSRANLTVAHRWANRLKGDRSPYEAFGDDQHADKGIVWEEILGRIEALPHNKRWRFGPKAMEKFEQEGGFLARQLTDTAYMARFASRYLRALEGVESVVTIPGRLTAMLRGKWSLNGILSDDNRKHRDNHRHHAVDAAVVALTSRGVLNEISRQSARGATDRLHIQVPDLEPEIRDAIRKRVPEFTVFHKPDHGLAGKFFKETAYGFVDERKRDADFKEHNLVVRKPLEALTPAECKTIRDPALRKKVDQWLYEAKGAGVKHDKALAEFSKEHDVKSVRILVKDQTVAPVPSATHKGYKADALAFCDIWRIPKGKPGNWKPGEYKWEGQFWSFLETAPFIGKGEPDKEVKRPHPAAKFVCRLFKNDMIAVWEKGEVTTYRIGGFSSTNNKLDIHPVDRHFSGHNYKSINTLGGLSLRKLYVTPDGRLLNNSGWSSR

SEQ ID NO: 334 - protein, 1063 aa, unidentified
  REGION 1..1063: note = Description of Unknown: Cas Enzyme sequence
MSKPYLLALDLGTSSIGYALFDLDGKERPEALRDVGVRVFPDGRDPKSREPLAVGRRMARGIRRNRDRGQNRVRRLVAELIACGLLPEDDEKRREIFNGTDPYEARARAVDGEVDAYTLGRALFHIGRRRGFKSNRLASESDESDYKNKITGLREELGEQTLGQYLYARNEENRLLRDKGMPIRQRVVRFRNGETEHYADREMYADEWDRIRRVQGNKLLTDQQWDMLGETAFFQYPLKPVPKGKCRFYPEEARAAAALPIAQRFRIYQEVNNLRYESQGDSYSLDERQRRGLYEYLDTNKSISFKSIPKKLKDEHKSPLFPSDAQFNLDIGSRDNTLYGNGVMYDLRKPQYLGGLADSLDESKVNDLIAFLIDPVKLDECGREVVMEADEVEAGIRERLPQLTDEQVGALGERRFKRDTMTVSRKFIEQINPVLKETGLVFSGAVEVLGQKLGTDLHHSRFRHEEYGRLPYYGEVLVDSVWGDHMEADRNKRPEDRDNNAFEYGKIANPTVHVALNQLRVVVNRIIDKQGGKPASIHVELTRDLKNSKKAREEIQKRINSDRKNKERIRKDLEELGIDRPSRNDVQKYMLWEELGKEGARCTVFTGKTISARQLFNGEVEVEHIIPFSRCYDDSMANKTLAFKSENNIKGNRIPADVHEFDHAAMQKRALSAFGQGVKYDRFLRGAFERFYGENGERTMLERELNDTRYISRVAARYLACLFPDDVSRVVSINGRMTAVLRDVWQLNHFKSKEEGNYREDHRHHLVDAFVVGLISRRLVQQLSARRSLNRQTEDSLYRFLKSCVEDIPELRAQLLELQERVVASYKPDHGHNGSMFNDTAYGVIKDGDQTYGFTRKPVSMLSFKEVFQVCDQVHMQQLISHLTGGVDAAGRKDLQKLLTEKQLSSGLASFTKKTGIKKLRIRVPNNSIKAIASAPYKGYGKNSYAWCDIWMVPGKKDKKTGKRKYKYEGVYIAYADIRDYKANPDNYRPHPAAKRLMRLYKEDNIRLINQETGEIQVMRVAGYSAGLNTLDIQPNLNANPPKQNFKSINAVFSSNKVEKIRM

SEQ ID NO: 335 - protein, 1086 aa, unidentified
  REGION 1..1086: note = Description of Unknown: Cas Enzyme sequence
MPFRQPVSYAFDMGTNSIGWCVFRLSAAGHPVAIADAGVRIYSDGRDPQSKTSLAVARREAKAAARRRDRTKRRQKATLRTLAEYGLMPGGKDERERLLRETADSADRNAPANDPLNLRARALTEKLPLHHIGRALFHLGQRRGFKSNRKTDRRDNDKGKIAIGIERLRDAIREAKAETLGVFLASRRAQGLHVRLRAGSSVILDDGYDFYPVRSLLEEEFRHIWDAQAVHYPDVLTEARGEHLFKLIFHQRPLKKPRIGSCTFNPLEQRLAKAHPLFQAFRLYKEVNELEVVAPDLSQRKLTLDERDALVLKLRGAKTAKYKTLRKDLKLTPDMRFNKESENRVDMAGDEVTAALSAKGLFGPRWNTLSMDSQWKVIERIQEEENPFVLHQWLVETHGLSDDAAEAVAACHLPEGYGRLGHTALSTMLEELRADVIPEAKAAERAGYNHSYFGTGEIFDELPKYQEVVARSIPPGTGDLEDEYDVRKGRITNPTVHIGLNQLQRLVNGLIRRFGKPAEIAVELARDLKTNEKKKTEINRRIGENTRAARQRSEKIAELRKDTPALVDNGYNRLLLKLWEELNPAKPEDRCCIYTGKPISISMLFSGAVDVDHILPYSRTLDDGQGNKLLCLKEANRVKRNRAPSEVTEWANHYDEILERANRLPKPKRWRFARDVMADFDADSGFLDRQLTDTQYLSRLAREYLCSLYPEKHEQWRVRVIPGRMTEMLRRHWGLNTLLPDHNYSDAKNRNDHRHHAIDAAVVGVTTRSMLQRISTEAARREEQELEDVVKGIPVPWEHFRDDLQQALNNIVVSHKPDHGTVGLDDKGKWQTAGKLHNDTAYGLTGEVDARGNTIVVRRKMLLSLTDKDIPAIRDDELRARLYSAAGGLSGKELQQALLDFARNDPKYRGIRRVRVTETLAVIPIRDKDGNVYKGYKGDANYRYDVWEMKDGKWQAEVISMFDAHQKGWESPVRKANPTARKVLSLQQNDMVAYEHPSDGYTIARVVKFASSGQIVFARNNEGGSLKARDANRDDPFKYFSKTANGLREIKARQIRIDETGRVYDPGPRDRESRMIGNQKLKTIAI

SEQ ID NO: 336 - protein, 1082 aa, unidentified
  REGION 1..1082: note = Description of Unknown: Cas Enzyme sequence
MILGIDLGTNSIGWSLLHDEKILAAGSRIFSDGREPKSGNSLAEGRRVARGMARRRDRYKRRRKAVVRTLTEFGLMPPDPKARAALVAETNDAAAGQMSHDVYALRARGLDEKLPLHHIGRALFHLQQRRGFKSNRKADRKVDGNEKGKIAVGTEQLHLAMQAVNARTLGEFLAGRRGDDPRNRGTVRVRIDAEASLDAKTPYDFYPDRAVLEDEFEKIWQAQAEHWPYVLTEERRAHLFRVMFYQRPLKPPVIGKCSFNPAEPRLAKAHPLFQQFRLLKEVNELELVLPDQTHQKLTLDQRNGLVAKLRSAKTASFASLRKTLKLSERGAVFNKEGENRDKLLGDEVYVAMSDKAIFGNRWAEFSTERQWEIVEKLRDEADPLLLHGWLMENAGLSNEAAEKAADAKLPEGHGRLGKTALSDMLAFMQAEVIPEAEAAKRAGYDHALARVDEAVERLPKYQEILERRIPPGTNEPDDDYDIRKGRITNPTVHIALNQLRALTNRLIDRYGLPERIHIELARELNQSDDQKKEATRNNAKNRREAERRSEKLRELGQPDNGFNRQLLKQWEELNPDNPLDRRCIYSGTVITPGMLFSGAVDIDHILPWSKTLDDSQGNRLLCTREANRQKRDFAPADVPSWAGRYDDILERAQRLPQNKRWRFAHDAMQRFEKDRDFLARQLTDTQYLARLAHDYVGALYSDEVADGDGVVKKRNHVVVVTGRMTEMLRRDWGLNNILPDHNFADPTKGKNRKDHRHHAIDAAVIGATSRSLLQKIATAAGIEEAEGAENAVRAVALPWPSFREDLKAVIDTIVVSHKPDHGTLPKPGQPGKTAGQLHNDTAYGLTGETDARGNPIVVRRKPFLSLEPKDLPSIRDGQLRKLLEEETYSLSGKDFLAALTRFRKKDSHDYFNIRRVRMTETLSVIPIRDRNGVAYKGYKGDANFRYDVWEMPDGKWQADVVTMFDAHRPDMDWQRRRPHPAAKKVLSLKQNDMVAYDDPKGSGVALGRVVKFNTAGQLYLAGNREAGALKARDADADDPFKYMSKAASGLRDINARQVRVDETGRVFDPGPQAGKKRKRKPR

SEQ ID NO: 337 - protein, 1079 aa, unidentified
  REGION 1..1079: note = Description of Unknown: Cas Enzyme sequence
MILGIDLGTNSIGWCLLDGERILAAGVRIFSDGREPKSGNSLAEGRRVARGMARRRDRYKRRRKAVLRTLSEYGLMPADARARAALVAETNDAAAGAVAHDVYALRARALDEKLPLHHVGRALFHLQQRRGFKSNRKADRKANDSDTGKIAPGQERLRLAMQEQHARTLGEFLALRRGGDPANRGTVRVRIDAEAALDAKAPYDFYPDRSMLEDEFRQIWEAQAAFCPDVLTEERQAHLYRVMFYQRPLKAAVVGKCSFNPAEPRLAKAHPLFQRFRLMKELNELELVMPDQTRRKLTLDERNALAAKLRGAKTASFASLRKVLKLSERGAVFNKEGENRDKLAGDEVYAAMSDKAIFGNRWADLSMERQWEIIEKLRDEADPLALHAWLVDHAGLSDDAAEKAAGARLPEGYGRLGKTALADMLAFMQAEVIPEAEAAKRAGYDHALARQDDAVERLPKYQEILERRIPPGTNEPDDEYDVRKGRITNPTVHIALNQLRALTNRLIDRYGLPERIHVELARELNRSEEQKKEATRKNAQNRREAERRSEKLRDLGQPDNGFNRQLLKQWEELNPDNPLDRRCIYSGAVIGPAMLFSGAVDIDHILPWSRTLDDSQNNRLLCTREANREKRNFAPAEVPSWADRYDEILERAQRLPQAKRWRFAQDAMQRFEKERDFLDRQLTDTQYLARLAHDYLGALYKDEQADGDGVVKRRNHVVVVTGRMTEMLRRHWGLNNILSDHNFADAAKGKNRKDHRHHAVDAAVIGATSRSLLQKIATAAGEMEAEGAENALRDATPPWPSFRDDLKAAIDQVVVSHKADHGTLPKPGEPGKTAGQLHNDTAYGLTGETDARGNPIVVRRKPFLSLEAKDLPSIRDTQLRVLLEEETFGLSGKEFLAALTRFRSKDGHDYRNIRRVRMTESLAVIPIRDKSGRAYKGYKGDANFRYDVWETPDGKWQADVVTMFDAHKPDMDWQARRPHPAAKKVLSLRQNDMVAYDDPKGSGVALARVVKFSAAGQIVFAGHREAGALKARDADPNDPFKYFSKAASGLRDIGARQVRVDETGRVFDPGPQAGKKRRR

SEQ ID NO: 338 - protein, 1081 aa, unidentified
  REGION 1..1081: note = Description of Unknown: Cas Enzyme sequence
MILGIDLGTNGIGWCLLDQKHILAAGSRIFSDGREPKSGNSLAEGRRVARGAARRRDRYKRRRKAVLRTLTEFGLMPADAKARAALVAETNDVKAGQTANDVYALRARALDEQLPLQHIGRALFQLQQRRGFQSNRKADRKADSNEKGKIALGSEQLHLAMQSVNARTLGEFLAGRRGDDPRSRGTVRVRIDAEAGLDAKAPYDFYPDRAVLEDEFGQIWDKQAAFWPAVLTDERKAHLFRVMFYQRPLKAAIVGKCSFNPSEQRLAKAHPLFQAFRLIKEANELELVMPDQSHQKLTLDQRNVLLTLLRQKKSITFKTLSGRLKLSERGATFNKEGEGRDKLLGDEIYAAMSDKTIFGNRWADFPMERQWEIIAKLRDETEPLLLHAWLIDKAGLTEEAAAKAADAKLPEGYGRLGQTAMTEMLAFLKAEVIPESKAAELAGYDHALMRTGDAVDELPKYQEILERRIPPGTNEPGDEYDVRMGRITNPTVHIALNQLRALTNRLIGRFGRPERIHIELARELNQSDDQKKEATKQNAKNRRDAERRSVFLAEHGQPDNGFNRQLLKQWEELNPHPANRRCIYSGTVISPKMLFSGAVDIDHILPWSRTLDDSQANRILCTRAANREKRNFTPAEVPTWAGRYDEILERAQQLPPNKRWRFAHDAMERFEKDRDFLDRQLTDTQYLARLAHDYLGALYPDEEADGDGVVKRRNHVVVVTGRMTEMLRRKWGLNNILPDHNFSDPTKGKNRKDHRHHAIDAAVIAATSRSLLQRIATAAGQDEEEGAENALRSIDPPWPSFRDDLKAVIDEVIVSHKPDHGTLPKPGERGKTAGQLHNDTAYGLTDETDARGNSVVVRRKPFLTLEAKDLPSIRDEQLRALLEEETFGLSGKDFQAALLRFRRKEGHDYGGIRRVRMTETLSVIPIRDKDGHAYKGYKGDANFRYDVWEMPDGKWQADVVTMFVAHRPDMDWQKRRPHPAAKKVLSLKQNDMVAYDDPGGGGTTIGRVVKFNTAGQLYLAGNREAGALKARDAEANDPFKYLSKAASGLRDIKARQVRVDETGRVFDPGPQAGKKRKQKRS

SEQ ID NO: 339 - protein, 1080 aa, unidentified
  REGION 1..1080: note = Description of Unknown: Cas Enzyme sequence
MRLGLDIGTNSIGWWLYETNGTETNARIISVIDGGVRIFSDGRDPKSGASLAVDRRASRAMRRRRDRYLRRRTTLMKVLAKVGLMPTDPEEAKALDLLDPYELRATGLDKALPLTQLGRAFFHLNQRRGFKSNRKTDRGDNESGKIKDATARLDQAIMASGARTYGEFLHMRRQRASDPRHVPTVRTRLSVANRDGPDGKEEAGYDFYPDRKHLEEEFHKLWATQAGYHSELTYELRDLVFEKIFYQRPLKEPEVGLCLFSGYDNIPSDERRLPRAHPLTQRRVLYETVNQLRVTADGRETRPLTREERDQIIHALDNKKPTASLTSMVMKLPALAKVLKLPDGERFTLETGVRDSIACDPVRASLSHPDRFGPRWSTLDDEAQWDVVSRIGKVQSDAEYAALVKWLMDNHALDRDHAEAAARAPLPEGYGRLGLTSTIRILEKLEAAVATYADAVAACGWHHSDQRTGECLDRLPYYGEVLERHVIPGSYNPQDDDVTRYGRITNPTVHIGLNQLRRLVNKIVESHGKPDQIVVELARELKQSEQQKKDAMRSIREATDAAVKRSEKLEDLGIEDSGRNRMLLRLWENLNPDDIMRRFCPYTGERISAAMIFDGSCDVDHILPYSRTLDDSFANRTLCLKEANREKRNQTPWEAWGDTPKWHAIEANLKNLPDNKRWRFGPDAMERFEGENDFLDRALVDTQYLARISRTYLDTLFTEGGHVWVVPGRLTEMLRRHWGLNSLLSDAERGAVKAKNRTDHRHHAIDAAVVAATDRSLLNRISRAAGHGKDAGQSAELIARDTSPPWEGFRDDIRVQLGKIIVSHRADHGRIDREGRKKGKDSTAGKLHNDTAYGVVDATTVVSRTPLLSLKPGDIAVTPNGKNIRDPQLQKALETATRGKEGKAFEAALRDFAAKPGPYQGLRRVRLIETLQESARVEIGTRPDGGPLKAYKGDSNHCYELWRLPDGKVKAQVVTTYEAHSGPEKRPHPAAKRLLRVFKCDMVALEREGETIFGYIQKLDIAHGLYIAPHNEANSDARNRDKSDPFRFIQMGAGPMLKAGIRRVFVDEIGRLRNGHVRPR

SEQ ID NO: 340 - protein, 1039 aa, unidentified
  REGION 1..1039: note = Description of Unknown: Cas Enzyme sequence
MVRVLGLDLGISSCGFGLVDLADSLSDQVIATGARTFNAAENPKNGESLALPRRTARTARRRLRRRRVRLNQLLQLFSERLKPTIPPNSPRSLTNPWHLRAAAMDRILTADELAIALYHIAKSRGMQLTRTEKDDSAETSPTEEKSKEKEAAKAGMKRLESAFRASTYPTIGCYLAAQERQRNVDKDYRYTIHRQLLQQEVGEIFARQRQLGSNHSSQVLQQEYTDIAFYQRPLRSSLALVGYCSLEPNEKRAPKHAYNSETFVVSQKIAHLNWVIRGERHIPTDDQRATLLAMANDLAKVTYGQVRKALNIPSDARINHVAYDRKKNMEEAEKATFVEMKGLHTLRKAVDKVDKNLWETFRRDTGRLDAIATVLCFEQNEDIAGKKLAKMGLDDKLIKAFLPISFNGVLHLSLKAIRNLLPYLRAGHSYAESVALAGYNFVEQQQGNQDRLPPLPLINNPVVNRALAQARRVINAVIAEYGMPDRIHIELANELGKSKTKRKEIEQEQVKNRKAKEAALATIQQELGLADIRGNLKEKLLLWHEQRHECPYSQQKISYQDIENGQVEVDHILPFSRSFDNSRANRVLVFAKENQNKQERTPFEWLGANPARWQDFCTWVDASALPYRKKRQLLLRDFQEEGWKRRNLQDTQYIGRLLSQHIKTHLNFGDDESPTGKQTRRVAVRPGRLTAWLRYHWGVHDLKDRENDDRHHALDALIVACTTDRMVERATQYNKQGIRKEDQQPLASPPWPDFRNSVKKQLDDIFVSRAPQRTVTGKGHKATVYGLRQRLDDKGQEKTVVLERVAVENLKPEDLDKLLDGDGRNSWLKRLLAERLAQHGGDGKKAFVEPLRMPGNDAIIRHVRLITKDKVYNGLKLPDRGNPSRPGFVPNGDMKRVDVYSKANKFYLVPVYTHHIARGILPLRAITANQPQEKWPVMDDSYLFKFSLFPYDLIGFAKKAGDPLEYVYYRGTHSGTAGVTLSPHFSNHQDHQINIGSKTLTKFEKFSVTILGEIRPAKAERDPRTHGVAQPAHQPIGKT

SEQ ID NO: 341 - protein, 1070 aa, unidentified
  REGION 1..1070: note = Description of Unknown: Cas Enzyme sequence
DLMRLLIAHRLMPTDPAERKELENSDPWRLRAEGLDRNLTNHEFGRAIFHLNQRRGFKSNRRTDRKTKDSEARGMKAGAAALATLIEPHTPGRRTLGEYLYTRFRKDRTPRGAPDGTALAMEPVRFRARLGKGGKAEWDLYPTRAMVETEFDALWSVQSKYNDALTDSLREQMRRVIFFQRPLRPVEPGPCTLDPEHDPKKRDRRAPLALPIQQEFRILQELANLELWHKITGETRRLTRAERDKLLPELRRREKWSFAQIRRKLGIESTWSFNLEGDRREGLKGDIVSYRLSRDSAFGRIWHDLPEPTQNRIVEFLLSEEREEEAVRILMENWRLEPEAAHEVANLALPDGYGRLGRVALGKIVPELRDGVSAKDGGLMHFDEAVQAAGYAHHSDFRTGEIFDEAPYYGEVLERYMVPVGKNSGSSDEERFGRIANPTVHVGLNQLRQLLNAIIRTYGHPTEIVVELARELKQTWEERKETDARQTDNQKKNEQRKADLADAGVAMTGDAMLRMRLWEELGENIADRKCVYTGEQIGIRRLFSADVEIEHILPFALTLDDSPANLTVSLRRANRDKGNRTPYDAFGTSPVASGHTYDWNAITLRASALPRSKQWRFRSDAIDLIRDRLLREEVRLKGSLPKDVLADIEKTGGFLARQLVDTAYLARVARQYLTSIVPSEQDDDGTLRSNVWVVPGGMTGMLRRLWGLNRYLWGNRPDAQDDGLGNWRGKLRTDHRHHAVDGFVLTLIDRSLLAEIQHRSGQSGHRTIDDMPDPIGWPDFREDLKERFDRIVISYKPEHGASGRLHEENAYGIVRHPKNERGSTLVYRKPFKDLNANEIHRIRDDALRKRVLASVDHILRDIEKYKGNRRRKVAVDRKNLRESESRLRKAIEEFATEDGARNRRSPIRHVRLLKVESSFIPIHDRRTGAIYKALIPGENHAVDIIELPNGEWIGEGITLFDANRQGFVPEWRRTRAGACPVMRVHKGDLLRLEHDGTESIFRVVKLSPVNERFLIAGHLEAGNLDKRDKDPDDPFTWITLGFGKMKGLRARKITVDLLGRVHDPGTPETA

SEQ ID NO: 342 - protein, 1102 aa, unidentified
  REGION 1..1102: note = Description of Unknown: Cas Enzyme sequence
MAAPYRLGLDVGSNSIGWCAVTVDGNGVPSGVLDAGVRILTPNEEAGRDPQSKQSLAANRRVARSSRRRRDRFLRRQKRLMETLIAAGLMPSGEADRKANERLDPYWLRAAALRAPLPLHEIGRAIFHLNQRRGFLSNRIADGDDDEGSAMKAGMKALAEQLEASGAPTLGAFMAERNSRDREGYLVDRLGKRIGKAHGNPKPHPTDTGVRFRSRSEGNKVLYDLYPTRAMVEHELDAIWQAQAPHHDALTNALLKRLKRIIIEQRPLQKPLVGSCTFRPHEERAPRALPFFQRFRILMEVANLEIERPGRRSRKLSIQQRNALVSSLSEKASQVTFAAMRKALKLPADAAFNLEHGKRKGLDPDQTAAVLAKTSKTGKGTSFGKGWRGLSRHRQTEIVENLLTEPDERALTRWLRQECGLTEDAAEAAANARLPQGHAHIGRSMLADLVDVMENISAEAVDPKTGEIYPRPLTYDEAVEHLGLHHSNMEAGRHARLPYYGTAMARHVIANPRAPENSQERIGRVPNPTVHIALNQIRAVVNALIEAYGPPTAIVLELARELKQNKKQKDETTRQNRENEKANEEIRAELAQMGLAYSHGNRLIMRLYRELSPTERICVYTGRPISRTMIEASEVDVDHILPRSRTLDDGFANKVLCTRQANREKGNRAPAEVTEWQGERLREIHERAKRLFPRKAWRFAPDAMEKFEAKDDFLARQLTDSQHIARLAKDYLGHLFGEDRNKRVWATPGRLTAMLRGFWGLNALLSDHNRIGNDSDGGSVKNRDDHRHHALDAFVIACTDRAILQRVATASGRAEELDLNRWAEKGRFPEPFEGYKDALRAALDAMVISHKPDHGLGRGAQGNVHVTSGKLHAETAYGLVDADIDGKHFNLVTRKPIDQLSDREIGQVRDARLREALEQIVYEAGRDGIKPEAALAEYGRRNGIRRVRILKTNETARKVTHGDGFEKAYIPGDNHRIEIFSLVDGEWSGEGVSVFDANKPGYEPDWRRRHPEARLVMRVHNGDLVEADFGEGRRIWRVVRLEPSAKRIRLVRDTDAGNFEKRHKAGDDPFRWNFATFKRLQAADARRVRVDPIGRVSYAEDT

SEQ ID NO: 343 - protein, 1117 aa, unidentified
  REGION 1..1117: note = Description of Unknown: Cas Enzyme sequence
VIEYLKTLGLDVGTNSLGYAILETHGEPGQNPDGRIVASGVRIFSQAEMAGRDPQSKASLAVARREARGARRRRDRYLKRRTRLLDLLTEYGLMPADEANRQALVRETGDGEGGDLSTSVYALRAKALDTALTPHELGRAIFHLNQRRGFKSNRKTDSNDPERGKIATAIDRLEEQRLEDGARTYGEWLDMRRRKGLSVRARMTADGEAYDFYPSRAALEHEFDAIMMAQRRFHPDLLTDPIIADIRETVFHQRALRPVLPGKCSYNPAEARLPKAHPLFQTFRLLKEVNELEIVGEDQQHRKLTPDQRDALVAALRTGLNKSGKLPFSKLKRVLKLGRDVRFNKETENRKDLEGDVIYFRLSQPACFGNRWATFSVDTQAEITERLRTESDREALLDWLKAEAGLDQSHAETVADTPVPDGFGRLGRSALTALIDAMETEVDPDGFVITEAAAAKKVYGRTNSEADPDRKGAAMLPKYQAVLERHIPPGTGGEAEEGDPRWDEVMGRITNPTVHITLNQLRRVVNALIRTYGKPDRIAIEVGRDLKLNDKQRDEVNKIIGKNTREAIERGKTLVEVYGQGDTGYNRLRLKLWEELNDKPENRVCIYCGTAIAGHMLFSGETDIDHILPYSKTLDDSQANKLLCCTRCNREKRNRPPADVPQWSGRYPDILARTVTLPKNKQWRFAENAMERFGDEEGFLARQLTDMQYMSRLALTYLAHLYDYEEADLDGIFKRHARVRALPGRMTEMLRRQWRLNDVLPDHNIVGDDVQKSKNRLDHRHHAVDAIVIACTSRSLIQKLATASAAAEDRGAERVVEKVSEPWPTFRDDVRAAVNAITVSHKPDHGTVSRTGYARGRGQTAGKLHNDTAYGLTGERDEKGNDLVVHRVPITSLSSEADIMRIRTNAHGHSELRDRLWEATRHIGEHDYPKKSDRQKAFRQAVADFAAKDARFKGIRHVRIIEPLKTIPVRDGSGRAYKGYKGDSNHAFDVWRLPDGKWVAEVVSTFDAHQPGWTSAIRTDNPTARKILSLKQGDMVAIGHEEERRILRVVKLSRGQVILADHKEAGSLKSRDSDKVDPFKYVYLSASSLRSNKARQVRVDEIGQVFDPGPWWDKGDD

SEQ ID NO: 344 - protein, 1157 aa, unidentified
  REGION 1..1157: note = Description of Unknown: Cas Enzyme sequence
MKYRLGLDLGSTSIGSAVMALDEQNNVLDIIDAGVRIFDVSEGAEDRRLKRTMRKNLVRTRKRLALLAQKLFENGLWVNAQPEGTARLAAKSPYKIRYDAVTGRLENPNYVGRALLHLAKHRGAGFVSAAEESEEEVLEEGEKSKGRSSPYDLMLKHLKDSNSETVGAFFYKRIQDREKPQNRVVRQRAYALKEKIVDYAIPRYLVKDEFHKIWDTQAQYFSQMRREGLKQEVYDILFYERPAAPYAVGKCIYFRDEDRLLKAHPLAELRRVYEEVNNIRIVHDTGKRRLTLEERDNIINELLLQGKNAGKQAIKKLLNLSGQQKISLQDDRVIKAYLYSRPEFAEVAYLQKLSTEELAAFIEFLAEPKNPDDRNGRLYSEDALIQKLKLILDIDDEEEIGNLLAKLPRGRGMLGKSATELLLEKMKQEVLSHREATDALLAVDKRFMAAEEIAREKQGKNFALPYYGEILQSDTQPLPQLVIDNNKTQNKDEAQWGKIANPAVHMMLNQLRLVVNDIIRIYGRPYDINIELGRDVGLSTKKKNELEQRQKSNEKQNEAAKEYLRQHKLCINGKNILKYKLAMEQGWYDAYNPDKRIPRDFSGMEIEHIIPQAKGGTDTYNNLCLVNRNDNLNKGDRFAYDYFAEAKEPEVLREILKNARRNMPGKAWRFEAEARERFEDAGDEDETNRYLADTRYMSKMAARYLRAIVDCDDSEDVIRNRILAVKGGQTAQLRKNWNLQGLEYELMGLDVPRYVSCTPFWLEVNSGEVRAGADKPDVDGSWRFVDKAKNKEWLSKPRIDHRHHAMDAIVVACVNRAMIKKLADSTALRHFQCPLPLAAVDSPGAFRRRVLEVLKEINVSHKPNHSTAGELHEATGKKVLCLNPDVPGALLTVYGRKILQVVKTARDLNKLLIPETIKNEWYEDIAQDKEKQAKLVRDFGLYINTAEQILAEENERAVAEGKKEIKISEGRIIAKAFHIIQEKGLWRGDKFKCYENSSSLIYIKKHGIAYKSGNNHCVDFYVKDGKVGWEVIRRFDVNQAGFVPEWKKSGGKIIWSVQQGDLLELDTPDEWKGYTDKDRCLARVKKFSDGRVTIDFVTDARMTSPKDKSLKYMLVDSLEDRGLSYFLKNKARKVELTPFGKVKKKHKVLWNGTKAAA

SEQ ID NO: 345 - protein, 1018 aa, unidentified
  REGION 1..1018: note = Description of Unknown: Cas Enzyme sequence
MKDILPANSGYQSFLDGLVFGFDVGTGSIGYAVRRGSQFLDVGVLICDSEGGDLSKRRELRRQRRTLRSKRFRRRWFSDQLLKLGLTRPPVPRNDPIELRFRALNGERLRPGELYAALTHLFRRRGYTEVPWANCGVADTDLGKEEGIIREQVKEIREELRDLHPCQFLMNRQRQVGKSPTDKWARKIYWPREALEAEFRAIVSAQTASFPQLASKIDWLLYGDCERKTRNGRDFHVYFKNTRGRNPGVLGLKWPRFDNRSPALDSLQPIGEKGPLHVVRRDREAFQHAQWELALMNFRVLDASTRQIIDPRKHFPDFISSLRREWEKKNRISEAQLKKIALPWADEFLLIEGQKSLTPESGSGRARYSSPTLERIRNAIQAGESIDPPQPILQRAGEASEQALNRLLADMKHPVVRHRLVLFRELLARLIEKHGQPGLIVLEAVRSLALGKKAKNELNKRNDQYRKERELARGDLIAAGKSVSRKAITRYRLWKEALGVCPFCGEKITQEQLLNGQADIEHLVPRAAMDCSELYNLTIGHIRCNRELKGDRTSYAAFSSDREKWEQLSCNAQKCFKGKKLEIFLSPNAEELIERKADLQHTAYIARTIRHVSLIQLGWVGKDGRDPTIEKGNIPSSCFQVTNGQLTSRLRGAWGLNQILHPLASEARWDDLPEAEKEKFAEKNRGDLRHHALDAMVIACTLPWLAHRTVGALDPRTGEHGWWELDRRTQRSKALNPIFPHAGRMYEVCKDKIKTVRICHHVSRSNHQQAYATTLYAKKAPDTYVAREIFHSLTPKNLGSIWPKEFAYYCEAAWHRYSEESAEIEAEVKKSKDCIPENFTKRLCFSHFQKWRADGAPEFSWPETVKIPIRSVRLISVKDDLAVMPFSPGTHAFVKRTEFKEVRIHLSADGKSLVPVFIPYWRKDSPVADRPFGAKARAANVVRRGQLVQLSFPEASRNPSGLYRVVATMRGQIKLMPPHIKNDKDALLASGFFANGVNLAWDTFLKAAGYELPHTPPS

SEQ ID NO: 346 - protein, 1049 aa, unidentified
  REGION 1..1049: note = Description of Unknown: Cas Enzyme sequence
MITRLGLDVGTNSIGWCLIADDQRIVDTGVRIFSDGRDPKSGASLAVDRRMARGARRRRDRYLGRRSAFLRALVDHGLMPADTDEAKLIAEHDPYALRARALDERLEPFEVGRALFHLNQRRGFKSNRKAERGRKDGEDGKIAGGAKALDEAMRAAGARTLGAFLAGREVKRVRMGGESQAYDFYPQRHHVEAEFEAIWQAQAHHHPDLLTEAAREALHRVLFFQRPLKDPDVGVCTFVTDERRLPKAHPLFQERRLYEEVNQLEITTPGQASKPLSVDQRDKLVLKLRGKRKVAFTSLAKLLKLEPGQSFNKASDSRRDLAGDEVYAAMSDKKRFGPRWGTLDRDRQWAIVERLLNEEDPAVLHTFLTEECGLDDAPAVETAKAHLPEGYGRLGLTASTRILEELKNDREVVTYTIAVERAGWHHSDLRTGEFLDRLPYYGEILDREIPPGSQKPGDLPEKRWGKITNPTVHIGLRQLQKLVNAIIARHGRPDQIVVELARDLKLNEQQKEAHNRRIRDTTRAAERRSDKLRAEGFSDTGANRMLLRLWEELNPDNPVDRRCPYCGAPIGMAMLFSGEADVDHVLPYARTLDDSPGNKVVAHRHCNREKGNRTPWKAWGETARWPVIADQAGRLHKSKQWRFQPDAMERFEEDEGFIARQLTDTQYLSRLAGRYLSCLYEDGGKGSVYVIPGRMTAMLRRLWGLNSLLPDHNIVENQHSNAPKNRLDHRHHAIDAFVVAATTRGLLQRIARAAGRAEDKDLDRLFEGLPEPWDGFRDELQDKLLAITVSHKPDHGRKRRPRRDRDVTSGRLHNDTAYGLTGKMAADGKSPIVVHRIPLLSLKPADLDDPARIPDRALRTALRRAASGLTGKAFEQALANFAKTDKVFGGIRRLRVREPLNVIPIRDRAGRAYKAYKGDANARYDVWRLPDGKWVSDVVSMFDAHQRDQPDRRPHPAAKKMLSLRQNDMLAIERDGDAIIVRVVKFSTNRTIQLAADNEGGQLKARDAAPNDVDPFKYINSSASGLKKLKARQVRIDPLGRVFDPGPRE

SEQ ID NO: 347 - protein, 1115 aa, unidentified
  REGION 1..1115: note = Description of Unknown: Cas Enzyme sequence
MAITLAFDIGYASIGWCVLSSEDRSKQAPDFLGTGVVTFPTDDCLASQRRDLRRTRRHIRSTRMRIERMKRWLLHRGVLTREDLDRPGHPAPFLLAAAALQVHCTLTPWELWTVLRWYAHNRGYDGNTRWAGGDKDTEDDDEKVANAWSLMESHKTETMCETVCKCLGLNPGNYGKRISSALPYKTLNVAYPRNIVTTEVNRLLFQHRGKIPGLDAVTVRLLMSANELGPEDRSQLKTAGIKLPKRFHGGLLFGQLLPRFDNRIIRRCPITWAKTYDEALTVGKTDTEARRLADKFAKVPSSKCPEFFRFRFAMLLANLKIDDGKPIPRDLRQVIWNLAEQHGRVTHKDLVGAIKAAGHKPFNLDAYFKIHPDSEEALTLDPVVEFPNKNQIVKAIWPALAESIRKEAMARWLKGGSVSPMELFQLSGESQAVHAAIDAVFDKDQQKAKGTKSYNTIQDLLERKLAPVATTGRAPYARPVLKTVVDEVLAGPYHPLKASRATDQENGEDKPDNGVLYDLGIPTSRVRQLQDERPIDQLTNNHLVRHRMLILDRLVDDILAEFNPDGKDVARVIVEVARELREFSGMTAKEISSELKSRLKDFKAAVAYLQEHAPNLECNGGIIRKCRIAMDLDWCCPFTGEKYDAYDLPKLEREHIIPYATRNTNALHAMVLTWPEVNRMKGKRTARQFIAENEAKPVDGRTNLSLFTLRRYDDFVDKLDTRGHMDDYRRKRARKALLATNDFEDKELGFTEGQLTQSSQLMKLAMGALKRKLPGAAIDPIPGPVTAEIRKAWKLTGTLSRACPEVIDENDEVRPKDEIRGLTHLHHALDAATLALAAHYFPLQSRGQDQKGKIWQALLKRSRTEDEKKFLHALGIFDRYQRPRRDKDGNVTSELDVRLRDLLADVKEILARSLAECRVMQHVSSDRSGVKAELTTWGVVSIEGEGEDARVKLRQRTTTVENGRRLTALKSGEERAGKLLGIFPNAESGKLKALNGVMVIGENYGIALDPDPLVIPFHDVHQRLEQLRTKNGGKPVRVLRNGNLIRLHGQQQVWQIRSIKNSKRDGILMDLSSPHMIPSQQAGKSWCRRDVSVKTAMKGGLEIITRRYTGYPQRT

SEQ ID NO: 348 - protein, 1123 aa, unidentified
  REGION 1..1123: note = Description of Unknown: Cas Enzyme sequence
MAQTFAFDIGYASIGWCALSSGNAGAVAEPEVLGTGVVTFPTDDCLVSQRRDLRRTRRHIRSTRIRIERMKRWLAHRGVLSRADLDRPGYPAPFLLAAAALQGHRTLTAWELWTVLRWYAHNRGYDGNSRWARGEEEAEDTEKVGNANAQMQKHGTSTMGETVCACLGLDPSRSSDRISSALPYKTLNAAYPRKVVTSEVGRLLSLHLDRITGLDSLTVRLLLKEADLSDEERRQLHSADIRLPKRYFGGLLFGQLVPRFDNRIIARCPVTWAKTYDEARQEDKADGEARKLADKLAKVPAAKSKEFLEYRFARVLANLKANGEPIDQELRSTLWRLAEKQGRLTHSDIAKAVKEHCGQVPTNLEAYFKLHPDSEEALVLDPVMDEVRKAEGKRAKLSPVWMYLPEEVKRRTIGQWRKNKSVSFAWLLEQCKGLDGEGEVMAALEKSFADEKPKKGKATFASFDDYLLKTAVAPKFSTGRAPYARPVLRQVVEEVKNGWDPTKANKITDPESGEDKPANGVLYELGIPSSRVRQLQAERPIEQLTNNHLVRHRMLILERLLDDMLVEFCPGGNAPDQIVVEVARELKEFSGMTAKQIASELNSRLKDFKAAVAYLEKNAPHLLEDRSGRGSILRKCRIAMDLDWRCPFTGEKYDAGDLPKLEREHIIPYATRNTNALHALVLTWPVVNRMKGKRTARQFILDDGGKQVPGEERLSLFTVKTYDSFVDRLDAKGHPNDTRRKKARKALLATTDFEDKELGFTEGQLTQTSQLMKLAMGAIRHKLPGTAIHPVPGPVTAEIRKAWKLTGTLALACPEVLDAEGNVRPKDEIRGLTHLHHALDAATLAIAAHYFPLTHRGQDQKGKIWQALLRRYRTEEEKQFLHRTGIFERYTRKRRDKQGNEYTEPDVRLTDLPADLKNALARSLAECRVMQHLPSDRSGAKAELTTWGVVSIDGEGEGARIKLRQRSSVVEEGKRKIETKTRDERAGKLLGPQPKEGRGKLREIKGAMIIGDNYGLALDPEPEVIPFQNVQQRFEAIRVKNGGKPVRVLRNGMLIRLSGQGSRDGVWSVYTVQATLKVDLVRPGTYGRPKKGTNVWREVAVKGLLQKGMEILPRRYSGYPHKD

SEQ ID NO: 349 - protein, 1126 aa, unidentified
  REGION 1..1126: note = Description of Unknown: Cas Enzyme sequence
MMHLSSSMPLTITFDIGYASIGWCVLSSETGNPEFLGTGAVTFPSDDCLASTRRTLRRTRRHIRSTRQRIERMKQWLVHRGVLSRDDLGRPGHPAPFLLAAAALQGHRTLSAWELWTVLRWYAHNRGYDGNTRWSRGEEEPEDTEKQANARTLMEKHGTGSMSETVCACLGLKPAGHGHRISSELPYKTLNAAYPRRVVENEVLALFERHVGKIPGFDAETASGIFNPAERDSKYRRSDELDASYRASGIELPRRYHGGLLFGQLVPRFDNRIIARCPITWAKTFDEAVGEGRTEAEARKLADKFAKVPSAKCPEFLGFRFASLLANLKVDDGQPLPKHLRRHLWELAQQRGRLTHRELKKEITSAGHKPYNLDATFTIHPDSEDALTLDPVAEFPQKTQMLKPVWDVIDETTRKQVLEIWRKGGSVSLAAILRMDGPTDAALQGCKAAHAASQKRSRNKEALVSFEDFIAQPLAPKKISGRAPYARPVLKQVVAEVLEGYHPRKASKATDPENGEDKPENGVLYELGIPGSRVRQLQAERPIDQLTNNHLVRHRMLILDRLVDDIVAEFCKDGAEVGQIVVEVARELKEFSGMTAKQIASELNSRLKDFKAAVAYLEKHAPKLEPTGGIIRKCRIAMDLGWHCPFTGESYDAYDLPKLEREHIIPYATRNSNALHALVLTWPEVNRMKGKRTARQFIAEFEGKPVEGKSNLSLFTLRNYDAFVEKLDTKGHDDDRRRKKARKALLATNDFEDKELGFTDGQLTQTSQLMKLAMGALRQKKDASGKSIFERTHIDPIPGPVTAEIRKSWKLTGTLALACPEIIDAEGELLTKNEIRGLTHLHHALDAATLALAAHYFPLRNKGQNQTGLIWRALMKRNRTKEEKELLHRLGIFDTFQRSRGDNQTIETDVRLRDLDKAVKEALARSLAEGRVMQHVPADRSGVKAKLTTWGVTGINGEGEDARVQLRQRSSTVEDGKRKIDTKTCEERAGKLLGVAPKSGTGKLKEVKGAMIIEENYGIALDPAPVVIPFHDVPRRLDEVQKKNGGHSVRVLRNGMLIRLSGQGSRDGIWSIYTVQASLKVDLVRPGTVGRPKKGANVWREVAIQGLLKNGLEILPRRYTGYPITD

SEQ ID NO: 350 - protein, 1190 aa, unidentified
  REGION 1..1190: note = Description of Unknown: Cas Enzyme sequence
MLMSKHVLGLDLGVGSIGWCLIALDAQGDPAEILGMGSRVVPLTNLGDDKAFSKGKAFTANQKRTARRTMRRGFARYQLRRYRLRRELEKVGMLPDAALIQLPLLELWELRERAATAGERLTLPELGRVLCHINQKRGYRHVKSDAAAIVGDEGEKKKDSNSAYLAGIRANDEKLQNEHKTVGQYFAEQLRQNQSESPTGGISYRIKDQIFSRQRYIDEYDQIMAAQRVYYPDILTDEFIRMLRDEVIFMQRPLKSCKHLVSLCEFEKQERVMRVQQDDGKGGQQLIERRVKFGPKVAPKSSPLFQLCRIYEAVNNIRLTRPDGSPRDIIPEERAKIVAHLQSNASLSFAALKKLLKEKALIADQLTTKSGLKGNSTRVALASALQPYPQYHHLLDMELETRMMTVQLTDEETGEVTEREVAVVTDSYVRQPLYRLWHILYSIEERDAMRRALITQLGMKEEDLDGGLLDQLYRLDFVKPGYGNKSAKFICKLLPQLQQGLGYSEACAAVGYRHSNSPTSEEITERTLLEKIPLLQRNELRQPLVEKILNQMINLVNALKAEYGVDEVRVELARELKMSREERERMTIQNDKRKEANDEVAEKIQKCGLYPTKSRIRKYRLWEEAGRQCLYCGQSIEEEQCLNGDDMEVEHIIPKSVLYDDSYGNKTCACRRCNKEKGNRTALEYIRAKGWEAEYMERINERLKEKKISYSKYQRLRWLKEDIPSDFLERQLRLTQYISRQAMAILQQGIRRVSASEGGVTARLRSLWGYDDILHTLNLDRYDSMGETERVSREGETTEKLRIKDWSKRKDHRHHAIDALVVASTRQGYIQRLNRVSSESEREAMSGEIEMQKVTKTDKLSLLERWLTQRPHLSVRAVSDKVAEILISYRPGKRVVTRGRNIYRKKTADGREVTCVQRGVLVPRGELMEASLYGKILSQGRERIVKRYPLHTLKGEVVDPRLRELIAEYNQEITSKVKAKGAPLYLDAAEKQEVRSVRCYVDKPSVAKAIPIRFDECGRAITFVQSGNNHHLALYRTPKGKLVGSIVTFWDAVDRARYGIPLVITHPREVMEQVLQRGDIPEQVLSLLPPSDWVFVDSLQQDEMVIIGLSDEELQRALEAQDYRKLSEHLYRVQKLSAGKYFIRYHLDTDVDEDNRSGRIPKFYQLSLDAYKKNNVRKVRVDLLGRISLL

SEQ ID NO: 351 - protein, 1401 aa, unidentified
  REGION 1..1401: note = Description of Unknown: Cas Enzyme sequence
MDNNFFLGLDCGTSSVGWAVTNDEYDILKAKGKALWGIRLFEEATPAADRRTFRAARRRNFRKRARLDLLNEFFEEEIKKVDPKFFERLFDSKYQIEDKTNIGDKNTLFNDKKFNDIDFHKKYPTIFHLRAELIHNKTPHDIRLVYLAIHHIIKNRGHFIYEGQQIDNVQNVDNLFKNFQQIYNDVNEGVEINYPDGFDYIKRLLTDKTLRNRAKELKTQITVTSTDDKISTKIQAEIVKALNGNKVNILKLLPYSNIEEEELEVKDFSFSSSTYDENEITIKNSIGIDDFNIISCLKEIYDWSLLDTILHGYKFISDAKITTYETHKKQLAQLKKLVKQYNPDKYDEAFFTIKDKLQNYCTYVGHGLEKGKKDKGEIKSKCTQEDVNKYFKKILEEAYKNNPDDKDLQEIYSKIELNLLLPKAINGDNRVIPYQVNLMELEAILENASNYLSFINIKDEEGFSIKEKIVSIMKFRIPYYVGPLVENTKENKEYQKFSWMVRKESSTGKILPWKFTDQVDLAACGNEFIKRMSRKCSYLPNENVLPKSSLLNCEFTLLNELNNLKINGEKPSTELKQQIYKLFEQNKSVTINKIKKYLISIGEYSKKEEIIFTGIDISFKSSLKSYIDFKDLLNSKILSYDAVEEIIEWSTVFSEGQGLLKKKIEEKYGSKINNEQLKYILSKAKSYSGWGNLSKKLLTEMYHIDEDGECKSIITLLRETSNNLMELLSNRYTISQSIELELKNTAKDYNSWSYENLVEPLLVSPSVKRSIWQTILIVKELRKVLGKDPKKIFIEMARGPEKRDKDGKGIRTVSRKSQLIKQYEELTENPEAAKILQLLEKESDATLRKDKLYLYFTQRGRCMYSNKIIDLYDLLNTNKYDIDHIYPQKSVKDDSLNNKVLVLKEENGKKSDKYPLPLDIQNKCKEHWNYLNNSGLITKEKYNRLVRKTKLDKDELENFIARQLVETRQSTKAVAKLLEKLCPDSTIVFSKAKAVSDFKRQFAFYKARSVNDLHHAKDAYLNIVVGNAYNTKFTKDPRYILRNENSDSYNLSKLFYFDISRYNHKAWERDLNGKKRRENNNDFDSYPETGTIVTVRKTLDKNNILFTRQTFQRKGKLSDLLIVKKGSKNSVLPIKSSDEKLLQVEKYGGYNNVAKAYFFLAEYTNKKKKVMRFFDVPVYKAAQIDNNKITLEEYCINELKIENPKIIIPKILINTKIKLKGFTYEISGAMGPQIGLKTAIPLLLSNDNYKYVFYLEKYNEKMKIFIRFNKNVSTGDLKNQSFLLEEKFKITKEKNINLYNELKDKLNNSIMKNRATVSSLIGNINGNVDLFSESTIKEQSFLLEQFIMLFACKFGSCDLSLIKNSKQSGNPGMGRNLNNDITFIYQSATGLYERKERISIL

SEQ ID NO: 352 - protein, 1067 aa, unidentified
  REGION 1..1067: note = Description of Unknown: Cas Enzyme sequence
MAKEPVRPIRYRLGLDLGSTSIGWAVLRLNERNEPDYLVRSGVRIFSDGRKRTDGTSLAGDRRLKRQQRRRRDRLLRRKRRLIAALTHAGLWPESRPEQLRLKNLNPYELRARGLREALTPYELGRAIFHLNQRRGFRSNRRTDRGQDKEKGLIRSAISALTQKLRESEAETLGQYLYERWRQGEGTRARPLGQGANVAYEFYVDRALVAAEFDLLWERQRQFNAIQLTDTAREKIRDVLFYQRPLKPAQAGRCSLEPDEPRALIALPSTQRFRILQEVNHLRVRATNAADERPLTVAERTVLLEDLFRGKSRTFDEIRRRLKLPHARFNLESERRKKLNGDLTAVILAKPSCFGKVWHQLPLEEQDATVSQLLDDSLTDEEVARRLRNSHGLSPDSVERILTANLPDGYARLSYKAIKRILPFLYEGLTYDKAVRAAGYSTTDTSMDGSAPELPYYGRVLERHVAFGTGNPRDPDEKRFGRVANPTVHITLNQLRRLVNALIARYGKPAEVVLELARDLKLGRQRAREIEREQAERQRDNDRLREELQQLGQPVNAENMLRLRLYRELERATGITTQCVYTGEQISLSQLFTPEVEVDHILPYSRTLDDSIANKVLCKARANALKGNRTPYEAFGHSPEGYVWQEILLRAAALPRNRRWRFSEDAMLRYEENGAFLARQLTDTAYMSRLAREYMTAICPSNKVWVTPGTLTGLLRSKWGLNRLLAHDDQKNRLDHRHHAIDAVVIACVDRSLVQKVAAAAARAEGQGSGRLLDGLEHPWPSFMLGVENAIRRMVVSHRPDHNPQDALHNDTSYGCRDTEESDATVVKTRCVHHYVPLLSLADAKPTDIREHLADERHGRAIAELLERRGGTKADARAALEEYGRSTGIRRLRWVEQLTVIPIRDRRTGVPYKFVKGDGNYCYEIYETPAGQWAGELISTFTANQRDFLERMQDMERYRRETFSGKPLVMRLIVNDTVAIELDGRRLIYRVQKMSEGRIVLAYHAAAGDPTRNGVHIPEIPEGRTVITVSPGRLQQLNARRVFVDMLGRVLDPGRRHAGTHRRASGG

SEQ ID NO: 353 - protein, 1038 aa, unidentified
  REGION 1..1038: note = Description of Unknown: Cas Enzyme sequence
MKYRLGLDLGTNSIGWCALELDNQGSPSRIVDTGVRLLTPNQEAGRDPQSKQSLAADRRAARQARRQRDRFVRRQRALMRALVAYGLMPDHQDARKALERLDPYQLRAAGLDEPLELHELGRALFHINQRRGFKSNRLAQREDEEDSVTRAAAKALREALQREGARTVGEFLWRRHKRREAVRFRPTPAKGNKVSYDFYPNRDLVEDELDRLWAAQKPHHPEVLTVQALEAIKHIILHQRPLAKPLVGPCTFRPEEERAPKALPDFQRFRILQDLASLEVEQPGIGSRKLSLNERDTLLALLLNRKTRVAFDKMAAALGLPANARFNYAASGRDGFDPDLTAAKLGAKKVFGNAWGKLKLDQQNTIVERLLGEEDENALLDYLEEQCRLPREPAERASRTRLPQGHGSLGRSMLNDLVAVMQREASEAVDPETGEIYEAPVTYDEALARLGFHHSDLRPGELYARLPYYGDVLKRHVVENPAAPEGSQERRGRVTNPTVHIALNQTRRLINALIAEYGAPEQVVVELARELKWGRKRKDDYNRRLRENRAANERRDEKLAQLGLEANRDNRLRLRLFEELPPSERVCVYTGSPLSVSSLFSSEVEVDHVLPFSLTLDDSIGNKVLCTREANRDKQRRPPAQAFDSETLAEIAKRANRLFPRKAWRFDPDAMERFQENGGWQARQLTDTQYMARLAKTYLECICPSGNVWAIPGRMTGMLRGVWGLNSILAGAGGSKNRNDHRHHAIDAFVVACSDRGLLQRISRAATASERLDLDRLFGADGVPEPWRGVRHELSAALEKVVVSHKTDHGQQGQLHEETAYGLVEDDIDGKPYNLVFRKPVADLTPNEAARVRDPQLRGELTGVIQGAQAEGEKLNIALARFGDQHGVRRVRVLKTERETRVVRHGEGYYKAYVPGDNYCVDIYELPDGEWRGEGITLFDVNQPDYAPSWRADHPCAKLIMRVHKGDLLEATINGARNIYRIYRLNPRANRLWLAVHNQGGVEESDFVRPSYRTLQEGQARLLHVDVLGRTRPIEPAA

SEQ ID NO: 354 - protein, 1108 aa, unidentified
  REGION 1..1108: note = Description of Unknown: Cas Enzyme sequence
MNKWRLGLDLGTNSIGWSVLGLDDENAPDSLIDMGVRIFSDGRDPKTKEPLAVARRTARGIRRNLHRRKQRRRKMFKLLQEMKLYPESREEAQKLKAMNPYELRAKALDTILEPKELGRALFHLSVRRGFKSNRKESQNPENVETAEKETKETSKMTQADKCQSLVDTLKESDARTLGEFMWKQLQRGEGVRFVPGRSTYYPLRSLYEDEFFRIKEAQEKKHKNVDWDALHHAIFFQRPLKPQERGKCQFMPENPRTFKAMPSSNRFRILQDVLNLDMYDELNHKVPLSDEQADTIIQLLDTKDKATFKAIRTALHVNHRFNLETDNRQELKGNETSRKMRMDRHFGALWDTLPLEEQDDIVELLITADEDEQVFSLLNRYDLSDAQKEAIARLVLPSGTTSFCKEFTQKIVKVMQENRLQYHLATKALGYEHSDQKVDAYDLLPYYGKVLTGSTLGGDAGKYTEEQPEKKYGKIGNPTVHVALNQTRVVVNALIKQYGKPSQIVVELSRDLKSSRDAKRDIMRKQAENAKRNAILNTNIKDLMKNIEYPGRFERQKFKLWEELGKDKASRCCLYCGKNISASELFSPNIEIEHILPFSRTLLDAESNLTVAHQKCNAFKAERSPYEAFGTSPKGYDWEAIMARVNNLPVSTKKKRFAADAMETFEKESGFITRQLTDNAYLSRISVRFLHAICDNVWTVNGSMTKLLRDKWEIDSILKKKINKEEIMAFGLKDDMVGTYKKNRYDHRHHALDSLVIGLTDRSMVKTVADLNARSHRNRLEAPAMPVSRMDVIEKLRNLVVSFKPDHGAEGKLSKETLLGKIKQEELIPIGSLEENDIPNIKDERVRTDFMERCENEGSFKNAVKALRDVYPQIKVFREQFVSRTPITSIKAEKNIDDIIDPVIRKKLQDYITINKGQKFESILVQFSQDTGIKKVRCKTYGQTPIVIKPNTRNPLAVTRYLNPEDYFAAIVWEIPPVKEGAKPKFEAQYARRTEVDKAGKPIELKPHPAAKKACTIHKDDYIEFSEDGIWKKARVAGFSATQNKLDIRPVYSTGSVKDWIIATQTGFVGKGWKFIDGQYYMSINVLFGSLSARKITVSPIGKVFRKK

SEQ ID NO: 355 - protein, 1311 aa, unidentified
  REGION 1..1311: note = Description of Unknown: Cas Enzyme sequence
LGRAFYHLAQRRGFKSNRLDQSEETNEIENYKPIWNSIVNKSNNITELILNFDNYIDTEEVEDKKVNTVLSKLKKMILYLKKSKNEGFETEKEKFLRIINKEEKLGTVKQSIKDLSKKIEDANCETLGQYFYLEYLKSNKIRNNYTHREDHYEKEFYTICAKQEFDAKLIKKIYDAIFFQRPLRSQKGLVGKCTFETNKARSPISHPLFEIYRMLAFINNIKYKISEKDKDSCKFGCCEQLSDEQKNVIVDLFFRKRKPQFDFKEIQEKLKKHEGKELVFNYPHYTTVTACPITAALKLVFTDKKEWKNYSFHEKISFYKNIHFPKLSTKKGEHLFAVWHVLFTFEDKQKIVEFAKEKLELDDIKANQLSNIVPKQGYASLSIKAIRKILKFLEKGLIFTHATFLANMQEVVGKEIWQDEIKQKEIITGIVEIIENHGFENKRLLAVNSLLKTCFDNNYTYSIVAEAEYKKDIEKNLKLDLGKFTWDKIENKNEVIEKSLDEFITLIEKRKFAKIKRTDEKIFDFLKGENSTGEIFCSDEKRLKKLYHPSDIDMYKKARVSEDGKKYLGSPRTESVKNPVAMKTLHQARHLINSLIKENIIDQETKIHIELAREMNDANVRKAIESWQKENQKKRDKYKAEIKELYKSETGRDIEPSQEDIIKYQLWEEQKHICVYTGKTIKISDFIGADPVFDIEHTIARSLSYDNSLENKTLCFNRYNRDIKNQKLPTHLENYDKKHTFSTNASDLHCKAILPIIEHWKIKYETLDKQIQQKVKQSRAAQTKDAKDRAIQERHKLTFERNYWRNKYKRFTMEEVPSGFKNSQINDTRLISKFARAFMKTVFDKVYVINGKTTDEFKRIWGLPEKNRNNHIHHAIDAVTLACITKNKNDLLANYYKDEENYSKPKFRKPWKTFTEDLINLANDTLIYHVREDNAIKPAKKKVRVRGKIQYKKDKKGNKIPIYMQGDSIRGSLHQDTIYGAIKNPNKDDAKNPIKYVVRKKLETGENGFKTEKELDKIVDKTVLQMIKTQIKANGNFKSTIENGVFMLKPKRNEKDEVIKDENGIIDFEKDKKGNFISGHPIKKVRIYTPSVTSPLHIKKHKDLSKHEHKQHVHVVNDTNYIMAVYEGKNKKGKTIRDYRIVNLYDTAEYYKTSNKSHKKEYPIVEEKIYNDEIKFKHQFNLKTGLKVLLLNKEEDSLDFLDINYLYKRLYIIRGLDGDGIKLYHHQEARKTTDVIKYMNNEINKLNILNNILDKKGNVKTSRLTTPKGGDVIDKYKQFPYVKFKVSNFNALVEGIHFKMTAWGDVVKIDN

SEQ ID NO: 356 - protein, 1108 aa, unidentified
  REGION 1..1108: note = Description of Unknown: Cas Enzyme sequence
LTAKTNIRYRVGADVGLNSLGFSAIQLDANGNPTALLKTLSYIHDGGVDPTQNKSGTTRKAMAGIARRTRNMRKRRRHRLNQLDRQLYQLGYPVDGVPDCEQDLYEDWNTRSALATTYISDKDRRDRMIVMAVRHIARHRGWRNSYSRVETLFEDVEPSDQYKDLKQRVETRLGMKLDDDMTPAQLVALTLSERNGKLVRLRTSTKYGEGILPNRLMQSDNARELRRIFTVQQVPEEVWKPILRTVFHCASPKGSAEKRVGTDPLDQTQKRALKASLAFQKYRILNIITNLRIRRKGEASRPLTVSEKQDVYELLTTAKEDLEWLDVCAILGIERNELKGVGTLTHDGEERIGNKPPVLDTVIRIHGIKNTKLRKMMDIWWNAATEDEQSAMVRLLSNTVDLDKVRDLIEYASPIEFIDGLDEDLLTPLDSISLPVGRAAYSEKTLDRLSKRMLETEDDLHYAIRHEFDVPADWKPPVPPVQEPTGNPAVDRVLKAFNRFLSQCEQQWGTPESVNIETTKESFSSIAFGRTLDFERRKRRDKDNQVRAAIREDMRKQLSNGGSLKVHDYDVRRWEIVQSQNNTCLYCGATSPRFSFDKSELDHIVPRRGVGSDSKRTNMAAVCPECNANKSNIPFAVWVGSEYAKQHGITMEAVTARVNQLMFPQSMTRKQVGQVKKTIISRLKQTERDEPLDNRSIESVGWMADELHRRLDGRYASKDVDVNTFPGSITYEARRASGIDGRIHFIGAQYKTRLDRRHHAVDASVIAMMNQNTALRLAERHYLRESQRLCGTPFGQTDWKQYPNENTPGYVRYRQWIEQMKSLLHLLNKALDEDTIPVVRSRRLRLGNSTAHDATVKPLQYARLGDALSPTLIDHAITPQVWKALTRLPDYNPQTGLPANPNRVITALGEVCHAKDEIGFLPGNNAQLYVNGGAADIGGTIHHARIYRCEQVLKNGKRKTFYGMVRVFQCDLMKRKKNTDLFRTPLYPADVSLRYADGKVREAIALGNATCVARLTLNDEIKLTSELMEDMCPEYAHMFHTDSGVERRFIVAGFPSPTQFRLVPSVISSEGIPKLAEHGFNIPTSVQSMLVLHKFRPAVGKTGQVLED

SEQ ID NO: 357 - protein, 486 aa, unidentified
  REGION 1..486: note = Description of Unknown: Cas Enzyme sequence
MSHKVRIIKVRHAGASVYLGDDSCRNHCWTRNPERIMDWLCDGWRTRFNQHREHRTIRRYMEDVESRERMWVDVPLGGSTVGEPFKDSEARIRCSWLACIPSAILASPMRVENSEWYAGLKRKKINGGRVPGFKSRKRNPQYFVCWRNQNKTGNAVYHQVSRKRGVVVITGTVKKEFRKPDETGCRWMLSIHVRVSQPVREYTSVAVNWTERTLAFTNEPSPIRRNTTGKQTGIDRGCVHTLALSNGTMLDMPQPSERERREYLRLQRKLARQDMTNSRRGGKTAKFQSKRRKLTLKRMSSIRRRINNRKDDWVNKTTTRLVEDCDLIALEALDTRQMTRKPKPKQDPNHPGYYLRNGSAAKAGLNRSILANRWADIQNKLEYKTRLAGTQLILVNPAYTSQTCNRCGHVAKENRESQAVFHCVNCGFTDNADTNAAKNILDRAIHTTGMDGAESVEEHPSVKTKALPDASPDETLTPATREGRFL

SEQ ID NO: 358 - protein, 1051 aa, unidentified
  REGION 1..1051: note = Description of Unknown: Cas Enzyme sequence
MALVFGLDIGIASIGWAAIDEEHHTPLLGLGSRIFVSAEVAKTGESLALPRRLARGVRRRIRRRAHRMSRIRQLFLRVGLADDAALADLHETSKDDLTPWLLRADGLNQQLNQRDWARTLIHIAKHRGFKSNRKSEASDKEGGKLLMGVTGNAKLLKEKGYRTIGEMVWKDEKFAEHKRNKGGDYSHTVARDDLLIEITALFEAQRTLGNVHADNAFEAEYTKIFASQRPVDDGEIAEMVGECTFEKGEKRAAKATYSAERFVLLSRLNNLMLINAGERRVLDATQRKTIEAMAYKSSKITYKQIRKALDLPDSIRFNLVAYKSGEIDKAEDVAFAELKAYHQLRLAITKACGELAWGNLTNQPDKLDAIATALTWYKSDSKICEILATEKLEPDLLDAVLSLSFDKAVALSLKALRNINPFLAQGLRYDVACSEAGYDHSAPTEVQPQQFLPYIPVDEVRNPVVLRALTQARKVINAMIRRYGSPSQINIELARELSQPYSERRDIESKQKEFQAEKERTVKQFNDTFGRDPHRDELTKFRLWREYNYCAYSGMYLEPARLLEEGYAEIDHILPYSRSMDDSLNNKVLCTSKANRDKGNKTPYEYLNGVSASSQWHEYKVRIETHKAFRQAKRNRLLRIDFDETTSTEFRERNLNDTRYIARFLQEFLKLNLQFAPSESKVPVQTRNGAVTSFLRAHWGLLKVRADGDLHHALDAAVVACTTQGFVKRISDYSRKKELWASDKGASDTTRNLEVIDTETGEIVTTNYQKKENEHFPLPWSSYRTDVKDALSEVFVSRAPTRKATGGVHDEKIRSTKRMNEEKPVTTSKTKLHDLSLASLENIPDKLTRNANLYLALKKRIETSGKEPFARPFYLGKNSEESDAVDGRLIRAVKLERTTKTGVSVRGGLADNGEMLRVDVFNKVGKFYLVPIYLADRVSSVLPNKAIRAATMEQDWPEMDDSYQFAFSLCNNDLILISDKDGGDDAFLRGYFKGAHRGTGAINIEGHDRSWKKDGIGVQRLATFKKLQVDVLGEVFEVKRESRHGLAESAD

SEQ ID NO: 359 - protein, 1101 aa, unidentified
  REGION 1..1101: note = Description of Unknown: Cas Enzyme sequence
MQWRLGIDLGTNSLGWAAIELAGTDPDSWHPVGILASGARIFSDGRDPKSKQSLAVDRREARAMRRRRDRFQQRQRALMKYLVADGLFPSDPVERKALAMLDPFELRARALEKELSLREIGRAIWHLNQRRGFKSNRKTDKPDDDAGKVAVGVERLRTAMADAGADTFGQWLHMRRQPDEEHPEGLSVRTRLRAEAGEDAKGTGYDFYPGRALIEEEFNAIWATQAPHHPDVLTDEVRDRLFEIVFHQRPLKAPQIGTCTLVQGETRLAKAHPLFQRRRLLEELNALRIVRAGQVAERLTPEQRDLLFVKLKDKAKVSFESLRKVLKLDDDARFNKESENRRELKGDEVAAVMGAKTRFAGRWAHLSVEEQAEIVERLEDAESDAQIAGFRVWVGEIYGLSDAQTAAIAAARLPQGHGRFGSTATSKLIEALRDGRDADGRVVVYSEAVDVAGLGHHSDFRTGEVHDALPYYGAVLERHIMPGTGDASDLEEKRVGKLTNPTVHIGLNQLRRTVNRLIERFGLPTQIAVELARELKLTEDEKDERNRENRRNREDAERRSRKLLGLDAAGNQIGRKIADDTGANRALLKLWEELDGDNVLSRACVYTGRQISIDMLFNGEAEVDHILPFAATLDDSNGNKIVCVREANRAKGKQSPFKKWGDGPEWAAIAERASRLPKNKRWRFEPDAMQRFDKDGGFLARQLIDTQYLARLARDYLSSLYPETGPGSGRVWVSPGRLTEMVRRKLGLNTVLNDHNYGGDKPKNRLDHRHHAIDAIVIAIVDRPLLNLVSRISGQQGADGREKIEIPPPWDGFRGDVYDAVQAIVVSHRPDHGTAGHGVRSTAGRLHEATAYGLTGEVDAKGNTIVVRRKAFRALTPPDITTIRDPDLRDRLLDHIAGKTGKDFERALQWFARNGPGQFRDIRRVRVVKPLSVIPIRDGDGRAYKGYAGGSNYSYDVWEMPDGKWVVNWTDPDGVSRSSVLSMFDAHQPRTALRPHPAARRVLQLKQGDLIAIERTPGDRRIMRVSQFWQNGQVRLVEHMEAGKLDDRHKSADDPYTNFSPTCGGLKKLRARKVGVDETGYVRDPGFPARTAVRRTRPKPA

SEQ ID NO: 360 - protein, 1062 aa, unidentified
  REGION 1..1062: note = Description of Unknown: Cas Enzyme sequence
MDTVDKYSVLGLDLGSNSVGWALLEYTNGQPTGLTDCGVRVFDAGTEGDVESGKDTARGVERREARQRRRQCERRGRRIENLACLLSRNGLLPKGAMRKPEERNRLLQALDRDIYTKYREAGQPGKATVSVLDQLPYFLRCRALDHPLDPHELGRALYHLAQRRGYLSNRKSGKQDEDKGTVEPAINELRERMAAGGVRTLGEFLSRVDPVNERRIRQRWTARDMYLDEFEAIWDAQRPHHRGLLSDALKKQIADAIFNQRPLKSQKGLIGGCDLVPGKKRAPKALLISQRFRMLQKVNDLEVIYSDESHRHLTGEERARVLEEMEQHAKLTFKGIARLLKLPKGVEFNFERGGEKDLPGNKTAAALRAVFGDRWDSFSREQQDAVVGEVMGIEKAETLERRGRDAWDLDHEAAAAFGKVHLESGYMALSREAMRTVLPLMEQGIPYATARDQAFEGNWARNVLDHLPGVSEACNTIRNPVVMRTLTETRRVVNAIIRKYGKPDCVRIELAREMKKSREDRRKMTADNQKRRKANDALRQKIIDTTGDPRVTGRDILKARLWEECRGTCPYTQKTIPFHELFRHDSPWDIEHIIPFSRCLDDSYFNKTLCYHEENRNVKQNRTPREAYEHSGRWDDLLACVARFEGDAAREKLRRFQMKADDLLEFEAFSARQLNDTKFASREAQRYLSWLYGPEAQSRIQVSRGQITSYLRGAWRLNSILGDGGEKERADHRHHAVDAIAIALTDRATVKALSDAAASQFRERGRTHGFEKRVTEPWTGFVEDVQRAIDRVVVSHRPSRKVSGSFHDDTIYSPPRTDREGKPYVMVRKPLTDNFKAADIQNIADPTVRDIVWQHFRDHGEDPRAAFSNPANHPRIPIKDGPRAGQTIPIHKVRLKYTRDVIPIGHGPSERYVWTRGNSHIEIFEVRDKDGNVKKWEGRVVTLLDAYQRRKQRQPIVNRHGDDDRRFLFSLTQRDVVEIDVEATPGEVIRELYVVRGVSMEKDGRLEIMHIYDARRKADVPRSATDTEKIRIRISPFVSSLNKRNCRKVSVSPLGEVYPAND

SEQ ID NO: 361 - protein, 1069 aa, unidentified
  REGION 1..1069: note = Description of Unknown: Cas Enzyme sequence
MDSVAKYTVLGLDLGSNSVGWALIEYRDGQPSALTGCGVRVFDAGTEGDVESGRDSARGVERRDARQRRRQCERRGRRLENLAGLLSRNGLLPKGAMRKPAERHRLLQALDQEIDARYRNAAPPDEKTAAALDQLPYFLRSRALDHPLEPHEFGRALYHLAQRRGYLSNRKSGKKDEDKGTVELNISELRERMSAAGVRTLGEFLAQVDPVNERRLRQRWTARDMYLDEFEAIWAAQQPHHPRLLSDALKKQIAEAIFYQRPLKSQKGLIGVCDLVSQKKRAPKALLISQRFRMLQKVNDLEVIFADESHRRLTEDERHAVLQAMEKKDEITFPQIRTAAKLPKGVEFNFQRGGEKDLPGNKTATALRAVFGEQWDRFSRETQDAIVGEAMGIERAETLERRGRDAWGLDPEAAAAFGKVHLESGYMALSREAMRAILPLMEQGIQFATARDQAFEGNWARNVLDQLPGVAEACKTIRNPVVMRTLTETRRVVNAIIRTYGKPDYIRIELAREMKKSRDERKKITAEIQKRRKANDALRQKIIDTTGDPRVTGRDLLKARLWEECGGLWKECGGRCPYTGKSIPFHELFSQDSPWDIEHIIPFSRCLDDSFFNKTLCYHEENRNVKQNRTPREAYEHSGHWDDILDRVARFQGDAAREKLRRFQMSTEDLLEFEEFSARQLNDTKFASREARNYLAWLYGPEAQSRIQASRGQITSYLRSAWRLNSILGDGGEKVRGDHRHHAVDAIAIALTDRATVKALSDAAASQFRERGRSRGFEKRMTEPWAGFLEDVQRAIDGVVVSHRPSRKVAGSFHEDTNYSPPRTDREGKPYVLVRKPLKKDFKAADIQNIADPTVRDIVWQHFRDHDEDSDAAFSNSANHPRIRIKDGPRAGQAIPIHKVRLKYTRDVTPIGHGPTERHVWTRGNSHIEIFEVLGKDGNVTKWQGRVVTRLDACQRRKQGQPIVNRHWDESRRFLFSLTQRDVVEIDVETTPGGLRRELYIVRGVSMEKDGRLELMHIHDARRKADVPRSATDDEKVRIRIAPFVSSLKKRNCRKAMVTPLGEVYPAND

SEQ ID NO: 362 - protein, 1039 aa, unidentified
  REGION 1..1039: note = Description of Unknown: Cas Enzyme sequence
MKNAAEEHILGLDIGANSIGWALIAFQGGTPERIVRAGVRCFQAGVEGDVESGKDQSRAQKRREARLARRQTERRARRMGKVARRLQQAGLLPEGAIDNGEERLRFFTKLDRSISSRYLSAVPEAGPERRRLAHVIPYKLRADALDQRLEPHDLGRALYHLAHRRGFLSNRRAPVKTDEKPGVVKENITKLGEEMEEASARTLGEYFAGLDPEKQRIRARWTSRKMYLDEFERIWEKQSAFHASILTEEFKKELHDAIFYQRPLKSQKGRIGKCELEHGCRRAPTASLEFQRFRLLQKVNDLLAISKTDGVVRPLTSDERDKLIPELDANEKVTFGRVRKLLGLRGWRFNLEPGGEKNLMGNKTGAALARIFGARWSTFSEAERQRVIADVRSIQKDETLKRRGMQVWGLDEDAAEALSNVRLEDGYCNLSRKALRKILPALEKGASYSKVVKELYGERERPVLDYLPSVNQSGIMVLNPAVHRALTELRKVVNAIIREYGKPDKIRIELARDLRQPRKERKRRSDQMRSNQTARNEARKRILQETGDSSPSRTDILKVQLADECNWECPYTGRQINWAKLLGAEPQFDIEHIIPYHRSLDDSFVNKTLCDVAENRNVKKNQTPMEAYGGTDSWDDILQRVTNFKGRLAGEKLRRFALEDLSEFEDFSSRLLNDTRYASTLAADYLAALYGGLWDAGGVLRIQATKGGITAQLRNAWKLNGILGDGPGKTRDDHRHHAVDAIVVALTAANTVKGLSKAAERSFAKGERRWWNYVDQPYEGFLDGVREAIDGIVVSHRVSRKVTGPLHEETYYAHKQGSAYVHVRKAVKDLSKSEINDIVDDKVRECVHDKLAGDDPRKAFKSTENDPVMKARDGREIPIHRVRIRKKASVETVGKGVRQRHVLTGSNHQVEIVETADAKGGVRWKGYVVSTYEAMRRLRGGEPIVRRIHGARENFLFSLALKEAVAMQDRDGGRIIWTVSTISEFTNGTVQLSFVPNADARPVTKIPREGRTRTPDKMREARCEKIAVTPLGEVRRAND

SEQ ID NO: 363 - protein, 1166 aa, unidentified
  REGION 1..1166: note = Description of Unknown: Cas Enzyme sequence
MNNTTQKLLGLDLGANSIGWALIETPKETDDTSSSDAWNDGYFQGGRIIRSGVRIFPAGKENFESSKEKSLTEDRRKSRGMRRRTRRLHERKIKLQKLLENHKLWPGDLETNTNDPLELRARGLDEKLTLDELGQALYHLCQRRGFRSARKTAVKPKKEAPPKETQDTSSDEKEEKKEDILAAIGRLKDEIEKSGQRTLGAYLYSLRKEDQHLRIRRRHTRRDMYFEEFNLLWDKQAEYYPKILTDDLKKQIGDKDGNTYQGIIFYQRNIYWRQSTIGNCELEPGEQRCPRADRLAQEFRFYQEINNLKYVDPKTNEEIRVADDPETLEKIVDLGRKKEKVKFDDIRKTAGLEGTSIRFNLESGKRKKGKNAETEQDTFRPDLKGVETDAILRKDKYFGKNWDKIPEEERNKIVRILIEKPGNPESEKMEFDKTGLAKQMTEEQLRDYMETHWKQWGLNGEQIDSLLDIENDLPKSYLSLSRKALRELLKYMRQGLLFSGPADKNGKYNDALHNAGYIRRDEENEWDVFDTLPMVEKIKNLGTINNPVVRRIVNETRRLINAIIREYGRPDKIHVELARNAKASSEERRKNMAQNNQNRKEREEAKKRIEEYKEYKVKPTRDAILRLRLWEQQKYICPYSGQTISQRELFSGEIDVDHIWPYSRTLDDSQMNKVVCFRSANADKENLTPYEWYKKKYPKDTKFEEEFERLKERIAKYPWQKRNRMTQKEIDADGFTQRQLNDTKYAARYMLQYLRSIFTPDEWKAERRILTVKGGQTSDLRHYWGLNDILHNSDFLPDDLEPGEKNRSDHRHHAIDALVIALTDTMQLRRLATYKYRSQRQSFPKPWLTFRDDAEKSINDIVVSHRPIGRVRGGLHEETFYGPVYEKTGTRQEGLFVVRKALTALTSAEFFKIRDPRIKELVFERLRQFGIVPRQKGKKEDSLTLDFTPAQIKEAFAEPLYLPANPKKQHDHAQLTEVKKVRIVVKNQTPMPLNNETAYVIPGSNHHICLFEIFENDKPKRYAVFTTRMEANQRLCEQQRRLRKKRQELQEQGLTGAALKKSLCDYRRIVVTREVPVVRRFDPDQPTAKFLFTLKRGEMFKVVDKGEERLVIFKTAPSTTKNFCFIDQRDARQDAILINKRGSSYFDILEKLVVDRLGNTFRAGED

SEQ ID NO: 364 - protein, 1058 aa, unidentified
  REGION 1..1058: note = Description of Unknown: Cas Enzyme sequence
MKYVLGLDIGIASVGWAILDPESKRIVDLGVRAFSAAEVPKNKAPLAEPRRLARSARRTIRRRAGRMRRVKELCVQHGLIPQDRIEAAFLTARDKPDPWQLRKEGLDRLLSGEEFARVLFHIAKRRGFKSNRKKAVDKEEGEMLECIQQNRQLLAERGYRTVGEMMYMDEAFREHRRNKADSYKNTVDRSMLEDEITVLFASQRRLGNPHASEELEGTYLQVFRWQMPFASGDAILRKVGMCTFEEGEYRAPRNCPTTERFTLLQKVNQLAYVIGSETIPLTPEQRRVVIAEAYRLSELKYSQIRKALNLPEEARFPGLPYTKRQDGELVESRDCEKRPFSPMKGYQTLKSAFTKAGIWEKVKDDWEILDHAAYALTVFKTDEDIRKHFTDHGIGDEVAEAVAGVPGFSKFGHLSLKALRKLIPHLEEGCMYHAACEKAGYDHSRPSESVRQKKLPVINPDDVRNPVALRALTQARKVVNAVIDRYGSPWRVQIELARDIGRSAEERDKISRRQEQNRKMRDEDREHFLEIFGNVCPDPKGDDILKWRLYREQDGKCAYSLEPLVLERLLEPGYVEIDHILPYSRSFDDMPANKVLCLGRENRQKKNRTPFEYFGHDEARWERFEAWVSTLRDFKKRRNLLRRSFDEKASEEWMTRNLNDTRYIARYFGNFVADNLIFADETEKIPVVSLNGGVVAMARGLWGLKKVREENDLHHALDAAVVAALTPGQVKRITEYRQLRELERLHPGEDFVVNTATGEVIEFKGARDFAFPQPWKLFRKELIARLSDDPAQGLADLGLDPYPGAREPKRILVSRMPRRKASGAIHAETIRSTKHMDQGVSAVRKRLTALTTADLDKLAAPETNERLYAAIRQRMEEFGGNAEKAFAQPLHKPTKDGSLGPVVKSVKVTQTQNAGVELRGGIADNASMVMIDISREKNNRGKWQYFATPVYAYDLMRGRRPEAPGEFLFSLYPYDLILLVRKDGPLLGYYRKYNTNTQSITICDPNNAQLLTQSIGIRNAELFVKYEVDVLGDYHVVRGEQRSGVESDTDQQPGKADD

SEQ ID NO: 365 - protein, 1144 aa, unidentified
  REGION 1..1144: note = Description of Unknown: Cas Enzyme sequence
MSIVTIQQNVKDYFKADRPMLRILGLDIGIASIGFALIEMEEKGGETGAILCCNSHIFSKAEQPKTGESLAAPRRLARITRRRLSRRSQRIEQLRRLLQEHGWTDLGMYDDKITEPERSKINPWALRVKGLSQPLEKGELATVLGHLCKYRGFRSTAKASEEEKALKEESKKKSKEGKSEDDEERHKMLEATAALFKELEKHGITYGQYIARKMEEGEKKGGERIRNTTGNYHHTPLREKMILVELKKIWTAQKETFNNHALTDDLYRKVHALIWEQRPIKGVSKMVGPCVFYPKEKRAAKHAPSAEEFVAWSSMNNHKIRQDDGGERDITLDERLALYEKAITSKSGIVTYAQARRILDMEENDQFNLLNYRQKPKRKKKDEKKGQEEVEGVEDFQTTVKRLEEKPLVSLKGTVTMRALFETHAPSLWHKVHEEDPQALDTIASILAFEKDEAKREDKLKKQPCLADQSSLVQALGEEIDDFTGTINLSGKACRELIPRLREGLTYKEACEEAGMTEAHKKRDKTDDGKRIPPFDPTRNPVVDRALAETRKVIHAIVRCYCDNKISNIDRIHIELARDIHSAKERREIEIQNRKNEARNKQAREKAEEIFGPLHENDPRIYKYRLWDEQQRRCLYSGDTISGEDLKNEGRTEIDHALPLSQSFDNSHSNKVLCFTKANQDKGNRTPYEWLGGEDDSEEWQKFTHLVSRCVKAGLMSIHKKKKLLTKHVDRDGWLERSLNNTRYMARVLSQHLRDYLPRREGNKDRVQVRKGYHTSLLRQRWGLNFDKKDKQTDKKQRDDNRHHAIDALVVAASTQSMVQRVAEWKRRARKDDPLRFAHPPWPRFREDTKAQREKMLVHHRPERKYTGEIHEETIKSIRHDKESGTTYTVERRPLHKLTEKSLKHIVGVRMEGDKVKGHNAWLYELLKERLEAHRDPTTKKVDLKKAFGDPKNPLYLQKKNGSQGPIIRSVRLRTDEKTWIPVRRGKGDNIKEGAAQHGAMVRVDVYHGKDEGYRLCPVYLWDVTQGQLPTKLIINGKEEKDWDSIDPQKHTFLFSLHSRDFVRITKKTGEVVQGYYCGTDRATGVIALLDPKASTQTTTKGDDQTVYRVGVKTLLRIQKFHVDYFGNMVEEKEREGKKPRDLA

SEQ ID NO: 366 - protein, 985 aa, unidentified
  REGION 1..985: note = Description of Unknown: Cas Enzyme sequence
MSKIVLGLDLGITSIGWALVDIDEKNLQNNKIIDSGVRIFTIAEHPKDGKSLALPRREARSARRTTKRKAQKLRAIKRLLIKNKIISQEELDNLFLGNKGQKDVWDLRKEALYRELNNKELSRIMIHLAKHRGYFSNRKSEQPDKSDKEAKAVLGGIEKNKDIINSQNYLTIGEYISTKPKKRNGKDKEGKLNYENSVERYMLIDEIDTIFDKQKHFGSSLVNDDVLQTYKKIAFEQRPLKSVAHMVGKCPFETDELRASKSSYTFEYFRALQKLKNLRVINEDGYEMPLIFEQIEQIIREAKKTKNFTYKSFKKLFPQYRDMKIKGLIYHDHKTGEIKDSEKVKFLDFSAFQAMQKNIQGVDNLYWNTIENDSDVLDVIATILTTEKNDAEAMKQLQGIIEHQEVCDALLSLSFSKFGHLSNKALRKIIPELEKGFDYDVACKNAGYDFQAIFKGDKSLLLPSLSKQENLEMTNPVVKRAMAQMRLVYNAIARKYGAIDAVHIELTREIKNSHDDRKKIEKAQGEFRETKERAREQASDKLGKEPNAKELLKFRLWEEQGGHCIYSGKYINPDILLDPYTTEIDHILPYSRSLDDSLNNKVLCLTKENQEKGNKTPFEYIDEDKWNEFAGRVEGLKNLKYAKKSRLLKKNFDENSELAFKERNKNDTSYISIFIKNYIEAHIEFKKSHMKRHVFTMNGMLTSQLRYKWGVGDKNRDTHLHHAEDAIILAFATQSMVKKLSDVSSRRESEGFKYKTKEEKAKYLRFVAPMEDFHKKVQESVGDIFVSHMPRRKISGAAHKATIYSNKTLSMKKENGKIDLLKGGSIQNNVKLKHGLALNDSMPRVDLFQNKKTKKYYLVPIYISDFVKDKLPNKAIVAANKPWIEMDDEYEFKFSFYKRDLIELKSKKTAKKEEIQVLGYYDSTHSGTANISILSHDGKQEYNFGSQNLVFIKKYQVDALGNYIEVKSEKRQGTIKEGRAKRKAS

SEQ ID NO: 367 - protein, 994 aa, unidentified
  REGION 1..994: note = Description of Unknown: Cas Enzyme sequence
MSKLVLGLDLGITSIGWALVNSDDKDVTKNRIIDSGVRIFTIAEHPKDGKSLALPRREARSARRTTKRKAQKLRAIKRLLLSNKILTQNELDTLFIGNKGQKDVWELRREALYRELDNRELSRIMIHLAKHRGYFSNRKSEDIIANEDVIKNTDDKDSKKEKEGINSGIKNNIQNLASSSYLTIGEFISHNEKKRNSKGKYNNTVARSMLIEEIEIIFAKQKKFGSKLVNDELLQTYKEIAFEQRALKSVADMVADCPFEKGEKRASKSSYSFEYFRALQTLKNLRVIDESGYEMPLIFEQIAQIIHKAKTTTKFTYKSFKKLFPQYKEMKIKGLTYHDHKTGEIKDPEGVKFLDFSAFQKVKKAVINADNLYWETIENEYEILDTIANILTTEKDDNESLKQLLEVVENEKVCEALLSLSFSGFGHLSNKALRKIIPELEKGLDYDKACDEAGYDFKALFKGEKTLLLPPLSKQENIEMTNPVVKRAVAQMRLVYNAIARKYGAIDTIHIEFTRDIKKSHQDREKIKKAQGEFRETKENAKIDATDKLGHEPNAKELLKFRLWEEQKHHCIYSGEYINPDILCDPFATEVDHILPYSRSLDDSLNNKVVCLTKENQDKGSQTPFEYMGSDENSSRWLQFVGRVNDLDKRKQAKKNRLLKTNFDENSEIAFKERNKNDTSYISKFIKNYMEAHIAFKESKDKRHIFTMNGMLTSQLRYKWGVGDKNRENHLHHAEDAIILAFSTQSMVQKLSDVSAKREGWIYKSKEEKSKALRFVTPLEDFGVRVKESLGEIFVSHMPRRKIGGAAHEATIYSPKTLSVKKENGKVETLKGGSVTNNVRVKHGLAKNDSMPRVDLFQNKKTNKYYLVPIYVSDFVKDKLPNKAIVAGSKPWIEMDEEYEFKFSFYKRDLIEVKTKKTAKKESVQILGYYDNTHSGTANLTIKSHDSKAEFSLGSQNLVYIKKYQVDPLGNYVEVKSEKRQGTIKEGKKRKNKN

SEQ ID NO: 368 - protein, 987 aa, unidentified
  REGION 1..987: note = Description of Unknown: Cas Enzyme sequence
MSKIVLGLDLGITSIGWALVNVDDKNLQNNKIIESGVRIFTIAEHPKDGKSLALPRREARGARRTTKRKTQKLRAIKRLLIKNKILTQDELDNLFIGNKKQKDVWDLRKEALDRGLDNKELSRIMIHLAKHRGYFSNRKSEKPDKSDKEATAVLGGISINKKVLEDTKYLTIGEYISTKNKKRNGKDKEGKLKYENSVERYMLIDEITTIFSKQKEFANKVVNKELLKSYKDIAFEQRALKSVAHMVANCPFETDEKRASKSTYTFEYFRALQKLKNLRIIKNGDEVELTIQEIHQAINKAKNIGVFKYQTLKTLFNFDKDATFKGLVYFDNKTGKKAIKNPELQKLLDFTAYNKIRKVIQEVDSIYWEKIKNDNDTLDSIAKILTTEKNDNESIKRLNNIIENKKVCDSLVSLSFSQFGHLSSKALGKIIPFLEEGLDYDKACDKAGYDFQAIFKGDKAKFLPPLSRQENLEMTNPVVKRAISQMRLVYNAVARKYGAIDAVHIEFTRDIKNSHDDRRKIEKAQGEFRDTKEKAREQAVDKLGKEPNAKELLKFRLWEEQNHRCIYSGDYINPNILSDPYATEVDHILPYSRSLDDSLNNKVLCLTKENQDKGNKTPNEYIDSSKWGEFVVRLEGLKNLKFAKKGRLLKTNFDENSENAFKERNKNDTSYISKFVKNYIEAHIGFKESKMKRHVYTMNGMLTAQLRYKWGVGDKNRDNHLHHAEDAIILAFSTQFMVKALSTVSARKETEGFKYKSKEDKAKYLRFIVPIDEFHKQVKDSLKNIFVSHMPRRKVGGAAHKATIYSKKTLSMKKENGKIDTLKGGSVINNVKLKHGIALNDAMPRVDLFQNKKTNKFYLVPIYVNDFVKDKLPNKAIVAGNKLWIEMDEDYEFKFSYYKRDLIQIKTKKTATKESVQILGYYDSTDSGTAKIMFKEHDGSIEYGRGVQNSLSIKKYQVDALGNYVEVKSEKRQGTIKEGRKSKKSNK

SEQ ID NO: 369 - protein, 1061 aa, unidentified
  REGION 1..1061: note = Description of Unknown: Cas Enzyme sequence
LLPSGKAAILKDSGIHMNRGTAVELIFGLDIGTTSIGFAVIEHDHKASAGKILRLGVRIFPEARDPKGVPWNQERRAARLRRRQLRRRRQRRGLLAEQLQMAGLLPERNSGEWRKVMKEDPYQLRRRAFDKEELTPYEVGRAIYHLAQRRHFRGRDIDEVSDDAAEAEGAVDADEKVAQGDRETTIQALKSEGSSLGAWLAKKGEGERRRGIHASRAVVEKEFDDVWAHHLPEQAKESVREAIFFQRPVFWRLNTLGRCRFVPDASLCPKGSWLSQQRRMLEKVNNLSVAGGNQRPLDSEEREAILSQLQIQASMTWAGVRRVLAPVFRNRGEPGAEKSLKFNLEIGGEQKLMGNAVEAKLAKIFGAAWQTHPRKQEVRDAVHDLVWRSHYEKVGEQRVVIRRASERNDGKNETVRRLIEEFGLSEGEAEQVASLKLPTGWEPYSVQALNAMLPHLERGARFGEIINGPDWKDWRNENFPDREQPTGEVFDRLPSSANPDERKRIANLRNPTVARSRNELRKVVNNLVSMFGKPDLIRIELSRDVGLSKREREDKAAGIRRNEGLRKSAHRSLCENGITNPSRTDIEKWMLWKECGGQCPYSGDMISFDGLFRSGDFEVEHIWPRSRSLDDSFRNKTLCRKDMNARKGNRTPFEYLMHQDEEWQAIGIRLAGMMRKRGGPGMSAGKVKRFLAKEIPDGFVERQLNDTGYAAREASSYLRMLWPDLGPEASVKVFAVSGRVTAHLRRLWGLNGLLSDEDRKTRDDHRHHAIDALAVACCHPGITQRLSRYWQAKDEQDVERPSLALPWASIRADAEMAVSDIVVSHRVRKKVSGPLHKETVYGDTSVEDSDGRGHTFRYFVTRKKVENLSRKELTEGIRDEDVRLIVAEWVEQHGGDPKKAFPPYPMRGRKGPEIRKVRILVKQQVELMAPVSTGYADLGNNHHIAIYRKPDGSVDFEVVSLFEASRRLRQCESVVRHDRGDGSDFLMSISPGDSLEMRCDGQVKIMVVKGVWASGVIVMVEHTDATVKGDSVYRPNAKSILASGGRKISVDPIGRIRPASD

SEQ ID NO: 370 - protein, 1071 aa, unidentified
  REGION 1..1071: note = Description of Unknown: Cas Enzyme sequence
LLPSGKAAILKDSGIHMNRGIAVELIFGLDIGTTSIGFAVIEHDHKASAGKILRLGVRIFPEARDPKGVPWNQERRAARLRRRQLRRRRQRRGLLAEQLQMAGLLPERNSGEWREVMEEDPYQLRRRGYQQRQRGFEQDEKLSPYQIGRAIYHLAQRRHFRGRDIDEVSDDAAEAEGAVDADEKVAQGDRETTIQALESEGSSLGAWLAKKGEGERRRGIHASRAVVEKEFDDVWARHLPEQAKESVREAIFFQRPVFWRLNTLGRCRFVPDASLCPKGSWLSQQRRMLEKVNNLSVAGGNQRPLDSEEREAILSQLQIQASMTWAGVRRVLAPVFRNRGEPGAEKSLKFNLELAVGGEQKLMGNAVEAKLAKIFGAAWQTHPRKQEVRDAVHDLVWQSHYEKVGEQRVVIRRASERNDGKNETVRRLIEEFGLSEGEAEQVASLKLPTGWEPYSVQALKAMLPHLERGTRFGEIINGPDWEDWRNENFPDREQPTGEVFDRLPSSANPDERKRIANLRNPTVARSRNELRKVVNNLVSMFGKPDLIRIELARDVGLSKREREEKAAGIRRNEGLRKSAHRNLCENGITNPSSTDIEKWMLWKECGGQCPYSGDMISFDGLFRSGDFEVEHIWPRSRSLDNGFRNKTLCRKDMNARKGNRTPFEYLMHQDEEWQAIGTRLAGMMRKRGGPGMSAGKVKRFLAKEIPDGFVERQLNDTSYAAREASSYLRMLWPDLGPEASVKVFAVSGRVTAHLRRLWGLNGLLSDEDRKTRDDHRHHAIDALAVACCHPGITQRLSRYWQAKDEQDVERPSLALPWASIRADAEMAVSDIVVSHRVRKKVSGPLHKGTVYGDTSVEDSDGRGHTYRYFVTRKKVENLSKKELTEGIRDEDVRLIVAEWVEQHGGDPKKAFPPYPMRGRKGPEIRKVRILVKQQVELMAPVSTGYADLGNNHHIAIYRKPDGSVDFEIVSLFEASRRLRRRESVVQRDRGDGAKFAMSISPGDSMELQNLTGSKVWVVKGVWADGRVVMQHHNDATQNGETVYRPNAKSVLANGGRKISVDPIGRIRPASD

SEQ ID NO: 371 - protein, 1002 aa, unidentified
  REGION 1..1002: note = Description of Unknown: Cas Enzyme sequence
MKKKIFGFDLGIASIGWAVIEFDNEYFNPETGEIIDGKIIKSGVRCFPVAENPKDGSSLAAPRREKRLARRICRRKARRMESIKKLFIAKNLVSDLKELDALYAEQQGGDVWNLRVKGLFEELSKEELLRVLTHLAKHRGFKSYRKAAEENDAEGGKVLKAINENKKLLTANQTLAQVIVERAGEGGKKRNYTETDAKGMAKAVYNNSIPRNEIERELDLIYEKQKQYGIFSKDLFDDFKKIAFRYRPLGSVADMVGYCTFEKGEKRAPKEAPSSEFFVAWGKINNMAVYENSQKRFLHPEEKVALFELLKTTQKVKYQAISKKIFAGKDIQFADVNYKLTEKKAKDGSVKEINPEDVLFYEMKGWHKLKALFDKEEWLDVSRDISLLDEAVNVVACEKNDENITKGLELIGISEKYIGKFVSLTTDKFVNLSLKALSKIIPYMEQGMKYNEACEKAGYDFKENVDRLVDKKGILLGVISADKQTKIPVVNRTVAQFRKVYNAMVRQFGVPDQINIETGRELKKSFDERRKIINKNKENEQERREAREELEQENIKGSSKNILKYRLYQEQDGKCIYSGKPIDLHRLDEEGYLDVDHIIPYSRSLDDSLNNKVLCLSSENRMKGNKTPFEYIRDKDSWEAFEARVNLLRNNRKKENLLSKNFNDRELEFRERNANDNNYIARYIKQYLEDGIDFNSCNRQDIKNRVQMRTGSLTSYLRHCWGLRKDRNENDRHHAQDAIVIACATQGMVQYLSTVSKLWENKWQLAQSKEDGEAWYKSLKYKFSEPWNGFREDVQKSLDEIFVSRPPRKSATGSVHKDTIDKCSENISRLSVRGGEAIKENMFRCDVYKTNTGYKIVPIYVVDLVNKEFKHYIQPYEEIDGNKIEAQEADFFCSLYKDDYIEIYVDKDEKYGGYFNQYNAQSGQIYLGSVDNASVYKIRDKKETNGYHLANEKKISLSKCVKLQKYIISPLGDKVLVQKETQRFSNITKSNAQRHKERQQKG

SEQ ID NO: 372 - protein, 1073 aa, unidentified
  REGION 1..1073: note = Description of Unknown: Cas Enzyme sequence
NCDMSNIDYNIVGIDAGIASSGIAVLNMGAAPYIAGMYTTCWASHEKDKKSANAVRRDIRGQRRLTRRKTMRLQDTRAVLREALNVPEEVLEKAIKTIDPWHVRHAALDAPVSNLEFAKAIFHIIKHRGFHSNRKSERVVESKDTKSKKKAADDEKIGTLMGVASNTAMLNEDPKIRTIGELIAVDPKFAERKRNTKGDYTKSVGRLELKAEVETLFKAQRTFHGDDCEWLSPEVETRLIEILMHRRPTFSGSQIEDMVGHCPFEPNEIRAPKASYTFERFTWLQTLNNLKVISTDAPPRSLTPQEKSLLKEWPFGKEKLTFEQARKELGLTETQHFNLCDPTKEGATLFEASAYRKMLKALEARPECYRTHTEHLDQFALVLSLYKTDEDIRAALYERIPALQDDNDTVEAILELSFEKFGALSFTAMKKMLPFLKAGERYDEAKRKADYSDTPEFAPHDYLPPVTGEAITNPVVRRAINKVIKHLNAVLKRHGAVREIHLEVGSDISRNKKDRQAIMSAQRENKKAKKHAEKTCKKEGVANLDPENERDMFLLRLYNETNGHCLYSDTPLDIHRLGEIGYAEVDHILPHSRTFDNSQSNKILVLAKANQDKGNRTPFEYMGSDPDSERWLKFTSRVKAEKGLNPYKRRKLLNQHLPPLDGFIERNLNDTRYISRFLKSHIETHLLNDLDEPIKVICVSGQATAALRHAWGFKKVRHESDLHHAVDAAVVAACNRSTIQRLTLFNKRKELKGMRLENYMDPVTGEIIDQDGLTMLDKNFPGPYDEFRAEVMAHIAPNRREALAQLSGYKRYPERLESVKQLYVVRAKEEKFTGEVFKGTVYSVDERDPDKPVLYRKVRLTDLKKTDLDSIKDADNPREAPTVEAIKQRMAAQDFKAEKAFEEPFYKHNAEGKPTTTPVKSVKVAIVDKPAKRLPGKGMGAVLNAKGSTVRTDIYQIDGTYRAAPIYRHQLAGEMRSHYIRNPTKADPRSEVELPPDATPLFSLTPNCFVRAHHKNGMTYEGYYRNFDRNKRAILLLAHDQGSADKKQVVSLGTLVSLDVLHVGPLGDLYTAS

SEQ ID NO: 373 - protein, 953 aa, unidentified
  REGION 1..953: note = Description of Unknown: Cas Enzyme sequence
LESLDPYELRAKALDEALAAYHIGRALFHLNQRRGFLSNRKTEKGDKEAGVIKEAAGKLQEMMRLSGARTLGEFFHDRQRTRQPVRARNRSTGLKAEYEFYPTRALLLDEFDAIWNAQAPHHPAMTDAARAAIHHAIFFQRPLKEPPVGKCSLDPATGADDEEGFRCPWAHPLAQRFRIWQEVRNLAVSEAGTSFHRLSKEDGDKIALALIGKDKLSFDKIRGLLKLAPEARFNLESAKREELLGDETAAKLARKPPFGKTWRSLTLARQIEIVTKLLEEEDERALLAWLVSEAALDEAGATRVASAFLPEGHCRLGLRAIKKILPFMESGLNYPEAAKAAGYDHAPLPTGELSMSGYLPYYGEWLQNDVLGSGDPRDMNDRRWGRFPNPTVHIGLGQLRRIVNGLIAAHGPPAEIAVEMTRSFKLSPKQLAEVEKEQAENQRRNNARAKELRDLGQAVNPRNLLKLRLWEELNLRDPLDRRCPFSGAAISIQLLLSEEVEIEHLIPFADSWDDSAANKVVCLRSANRLKGKRTPHEAFHGTPEWEEIARRAATLPDNKHWRFGPDARRRYEAQGGFQARQLNETGWLARVARHYLAAVTNPYQINVLPGKLTAMIRGKWGLNSLLPDHNFSDAKNRLDHRHHAIDAMVAALTDRSLLHRMSSAYDEERDKIEIPVPWPSLRDDLDAALKAMTVSHKPDHGVQAQLHEDTAYGTIQEPEREGGNNLVYRKGFVTLNEKEIDRIRDVRLRETVQKHVASEKAAGRDLKSALQSFAARTDFPGLCHGIRHVRLTKPEKPEYLIAIRDKSGTPYKSYSAGENAFVEIFELPNGKWGGEAVSVFKANQRDAKTNWPSAHPDARLVMRVRKGDLIALDVEGRRTVMVVHRLDSAAGRFKLAAHNETGNLDQRHTEDADPFRWLMASYNTLKSMNTEHVRVDELGRLWRVGSSGKKHAS

SEQ ID NO: 374 - protein, 996 aa, unidentified
  REGION 1..996: note = Description of Unknown: Cas Enzyme sequence
MSKLVLGLDLGITSIGWALVDTDSINSKIIDSGVRIFTIAEHPKDGKSLALPRREARSARRTTKRKAQKLRAVKKLLIQNKVITEEELEHLFIGNKKQKDVWDLRKDALYRKLDNKELSRIMIHLAKHRGYFSNRKSEEPSDSEGKAVLSGISHNQKTLQKEIYLTIGEYISTKVKKRNGKDSEGRLNYENSVARSMLIDEISIIFDKQKVFGNEIISDELLQVYKETAFEQRPLKSVSEMVANCPFETNEKRASKSSYSFELFRVLQKLKNIRLITFDDEKELSIEQVHQAINKAKNTNKFSYKTLKTFFSLDKSVQFKGLRYFDSHGELLKKDPETEKLVDFSAFIKMKKIIQEADNVYWDEIENNISLLDDIAKILTTEKDDNESIKQLKKIIKSEKICEALISLSFSKFGHLSTKAIRKIIPFLEEGLDYDKACEKAGYDFKAIFKGDKTLILPPLSKQENLEMTNPVVKRAIAQMRLVYNAIARKYGEIDAVHVEFTRDIKKSHKDRNDIKKLQDEFKGLKEVARENAIEILGKEPNAKELLKFRLWLEQDRQCIYTGDYINPFDLSDPYATEVDHVLPYSRSLDDSLNNKVLCFTKENQEKGNKTPFEYFGGDNESEKWKTFYGRIEGLKKLRRAKKSRLQKLNFDENSENSFKDRNKNDTSYISKFVKNYIEAHIEFKKSNDKRHVFTMNGMLTSQLRYKWGVGDKNRDNHLHHAEDAIILAFSTQSQVQKLSTVSAQREGLIYKTKEEKAKQLKFEAPIENFHEVVKDSINDIFVSQMPRRKIGGAAHKATAYSNKDFSHTKENGKVEYLKGGSVRNNVKIKHGIALNDSMPRVDLFQNIKTRKYYLVPIYVSDFVKDNLPDKAIVAGSKPWIEMDEEYEFKFSFYKSDLIEIKTKKTATKESVQFLGYYDSTHSGTANLTIKLHDGSSEYSTGSQNLVFIKKYQVDTLGNYVEVKQEKRQGSIKENWNNKLKKRVEIRKKRKAEKLI

SEQ ID NO: 375 - protein, 1004 aa, unidentified
  REGION 1..1004: note = Description of Unknown: Cas Enzyme sequence
MVERILGLDIGISSLGWAVINYDKANSLNNNIIKSGVRIFTIAENPKTGESLALPRRNARGARRTIKRKKQRLKAIKNLFIKYLNLSKDNLFSNQNIFNEKKQKDAWQLRDKALKRELTNKEFARVLMQISKRRGYKSNRKVEENGSTEGKKVLNSIEKNKELLNNYLTIGQAIYKSTKLTKIRRNKKDDYNHSISRDMLVDEINIIFEKQKELKNPYVNDDLKKEYLELFLKQRDFASVDKMVGYCTLEGKSQKRAAKASYSAELFVTLTKLINTKIIQDDGVERSFRDEELSKIIELCKQSQNPSYKKIREIINLLDTNKFKSLDYLKVDSNGEFLNPEKEHFKSAFIGFHCLRKEVEKVLSKIHWQNISDDKSLLNEIAKIFSYHKSDQKIINELQKLEFKTLTIDEKNLLLKSLVENIHFDKFLNLSIKAIDKLLVHMQNGKRYDEAVKASNYKKFEKRKEKFLRALSKEEQLELTNPVVKRALAQTRKVLNALIRVYGQFDKVNIELTREIKKSHKDRNDIKKKQEEYQNVKKGIVKNFIENFDREPKGNELLKYRLWQEQGERCIYSGKEIDIKRLISEVNYAQIDHILPFSRSLEDGMINKVICLTKENQDKKNRTPYEYYSQENKDWHWFEEFVKSLKNIRKAKRDRLLKKNFDENSEIAFRDRNANDTAYMSRFIKDIIENNLELKSKDKQKVFTRSGTLTSMLRHNWGIGNKSRDNHLHHAVDALIVAFSTQREVQRLSTLSAKRDGFTYEKSEKKAGQLKFLAPMEHFRDKVQESIDDIFVSFAPRKGVTGEAHEQTVYSPKDFKANKKQEKISELTGGSIVRNVKLNDNKKIAKQSSMPRVDIFKDIKKGKFYVVPIYTVDFIKDKLPNKAIVQGKNKDGTLKEWLEMDNNYKFLFSIYKNELIEIKTKKTPSKESKIIQGYFVSADSGTAKIIIKSHNNKEEYTFKKDSSNLCSYGTGIQNAEYIKKYQVDPLGNKSEIKSEKRIGTKKER

SEQ ID NO: 376 - protein, 1163 aa, unidentified
  REGION 1..1163: note = Description of Unknown: Cas Enzyme sequence
MAALSTYKNTVFAFDIGTNSLGWCVLSGERDADGLLIPNRIIDIGVRIFSDGRDPQSGASLAVARREARGARRMRDRYLKRRQQLLERLTEYGLMPADEAERKALLRETSDQKQNTGGNIEKTDPYNLRARALSEKLPLHHLGRALFHLNQRRGFKSNRKTDRRDNDKGKIAMGVEELQAQLHLSRAPTLGAYLAQRYNQGKVVRIRQDSEAFTGDKQENYLFYPERSMLEKEFAAIWQAQQEFYPEELTESRRKQLFDDIFYQRPLKEPKIGKCAFNPEEERLPKAHPLFQEFRLYKEANELTIETAGKASGRKLSKEQRDELIKLLRPQKKMAFSAIRKNLKLHGTTFKKEKNAREGLAGDEIYAEMVDKSRFGNPWADFSREKQWEIIKRLRDEEKPEKLDKWLAEQFPNLSAEQRDKIANAKLPEGYGRLGHTALSRMLEEMKNGTITEEEVKKRFGRKAAEYWPELKGTPLTEADAAARCNYDHALLGREREELDSLPKYQAVPNVARSIPPGEGGKAVAENDPDYDRIMGRITNPTVHIALNQLRRVVNALIKKHGKPQEMAVELARDLQLSDEEKKKVNKSIADNTKAAILRSDKLKEQGKEDNGYNRQLLKLWEELNENPQDRCCPYSGKPINITTLLSSDVDIDHILPFSRTLDDSNANKIVCLKEYNRQKGNFSPAEAANRLDGWNYEAMLGRAQNLPKSKRWRFAKDAMERFEQEDNWLARQLTDTQYLSRLAREYLSALYPGKEADEQGELHMRYHIRTIPGKLTELFRRNWGLNALLPDYQAAIHKDSEKNGQDLRPEEIGNPLNKPKNRQDHRHHAIDAVVIGITTRSQLQRISRASGQMEARDLENFVKNSVRDTPPWPEFRRDLQTAIDAVTVSHKADHGTLPKAKDNKAGRGKTAAKLMKETAYGLPVDDKGERLKDEKGNALVVWRVPLRSLKAKDLDNIRDPHLANALKEHIYAEARELKDGKEFEQALSSFAKTHKQYKGIRHIRLIGARNTISVRNAAGKAYKGYWNDGNYRYDVWQTLDGKWKQEVISMYDAHQPAYQSPFHQANPTAKKVLSLQQNDMVAYNDPETGKRIIARVVKFDQAGSIYLASHNEANVDRRNNDKNDPFKYLKKMAGPMKLINLRQIRVDEIGRIFDPQQKQTGA

SEQ ID NO: 377 - protein, 1092 aa, unidentified
  REGION 1..1092: note = Description of Unknown: Cas Enzyme sequence
MAIRFGFDMGTNSIGFSVIQLDRHGNPSELLDMGVRIFSDGRNPKDNQPLAVSRRLARGMRRRRDRQIQRKRLLVNQLARDGLFPMTVQEREFLKIMDPYRLRKEALDRKLEPYELGRALFHIGTRRGFKSNRLTDGNDKESSIQADRMRELSAMIAESGARTLGEYLYVRLLNNQGTRFRGGEFNGYPSREHYLQEFTAIKEYQKQFYPAVDWVKIEHIIFDQRPLKPQDKGKCQFYTSEDRAYLALPSAHRFRIAQEVNNLKYNDLFGNSLTLDNTEKDALISMLDHCKSLSFAKIRSRFPHIEGKFNLEDERRDKLMGNETAYTMRKPEYLGALWDTLPLEAQDTLIGKLLEADNNDDLLEYLDCFSLTNDQKQHLLSWKGSRKIGKLSSHFMRDCLAIMEEKHIRYDEAVQELSLHHSHNPISDILPELPYYGKILTGAVSGAHPEASDDNPEKKYGKIANPTVHIALNQLRKVANALINEYGKPEQIVMELSRDISDSAESRSIHYSEQAKREKENERIRDELKTTFQVKNPTAWDIKKYKLWCELGTDANVRCCPYCGKPIPACKLYTPEIEIEHILPYSRTLLDSMSNLTVAHRSCNLLKKEQTPYEAFAHSPAGYEWEKIMERAENLPNHKGDKFLKGAIEKFEQDSGFIARQLNDNRYLSKAARDYLSCICPNNQVWSIRGQNTSFLRSHWGLNTILSNSDDPYFKNRNDHRHHAIDALVIGLTDRALIQSMAHINQGTEANNHLVPTFPFKRQDVENKVRNIIVSFKIDHGYQGRMFKETATGRKLVKETILLSELKEDQVESLVDVKLKQLFFEAIDKGISFLSRKNVILQKFKEDKQNDNPKIQIYKEVWVTRVPITELDATDIASHRIFNRKLDEKISERTADVVHDKKLLRERLVKLSKEWNVKRVRYVPKGQVFSRIRSVPNKWYEDDGFCYARIWKTPDNIPKYLGEFVSYRQAYDIAQGKTSVSRPKEFHPAAKRIMTLYKGDVVRITPKNGSPQFLARIAGFATTSNKVDIQPIYASGSLGEWKSTCNVGNTFDGQHWLAIKAEGQNHVSINSLFQNNMIELIKINPIGKVIHT

SEQ ID NO: 378 - protein, 990 aa, unidentified
  REGION 1..990: note = Description of Unknown: Cas Enzyme sequence
MTENDTQRAEGLILGLAPDIDHVGWAVIDADGHKVLGMGVHRFNPPLDPKSKVSLARKRRSFYYARINKRRTKYRAKAVLTVLRAHGLAPEGAGPEWLQSAKGERPVARLRAAGLDEPLSGRELAQVLYYLGLHRGYDPRGESTDGDADGKKMLSAIAGVQAALDAGEARTVGELMASRGRMRNRAGDYSCTATRQMIADEARALISAQEAFGTADGSLMGDYLDELLFTRSTAAFDAQVYSRVGCCTYFPDERRAARADVTSEMLSAIESLKHLRIAEPDGSQHGIPHESCMRYLDVMFSDAPIKGNKECRVRYSDVLKEHGRNEGATVKGVLPADLKREVYVPRAFSLMRKAGVPAALLARMRDDRAVGDAVCEALTYASSEEVLLDRLAAADIDLSDAEIAAICSLPYSGKVFSGYGSRSLKAQEMLLEMMLSPEVSTLFDAEDACGLYAVRTETSVNAGSLLPPYTVFDPTCTNPVVLRTTARMRRVVNAVIKRWGVPAEVRVILGRELRQSKKERLNAQRNNSRNRKSREELADTAASILGVSADSISGTLLRKLSLWRSQGGMDVLAGTEIDLERLCREPAYATVDYILPPARTGETGMRNSLLSLTSTAVSKGASTPVEWCSSGCAGAPTLAELKERVAESALPYSKKSRILLEDFEGKAPAMLDRSVNDGRYASRAFRSYLEELMPLRDGERVRAAAVSDAAVAELRRVWGLNDLFDASRSASDPAVEAVVAAVCDAGTVRRCAAWRAGRLYSEPEERDELLRASEPWPSFPDVVRASAPFVIPTKMHDHGCTGEALESTNRSVVEVEEGTGYAVLTGATRKVGNYRLLADGTARVVGGMALIRIWHDPHSTAGGSRKGAGRYYFEPVYYADVPRMNDASYVSRYPVAGLAPAMWPEVPAEARGGRPIILHAGDVVRARGRAARYVSYTISGCNWKLADIVTGEPLKGFPSANSLCDDDGFEVMCEDVLGMAWRDVEGLTAL

SEQ ID NO: 379 - protein, 1009 aa, unidentified
  REGION 1..1009: note = Description of Unknown: Cas Enzyme sequence
MSDTKLVFGFDLGIASLGFAAVDLERHELIHMASHLFPAPQEPKTKASLAAKRRGYRSNRRNLERDKTRRNRCRRLLIDAGLVPDGVDPNWFETRQGDADVVVLRHRALIERITDRELARVLLYLCKHRQYIDQGKGGAEGSEDGKVLKALAGNRALMEQGDAETFGEVLYRRHDAGERTRNTAGDYELTIPHEMIRHEASLIIDRQIGFGNGKLDDSFKASYLSIVSSLKSTYERDLRIYGNVGACTYRKDKVRAAKATLTSEIEECREKLAHVRIVGEGGTFPLPGAVRRAAVASVFDPMGKKGQTSLTYAMLRKLMNSLGADGPESMRETDHFKGLNDEKGERAVLFSAKRFAVIKASLGEDLGLLESLMADSSLYDDIAEALTFASSRESYERRLSDLGVDDRLEPAALDAVRGLPYGSAVFNGYGNRSRDALEILSGCLLEDGIDSLHQAEEAGGLLQKRVEDRRGKASLLPPYKTYDPTCTNPVVLRDAARFRAAFNEAVRAYGIPDAVRIELGRDLKCSTAEKAKISKGQKRNKDENDRARAAVAEILGVEQEEVVGRQIAIFRFYESQSGRDIYVDEPIDLERALKEPKYVEIDHILPFSRSCDDSKSNKVLCLSKSNQDKAGKTPFEWIAGSDESDPRWIAFCNRVEAVRKSIGGGKARKLTKVNFDDAAESGFIDRNLNDTRYLSCAIKNWVETSIAFADSKKQHVFAVSGGATSILRRQWGLNFGAGGEKDRDDDRHHAVDAAVIAMCDPVLVKKCAKHGERRRFLSRDERDRLMGESMPWSTFADEVRARREFVIPTRSTSHTLRGCATDDTVYGYRGEKAKSKKGTMPLLSKGGKVKPSSTAIRCGDGFKMQGDMAFIRLWLDPDAGSNGKWLVEPVYCSDYPSLVNGTYTPRYCAPTFGHRSNWPVIPTKVLERVSPVTMYKGDAVAIDGSIARFAGFDVSDKSFTWGEIIADGQASLCTGEILPLGKWDATTDFRVISEDALGFCWRSVIRSLG

SEQ ID NO: 380 - protein, 1157 aa, unidentified
  REGION 1..1157: note = Description of Unknown: Cas Enzyme sequence
MRYRLALDLGTSSIGLVAYALDAHDDPIDIPYHAVRIFQEPLDPGKGVGEPKKARRRQARQMRNQTQRKARRLKRIAHCLKLLGLNPENLPADHGQTIHHLRAKSADERIELEDLARVFLKISKRRGYAGGFKADKAKNKIEAEATGKKAARQAKPPKSDKDKDDDKAVVKPGIEKLKAAMADCHAQTLGQYLAHRYDQRLSLKLAPADAEEKLYAHRDMLEAEFEQIWTKQVAFHPVLNESRPDPHNHGETRLLKDIFHDALLFQRPLKSPAAMVGGCPLEKGLPRAPMAQPAAQAFRIEKQLADLRWGMGRRALPLSAEEKAVIRELLHSKEKVQFKEIYTALEKAGFPKPQGRGLNMDRASREELSGDKTRATLRKLQLLEAWDALDRVTQVQVINFLADLGSPEQLHAENWQTQFSKQIRDGKNPDGSWRFKRVPRQFSEAFLTFINRLANSDSYGRLTAMGFDAGRSAYSVKALDKLAQTLRELEGGLNAEENNHERAAIEKAYPDHYAEKPLLTELPPPPLTGNTVVDVALREVEKEIRKAIKALGGLPSEIHVELARAMALGVSRRNEIETANANNRRQRKTVEARLEESGFKPSKTTINKYLLWEEQDRFCPYCGDLIELNEVVDGQQTNIEHILPRSLTRIGGRRDQLVLAHRVCNALKTDQTPWNAWGGEPPKDKARWDAVVAQAQRFRTKKLRGRAILMGKARLLELRDWADDETVQGFSDRQFQETAWIAKHTAQWLRSICEPGKVRVSRGEMTAHLRRIWHLETVIPQVRFEEKLPVFDTDGGRVNREDFDHHRAFWEGKGKDEGANRTDRRIEKRIDHRHHLIDALVIGLCGPKLCQTMAREYKHRAERQKDGERVKLTLNIDPPFHNLRHRSVELVRKCNLTHKPDPYPDGALFKETAYGVAEVAADGKARWHLKPEELQAEAKSTDAQRRLTIRVKLKDFAGDKDSAETVRKKLGDIASPEVRKLVTDAYDQRIAKGDTPQQALGQPIEHPQYQNKTTKMAVYLKAVKVFVGNKPGQYLDADDAHPVIHQSRQGQHYKLLQHDGNACLEVWADGKGVKTRLLKPVEAMREKGRNPPNRFYKNDTVLDTRDGKRYLIRQIWAQNGGKLILTPITESREVREMGKADGLLTVSSKSLLKLRRI

SEQ ID NO: 381 - protein, 1044 aa, unidentified
  REGION 1..1044: note = Description of Unknown: Cas Enzyme sequence
MIHLKFIMKYRIGLDLGTNSIGWAVIKLDDDNKPIEVVDGNSRIFSDSRTPKTKTSLAVTRREARGARRNRDRFLERQKKLFKTLINYGLMPSEKEKQKEIEKKDPYYLRYKALDHALESYDLGRVLFALNQRRGFKSNRKKNKKKTSANTKLKNHREKFENTFKKSDYRTLGEYYWKEKQTPLEGDHNQKIKRVYGVRYQDNEDDTPSPVREMYEDEFEAIRKAQNDHHNLTDQQWDDLFKIIFDQRDLRAVEKGKCQLYYNDSTLDPSEKERAYKALPSAEKFRVWQDIHNLRIITDTFERLPLNFDEKKQIFEIISNHNNNTISFTKFKKILKKPNIRFNFEKKDKKSMLGMKTNVLLKKPKYFGSQWDTFDDQKKDEIVLVLLKEEKPENIKNKALSEWKVSEDQAQSISKIEIKEFESGTSRFCQKALHDLIPYMKNGFDFYEARSKLDTNTKTTQEKKLDYYGHVIPEVITNSGLYRSNKNEKETGIIGNPTVHVGLNQLRAVVNAIIDRYGDPTEINLELARDLKMNKKQKKAYENRLKKNTDKNKKIKQELKKLGIKYNYDNRLKYNLFKELGESQECIFSGKKISLSNLFTKEINVEHIIPRSRSHDDSFSNKTLCYEKHNHLKNSFTPYEAFNNNPKYDYNLILERSKRLPDNKQWRFHENSIQQFEEEVGFLKRQLHDTQYLSKVAQQYLATLFKDGRYVRVFSGKLTAKLRHDWGINKDRDNHRHHFIDAVVIGLTETSDIQKANINSKNNTLDKITYPCPIEKDLFIKQVSTISNNTIISHQYRHHKKGELHEKTYYGYENHEHYNLSHRISLKDLIKRINNKKSDSIEKFAKSIENVFNTIKDPKISNDLKKLTEKLTKKEIIDVINNYFNKYGIKSVKVFKKDNPIFAIKHNQHTKWVIPGNMHHVKLWQLPNGEIEGVGVYFYELNKPNYATTSFRPKDKKTGREIATAKYITKIHKGDLIECDYKGERVVGKITSLKPSNQCLMFTFHDESLTDPKLLKSLKFSNWKKHNCKKVNLDVLGKKIKKNV

SEQ ID NO: 382 - protein, 1091 aa, unidentified
  REGION 1..1091: note = Description of Unknown: Cas Enzyme sequence
VKYRLGLDVGTASVGLVAYELDDSGRPVSVPYHSVRIFDEPLLPAKQGGVGELKRAARRETRQQMRLHQRRARRLRKLAHLAHLLGIDSEAVAHRRKPHILEVRAQAATQKVAMEDLLRIFLHISKRRGYAGTFRDRKGGKMGEVQTGINDLRKAMDGAGCETLGEYLLHRHRQGQRLRLKADDKKLYANREMIRNEFDCIWTTQEREHEQLCGGHEGRPLREIFEEAIFYQRPIRILSAGNCSLETSLPRSPMVQPAFQEFRIEKQIADLRWAKKGRRHPKPLEEPAKQVIRRLLADRERVKFEQIYKALEKEGIPPAPGEYLNLSNGDREDLRGNGTNVCMKKLGLEQKWRNLTDGHRITALNLLADVGAPDVFSTQDWHKRIARGRKRADGKPEYRCIPREVANFINGMAEMEKLDWLSKMGFEAGRSSYSIKALRRLTDAMREKNLDETDAIGLLYPQSTARREELLGELPPHEQTGNIVVDMSLRQVRREVNAAIRQLGGPPESVVVELSRDMPLGVKRRGEIVDKINKNRKARKKAALEIKEHTGNAASKSAITRYLLWTEQDQRWCPYCTEPINISAALDGSKTNYEHILPRSLTRIGKRRDYLVLAHRSCNDSKGAQTPREKWGSDPERWKVIEARAKQFGKKKKLGKMRQLLSKGSGESLLDDEEIGDFSDRQFHETSWISKACAQWMKAVCSDVAVSRGFLTASLRRKWGLDTVIPEVRIEEKLPIFDRENELITREDFERHRAYWEERGGTEDSSKTSRKIEKRIDHRHHLIDALVIGLTSRSLYQKMARAHKMDAEKADFSTKRRSIPLRAEPPIRNIRKLALGLVCNCNLTHKCDRWLGGPFFTKLPLAVVEIDGQDWFVQKKTLTEIATGKVETVRNRINRIVSQSTREAVLKAFDERIELGKNPKEALSEPILDPHFSKPIRRVKMRVWERADGAISVKHMGKIQNKIFAKYLKTDGYAYLELDKRQGNASLVTLYELIKSGERKLSQDFCRFFKGDTVLDKSDNKLYIVRQIRANDKGTLAMTLITESQIFAEIQKMDMSINKKGDYVGRSRIVSGEELLKLQPIPDGWPPHSSD

SEQ ID NO: 383 - protein, 1077 aa, unidentified
  REGION 1..1077: note = Description of Unknown: Cas Enzyme sequence
MITLGLDLGHTSIGWTLADVKNRKIIDGGVQIFEAPEDEKGNTLASLRREKRGGRTTNKNHEKRLLNLKKLCSKYGLVSKKLLITPKGSVAPLFKKGIRKDSPLKLRTKGLDELLNGRELTRVIIHIANRRGFKYEIDDDTDEESGKIREAQGELKKEFEMFSYRTYGEFLYKEYELKGKKTRNRAKKDGTPDYKFSIHRDNLKDELLQVLAKQKDLKNKYVTDEFIDKVMEQLLFVNEPKSLKRMIGSCSLIEGKKRASKALYSSEIFVARGILVNLRVKEPNGDEYRALSKDEIELLLKEGHSKKIGKKDAKIILNISQKSKFKGDDEDSLTHIVYLESLLKMKKNIDNEILFEKLFKDLNLYENIVDLLTYEKSLKRRKEKLEAFLEESSLSSDEKKEIFSKVLYLSFSGYLNVSTEAVQKILPYLENGYRVDQAILEQGMKIDVESQLYLPPVKDTELMIPNPIVIRAITKSRHLINAILKKYRDMYDDEEWTFDRLNIELAREINTQKEKKEITSAQTRDRNNKQKAVDFIVENCGEKYVTSKTIEKVRLWQQQDEICLYSFKHISTDAMATEIKTDGDAFERDHILPISRSSDDSISNKVLVLSSENQKKSNKTPYEYFGKDKERWEKFENFIRSKEVYAKLGKAKVGKLTMKDFANREKDFLARHLNDTRIISKTVKNYVEKYLKFKNKSNERRVYIISGKLTSTLRHQWGLEHKNRENHYHHFEDAVLIAFANSSIINRLSNYYHALETYKREGKDKPKFTKPYKNFVDDINKMIEKINVVREPSIRNSGKVHSDNPRKKDENSRKGMEIRGGIVDNSDIVRTDVFKDIKKEKYFLIPFYLKNLNKPLPTKFITAGNKEWEEFDKNKHKFVFTLYPNDLVQVQTKTELIQGYYISPHTGTANITLLSMDNVDDGIFTKEILKYVFSISINNSLDTDSRKEIIEQISKLTYIKKKKPSGILSLVMDIKINDVKELKEKKNNLELIIDELQENYSIEKIENSTQNIQLPKEIKNDNKIKLTLQLDTLYDNRALKGTGVKTKTLGFKKLQIDLLGNITELPYETERKPFTKR

SEQ ID NO: 384 - protein, 992 aa, unidentified
  REGION 1..992: note = Description of Unknown: Cas Enzyme sequence
ELAAKIALNADPVSAHLLPYKLRAMALDEKLEPFALGRIFLHLSQRRGFLSNKKAEDKEGEESGTVKPAISDLHKEINEKGFRTLGEYFASLDPEEKRIRQRWTGRQMFIDEFKAICDNQDKYYHDLLNKTVIVDSWKDNPDAWQFSINKQKRKKILSNEKFHSKKITLREAIEKALFFQRPLKSQRHLLGKCQLERGKRRAPLASLEAQRFRYWQKIIDLKYRDIDRLMTPLSPEQQDSLAAAWEQNEKLTYAKIRTLLGLKQPRLSKEEKDKGYKPLYVFNMEEDEDKELKGNTTSVRIAKIIPDRWNVMPDEEKERLINEILQFEHEDALAKRLEKVFKFDSNTASQLAAVQLERDYASLSKQAIRKILPAMIEKRIPFATARKEIYGEQFDDERKVVLDSLPPVLKAVKDLKNPVVTRTLTELRKVVNAIVRKHGKPAIIRVELARDMKRSRPDREKLSKEMRQQEKRRLDAKATILKEMGAQEPRRSDILKILLAEECNWECPYTGKQITVRNLLGSAPQFDIEHTLPFSRSLDNSYANKSLCHVDENRHVKKNQTPFEAYGHNPQRWHEILERVQRFRGPSAEIKLRRFQLKEIPDDFTNRHLSDTRYISRLAGDYLGLLFGGRIDTDGKQRIQVSSGGMTSYLRDEWNLNTILGDGDEKDRTDHRHHAVDASVIAMNEPRIIQMLSRAAERASFEGRRLFSKGVVAPPIPDFYEKVKAAVDKINISFRANRKVSGGLHEETNYSPPKTLIEGEGKKAKETEYRHVRKPIIGMSESEIDSIVDKTVRELVKKCLKDKGMKDAKKLTENDLPYLRSKDGSRLIPIRKARIRKSVAAMTVGKNGRERHVASGSNHHMEVVAVLDKNGNETKWEGIVVSMFEAYQRKRLGQSIINRDHGTEKRFKFSLALNEYFAMKDKDGVEQLYVVRVISQDQRGAKSVSSKLHTDARPSTEILKTKGLIHNANTLMEKGIRKVTVDVLGNIHPAND

SEQ ID NO: 385 - protein, 1088 aa, unidentified
  REGION 1..1088: note = Description of Unknown: Cas Enzyme sequence
VLQPMRVPYVLGLDIGVQSVGWALAQLDEEGNPCGILRLGVRSFESSSGSEQEIEKGTDEPASRQRREKRLMRRQLFRRQQRLRRTARVLQQAGLLPQFSLEPASRDAAITQLDAQLRSQFIGSGNHVDAQLLPYRIRAAALDRPLPVYALGRAFYHLAQRRGFLSNKKASAKKDDEDKGKVKAGIAELTRQIEVAGARTLGEFFARLDPHQQRIRSRWTSRKMYQQEFDAIWEAQAPHHPQTLTAELKARLYRAIFFQRPLKSQKGLIGRCSLEKGRRRAPLACLEAQRLRYWQKLNDLRLKDARRILNAIPEAERLIDWLPQEGQGRLTLYAKQLLAQEFETNEELTFNRIRQILGLKKKKDSDLDFTFNLEEGDEKKLPGNRTAAKLLKALGQRWQDMPEDQRQRLVDEILSFEKEEPLARRLEKAWGFSPSEAANVAAIDFEQGYHSFSRQAIRKILPHLQQGQALATIIKQLYKDTQPQATVWDRLPPLRDVFPQVNNPVVRRALTEVRKVVNAILRVYGKPQRVHIELARDLKKSRHERQQLSKGMRQQQKQREDARNWLQHEMGISNPTAHDILKYRLWIECEKLCPYTGKPISKEALFGSEPQFDMEHIIPHSRCLDDSFANKTLCELAENRAAKKNRTPYEAYGHDPQRWHEILQRVSRFQGDAAKAKLRRFQLTEIPADFANRHLNDTRYSSRLAAEYLSLLYGGRYDAQGNLRVQASTGTVTAQLRGQWGLNAILAELGRQLGVRDLDNDVEKARFDHRHHAVDALVIALTTPAMIKRFSDESQRARQYGRQFRCFFDPPWGTRAQFVADVRDAVLAINVSRRVDRRLKGPLHEETIYGKPKQCVDEKGKTIQVAHVRKPLESLSPNNVDHIVDPVIRELVKKKLQELGTTDPKKAFQAKDNHPYMKARDGRIIPIHKVRIRVPTETLMAIGHGPTLRHVKPGVNHHMEIVATLDAAGNEIRWEGITVSLFEALQRLRNKQPVVQRDHGPGKRFKFSLSGGEYLEFVENGRNKLVRVSVISGDDVEFRLHNDARPNTMLRGVKGARAGLVRSADALRKLKARKVLVDPLGNILPAND

SEQ ID NO: 386 - protein, 1353 aa, unidentified
  REGION 1..1353: note = Description of Unknown: Cas Enzyme sequence
MKFKHVIGLDIGTNSLGWSVIKEYENGNIEIIKTGVHIFPIGTIVDDKSNKEKTKNEQRRSYRGASRLRYRFKLRRNNLSEKLEEFQMLPDYSKYFKAKGLGQSYELYKLRADAINPSIKLPLQEIGRIFMLLNKYRGFKSNSKNQKENKETGEVKKGYESLQKLINDSNSQTIGEYFFKMHEKARQLYDENKWHNFNEPIDERAYNDIREIVLFNSNGIRRHHGRYTLRDMYLLEFDKIWAAQKNHYPAIFTGSKKEYDEILSLPYEKRITELKEFKKTNYWHIREYCIYYQRPLKSQKKFVSNCQFERGSFEIKKYAIIENDIEKTKEKRIWKKKAKKACPRSHPLFQEFRIWQKLHQISYSSKTENVFRKLLKQEWIPVIAESLMSNSDVYLNETKKAKADNKLWFGKILQDKGLITNSENYTFYIDKTDEDVVGEEKNENKISGNVTYSAFLDALGQEKYNILKNENKLDALWHHLYIAKDGLFKEEDWLKCILTSKWGFTSEQSQKLIDSGLQPDYGSYSSKVLKAILPYMRNGLNEYDALKATGKDYINEDNTVGEKVQLKNKISQLAYQELRNPVVERALSKTIKLVNAILDKYNSDIDRNSFEIRIESTRQFKKPRQERETERRKNADKDKLRQQYADYLTKNKARLGFKHDIHKYDSIVSKYELWLQMNMNEDDEEFASEFKAFSKITKEQDKLKHKLWLECGRMCPYTGNIINFTDCFSSEVEIEHIIPLSRSLNDSFNNKTLTYRNTNAEKGSMTPLEYLKKKGGIDLKHFISRIKSEHGNAFSDSKKELFLSENINPDFSSNQITNTSYIAKYTRKKMQEVCRNVQFTNGAATSEIRNYDWALSNLLDKIRYEEDNMINIDEYYREYYSIKKDFINWCAKKYKTTDFKIKWGQLTENEDLKAYILETKNDLLFWDEGIRKFNEFRNKSGKKDRSDHRHHAIDAFITACCSPKIIKELSTYNAVRENQHLRDREKIEKAFNYNELKTAIANILVSHSEKQTLIKKRKNRIKTKEGLKEHFTYAPQGKLHEESFYAKRNNATVRRVELFDDQRQEKALFTSAADLDYSVKKTVKWHYIDDSQLYEITKQRLENLKEKAFAKDEMEKKPFYRASPQTPYKITSKKNKPLPVVKSVRKRFNSDRTLINLPAKDENGVIISENRYADNDSNAIMVLYEKIEKDNKGKIKKPERDFEILSFYKSISRKNPNNDLYYENGILFSDEKDTIGLKNDCKWLKIGDIVSLYIDETDKKAFDWTNNLILKDRLYIVKGLSSSIVTTGGKEYEYGYISLLKTKASKANSYASERDISECIALNSFKLSHDKFNAIKVRINILGEIEAIGEECF

SEQ ID NO: 387 - protein, 1158 aa, unidentified
  REGION 1..1158: note = Description of Unknown: Cas Enzyme sequence
MKQDLELAFDVGHSSIGWAVLQTAPQLEIKGCGAVIFRADDCLASARRGYRRQRRHIRSTRQRIKRMKALLAHLGVLTKDQLDKPGCAWPWKLAARVLVGGKTLTWSELWDVLRWYAHNRGYDANRRWSNVIPDSDAEEKELDRILTDETASEEDKKDAKKVKEAKRLMRELHTQTMAETFCKHLGIQPLGDKSSSMTRFKGLNAAFPRRTVEAEVARILKAHLGELKGVDDKFATALFSDWQVYVSESPSLYLSKEDHTKLRELRVPYKAKREEKKRLEDKRRQILDGKLALPPRYAGGLLFGQLVPRFDNRIISICPITGQKVPSRNTPEFLNFRWGMLLANVQVARLADRELKPLTVEERKELDGIMREEGAMTAKQFTDAAEKVTGAIRHNLATMLMHPDAKEALVLDPVQECLTTEKPTRVKTLFTALPTRIQKRARGQLRHGKSFTFAALYEASKEVGESVAAFDAAIQQLLDKAAGKGRKKDKPTTREDLLKRQLAVRKLSGRAAYSRPILQKAFAEVMTGKHPKEEGGCLFVTEQMRQAQLNRTLAEQTNNHLVRHRLLILERLQRDIIKEYAGGDKKRVGRMTIEVNRDLREMSGKTNYEKQADLNNRVKNHHDVAAKLEKALEGQKFNGKPISIGAGLIRKGRIAEDLGWTCPYTGQKYEPIDLLTRRVDKDHIVPRSQRMSDALEALVITFSAVNKWKSKRTALKFVEDEQGKPVPDAPNLSIVSLTRYRDFVESLESFKGHNDDQKRKKRRKELMKIRDYEEGEFTPRDLTQTSQLVRLGAQILKRAFVNEKEPPPIVSMPGSVTGAVRRGLNLLGCLSEACPQVLDESGEVKTKTEIRGITHLHHALDACVLGLTAHFIPNNGSVWELIVKRNLSDVEKEQLRAATHGIFNYTSEGFRVADLSHPLKQQLRQRLTEKRVVQHIPVRMDGLRVEQNTWGVVSKNVDGTVLVRQRIRHADGSRKKKEVPEKSVKLLGLAPSNGIGKLAANNGVLVIPDNYGVAILDHAKDKNDRFVIIPWHLVHKRIFKGIDGEKSLIDRNGGRMPRILRNGQIIRVGGGTYKDKGAWKITSIKNQKTGVKLNLGQPDTVNTEEEVLDVVTGKKTRKVRADCRHEASLASIVSGGLQILTLPLTGHPVQSTEAHGKA

SEQ ID NO: 388 - protein, 1390 aa, unidentified
  REGION 1..1390: note = Description of Unknown: Cas Enzyme sequence
MSKILGLDLGTNSIGWAVRDTEELEGVKQITHKGAIVFEQGVGEKKGIEFSLAAERTTARTSRKKNMRRRWRKIELLGILIKENMCPLPIAELEDWSKPKRKTEKKYPTNDLFKNWLRLDFNNDGTEDYKNPFELRKEALERKLTPDELGRIFYHLTQRRGYLSNRSEKARDTEETADGDIEENDDKPKKKLGKVAKAIIDLEEKLEGKTIGQQLYEEIENGSRARRRKDESTNIYRLTLQEEFLRICSFQEASIEVTEKIRKIIFEQRPLKSQKGTIGKCIYEKNKSRCPVSHPEFELYRMWQVLNNIKYSDDDKKSWQSLNADDRKKVQEKFFRKSCVTFPFSDIKKIFGKHFPNRVFNYKDYQTVAGCPMLAGLMNVLGEDNVWQLRDAAIQRIEWEEHEKKMAKGKYHNTQIDLYDIWHWLFVMDNDKDEEIVKKKAIESLGLSEKEARSFVNTSIKQGYGSLSLKAIRKINKWLEVGEKYDKAVFLANIPYVFERQLWLDNKEGLTEAIQKEIEQIAFQKSTIDIANSLIKKYNGLPYTQRFANDKGYKLDADDLNGVKETIENYFGNKKWNTISGDTKSNYEDKVAQLYQDALSKGVNGDIAFIKMPRLEDNIKIRITEMLSLNPDDKRLDKLYHPSEIESFLPAINEKDKEGNNTGRKLLDSPKTDSIRNPMAMRSLYELKKLLNYLLKNDVIDEQTNVIVEMARELNDANRRKAIERYQRERESENTKYASEIKKIFEEQKKTLPEDLTSYIERYRLREEQPKRVCMYTGNTICDADLFDEFTTDIEHTLPRSLTFDDSFQNKTIAFKNYNNEIKNKLLPTQLPNYPEAAIGYDPIEPRLENWKKLVKDYETKVEICKKRSKMASTKEAKDKAIEDKHYNQIHYAYWKSKLERFTITEITERFKNSQLVDTQIIAKYGVLYLKTLFYRVRSTKGILTDKIKRVWGAMSNDEKKDRSQHTHHTVDAIIQTLLHKERNKPDVYNLLAEGYKEAEANRWKEPKIPNPWGLAPDGFFSAMQQLTSDVIIYHADRDNVLKQTKRKERFKKQIVYTVDKEGNKIPRYQRGRGIRASLHKDTFYGAIKIPIKENGKLKTDDNGKLLLEKDEKGNDIIKYRSSFVFRGNTVDAIKKNIENIVDERLRELAKETGAATIHKQGFFEIPPNEERLKKNPDAEATKVFKVKVFADNLQNPLQIKKHRDVKREHKQWYYTQTDGNYLMALYDNGKEKDFELINTYQLTELVRMGQGQYPLYKEKLLRGKQIQMPLIVRNRKDVVLKPGLKVLLCEKSFDEVTSDLSANNLIDRLYSVSGLTVQRIKSGGNVLEYGTIHLMHHLEAKSLGELKIQDGEYKFKDGKKYRKLNHNQFRGLVEGIDFRVSRDGIIHLL

SEQ ID NO: 389 - protein, 1381 aa, unidentified
  REGION 1..1381: note = Description of Unknown: Cas Enzyme sequence
MSRILGLDMGTNSIGWAVRDTQAGTGLEQIIHKGSVIFDKGVGELKGKEFSLAAERTKHRSARRRSQRKRWRKIDLLSILIEHGMCPLSVDELARWKDPKRKATRKYPDSQEFKTWLRLDFDNNGVPDYANPYALRAEALIRRLSLQEIGRLAYHMNQRRGYLSNRSDKAQDAFDTEPDEEETSSRPVTSRRLGKIAGAIKELEDRLDGHTIGQKLHEAIKAGDRARRRTDEGTNISRLTLQAEFLKIAEFQLLPTQLTERIRRTIFDQRPLRSQKATVGHCVYEKDKSRCPISHPEYELYRMWQVLNNIKYSDDDRKTWHSLNPVERITIQKKFFRKSNPTFEFADIRKLFLRQHPHRIFNYNDAQTIAGCPTLAGLISIVGEERVWQMRKAALARLHWEAVEKRASPIAYPSKQLDLFDLWHWLFAMDNDKDQEIIRRKVQFSLGLTDREASQFVAIPLKPGYGNLSLKAIRKINHWLEQGERYDTAVFLANVPHLIGNSIWELTKTSLMSAVRQAIECIGQEKASIDIANRLISQYNNLPYHHRFAKIEGYTLDEDDHKDINTALIGYFGEARWQEFPESLQYNYYERLQNLYSNALKNIGNGDLPYIKPPRLDENIKHAIYRITGLDPASHLLDKLYHPSDIESFAPAVIEVDNSSGRPTGRKLLNTPATNSIRNPMAMRTLYELRRLINYLIRKDIIDEHTQVMVEMARELNDANRRKAIERFQNERKEENVRFEQELKKIFQEQGRTLPADLSAYVERYRLREEQPKRVCMYTGRTISDADLFDENTTDIEHTLPRSLTFDDRMENKSIAYKSYNNTVKNKLFPSQLPNYATDTPEFTAIEPRLLNWESLVAEFEAKTEMAKRRSRLAATKEAKDKAIQDRHYYAMHHRYWMSKLERFTLTQVTQGFKNSQLVDTQLISKYGVLYLKTVFFNVRATKGLITDKIKRIWGAQGIGENKDRSNHAHHTIDAIIQTLLYKERNKPDIYNLLAEAYKEAQEHRWKEPRLSNPWGLEPAAFYNAMQRLAADTIVYHADRDNVLKQTKKKVRLKGKIEYRKNDDGSFLQDKQGEKIPFYQTGWGLRASLHKDTFYGAIKPPGKEVVQYRTSFQFRGSSVEDIRKNIPKIVDARLRKLAEEASATNIQKLGYFEIPPSEERKKRDAAAQPTKVFKVKIFADDLKNPIKLKRHAEATREHKAWYYVQTDGNYLVALYDNGREKDFELVNTFDLAGLAGERQGLYPLYKEKIFRGKTFRIPLSRRNGKDVVLRQGTKVLLYEESANEIYADPSPGNLTDRLFKVQGLSIQRIGGKYDYATIHLIHHLEAQPTSRLKVQDGEYKWGDGKKYRKMNHNQLRALIEGVDFHLTPVGTIIFINNVADE

SEQ ID NO: 390 - protein, 1021 aa, unidentified
  REGION 1..1021: note = Description of Unknown: Cas Enzyme sequence
LDLKEIGYIIYHLANHRGTASVRTFEEFDEKKKKETKELREKARTSANLMREKKYRTYGEMLYKEKIENKDAHKRDIVRNREGRVEFINTRDLTLAELNEILAVQSEYYGDIFTDDYRRQIMETVNYENEKLVPEPGHCPYFPEEQRLPKAHPLTECRRMWEALNNARVFDPQIRGDEVVSFKERELAISEKEILFGELKKRKKLTAKNVMDILKLNEHAEVMLQGRDKKKQEIKGYRNIDFESMSFWKRFDERLRNEFFHDWISSPDDSSLKKILSDKYKLKKDEIEKAIEEIEMISGYAPIGPTATKIITKYIKKGFSYTESVDMAIEDGRMKARESKVYDFLPYYGEILYDSTQAVIGKAFSEKFKGRKYIKPNTDFREEKYGRIANPVVHQTLNELRKLVNEVIKIAGKKPVGISLEVARDLKKSALEREVLSREQSRNEAEKERIYEEYCRPNAVKRSHVLKFLLWEEQGKRCPYCLDEINVDDIVCGRADYEHIFPLSESQDNSRNNLVIAHNKCNAQKGDRPPFNAFYKSPKWPEIINYLKSTEGLKGKRWRFEQGAYEEFIKNRDMKVRFSTDNSYIAKSASKYLTCLFDKKTKVIPYKGGLTAQLRIAWKLNGILLPLIKEMLYEKEKPDFDKTVSLELKLRNDHRHHAIDAMVMAFASKSYSNMLNYLSGKGYKIDFTKKNWLSDIFIPPTGGDVDEFSRMISNAVRNCHISIKTDHNPNGELIKGTAYKVYGMKDRYILSVAKGIADIKAENIEKLEKILCSKSGEIEKNGNVELKRKIGKNYRLFEVVKNNLIEARKRLEEDNENLKREGKKTYEINDKRILKKALEITGGKYYQFEMKERAKFFTLKAPNGGPGFGYDTGESLCIDLYHDEKGRLCGEIIRKVDAMKGREPEYRKIGFKLLERIYQGDILECDVSDEKRALSVKTANAPENRVFVKVNTFTELPAYFDGKRDQINLWISNISRAKIKPGDSFCISSMKKYRPRKVMLSHLGAIRYRSKILEDRNVENN

SEQ ID NO: 391 - protein, 997 aa, unidentified
  REGION 1..997: note = Description of Unknown: Cas Enzyme sequence
MKRVLGLDLGTNSIGWAVIDVPEDDESSGSVVAMGSRIFTMGAEEAGSALVTPAKERRQKRSMRRQIARRAKRRRRIREELTRIGLLPDDEREFDILMDADPHDLLRRSGEGNALTLREIGRVIYWFSSKRGFLSLRSEGADLTDDDDERAVRPRYRRPQVHADTGEIVSQGQEGILVDFLREQAVHHPDLITDQLIFGARGQLTYPVRPVKRDRFIGDGTWLDEFGIHGLVFFQRSIYWDEKTIGRCSIDPRRGGPRALRADRLAQKYRVWKTIVDLRVDFDERPLTADERAVAFDALMTQGTLAFTALRKRLRLPEGSPINFERSERTSLKGNETDAAMRKALGADHWKNLDEETRDRIVMLLLGDAQEEQIKATLTGEYSFDDDQIAGCLAARFPGGRAMYGRRTLRRLLEMLPEHDTERDALEAAGYRMPEEVRRERPVVVSELTNPLVRQTLSQLRKVLHAVAHTYGNDGDAPFDVVRIELSRDVRANRKDRERTNKFQRANEKANKEAGEFVEEFGQGAKANRDRKRRHRLWREQNEQCLYCGQPISATAVLSSATELDHILPRSRTLDDSLANMALVHADENREKGNRTITEWAGPDKAAEVAERLLHTSIPWAHKKPKLRRIEAVDVADAPVPEALIVQTGYINSVARDFVRQELGVEPEVSAGRITAQLRYRIGLPKDNEDHRRHALDAAMVSICDIRTARQLADRFRRERDYKVRRDDDYGSWEPWEGLRDDIRANYETINVSHAVKGKVSGQLHEETRYGKVTSPYSDEEHTWARRRLLSGGLTLPQLAEVADPAVRAALEANLRQRGIDPEVGVRKKLTFDSNAPPVMPDGKEIRRVRCHMELPGNRVLQPDAAPKTSVTMGRNHSAYVYENAKTGKWRIHVIPRFEAFQARGLPSDSMRDAHMGDGERFVFSVTIGTSLLLEIDGTDELFLVKSLDAANSRFDVQPAVASGVLKQVWHSGTKLKRLNARKVVVLPSGEVRTAGD

SEQ ID NO: 392 - protein, 995 aa, unidentified
  REGION 1..995: note = Description of Unknown: Cas Enzyme sequence
MRYRLGLDMGTSSIGWAVVEMNDLNEPEKTIAMGVRKFNSGREDKTQAPLAQKRRQKRSMRRQRARFLRRQQRLLHQLGKLSLMPEAAKERRMVADCTHPSFATLGANLNPYELRALALEKPLPPFALGRVLFALNQRRGFKSNRGENTEPNSKAFEEGIGKLEQAIADGGFATLGAYFAHRQRLNQYILDARGQNEAVEREGVQTTRKMYEDEFDAIRKAQQVHHKLSDKDWNELKDTIFNQRSLKEVERGKCQFYGPQGLDGVFRAYAADPLAQKLRAWQDINNLKVSLPENDGKPRFLNDEERQILWQLLQAHKTIGFSTIRTKLKLPADVTFNLSSAKSGDKLLGLQTDIDMADPKRFGTQWHSLSPEEQTAVIELLQGTKDEEEVIHTLVEIYGLSEEAAETTSNMKLEAGTARFCPKILAELASQLASIRTDPQTNRYISLTEALADMGGTYLPPDQLVEHLGYYAAMMPEVGMHQKFRTVPEERKFGVIGNPTVHIALNQLRHLVNAITDQYGKPASIAIELARDLKQNAEQKRESEARRKKNEADRKAMQEECKKAGVNFNPDSREDWIKYRLWKELDKDPLNRKCVYTGKTISLNQLFSNDIHIEHILPRSRTLDDSIANLTLAFRDANKMKGNQTPFEYYKDKPEDYEAVLQRAKNLKGKYWRFTAEAMSRLDNEERWLSSMLNDTRYMSKLARRYLSYICDDIQVSPGKLTAKARHQWFGRALEKNREEDHRHHAVDALTVALLTRGAVQKAQIEAGKGEDLKGHAYEKLDLPCPMDKEELRKQALALLGNMVVSHRMDHGIQGALHKETSLAYTKKGVQKFMEDQEHATMLVPIKHRQGDTEHINYYEHGGVHHIDFWEVPQTTDKETGKTKKAHVVGVPVYAHEANPPKGKAKKQTRPHPASTFIMRLHKGDAVALDKDNQNNQIVIVRQINPSKGNENLVYDPVNQPADTLYTLGFSSLLKYNTRKAYVDILGNVKVGRRN

SEQ ID NO: 393 - protein, 1024 aa, unidentified
  REGION 1..1024: note = Description of Unknown: Cas Enzyme sequence
VAAFTSLKYRLALDLGSTSLGWAVLRLNAEHKPTAIIKAGVRIFGDGRNPKDGSSLAVTRRNARAMRRRRDRLLKRKHRMMDLLIRHGFFPSDDSQRKALEQLNPYELRAKGLSEALTPAEFARALFHINQRRGFRSNRKTDKNDNDSSALKTAISALRQQLDADGMDGKARTVGELLWRRMQAGEGVRARYRERRMEAEGGKSRIDKSYDLYIDRAMIESEFDLLWAKQTVFAPAAFIETARAELKDCLLHQRPLRPVRPGRCTLEPGEERAPLALPSQQRFRIYQEVNNLRVLREDLHDEPLTFAQRNLLVDALEHNGKRTFTQIKKLLKLPGTTQFNLEDAKRLELKGNSTSALLSKSNFFGPIWFDLNLEQQDDIVMHLLTEENESGLIAWLQLEFGLSEAQSEAIANARLADGYGSLSAKALARILPTLQAEVVTYAEATSRAGYHHSHISHAAMTGEVLPELPYYGEYLQRHVGFGSNNAEDPPEKRYGKIANPTVHIGLNQVRVVVNALIKRYGHPCEVIVEVARDLKQSREQRLEEQKRQAENQKRNERLRVLAAGILECPPERVRHADIQKLVLWEELSSDVADRCCPYSGVQISARMVLSDEVEVEHILPFSQTLDDSLNNKTLAIRRANRIKGNRTPFQARLDFEREGWSYEFILQRVARMFSKDKKRFYRFGPEGYEKWLREDKDFLARALNDTRYLSRVAREYLSLVCPQGTRVIPGQMTAKLRRQFRLNNILGVGDEKNRNDHRHHAVDACVIAITDQGVLQKFAQASASAREKALDRLVDDMPLPWPTYRCHVKRAINNIWVSHKPDHGYEGAMMEATSYGIRKDGSIRQKTRADGSEGREIKNLIRICEPSQVSRHGVDADGRPLPYIGYVGGSNFCIEIVRNEKGRWEGEVISTFDAYQVVRQNGVKQLHHPALSISGKPLVMRLVIDDIVRMEIEGREQTMRMVKVAGSGQIWFAPINEANVDARNREKADPFSYTSKMAGSLQVAKARRVTVSPIGELRDPGFKE

SEQ ID NO: 394 - protein, 1207 aa, unidentified
  REGION 1..1207: note = Description of Unknown: Cas Enzyme sequence
MPQDKPLVLAFDMGKASLGLCVRDDDELLALESVDIPVEHAMTTELRSRTHMTRTRDCHTQRENWFMEALWLKAGLPDFREDAVWDELVKPTLAPSYTGDVKLRTREFPKGGDETNFNSPLLRIALLEGEDLAPWQVWKALWSAIQKRGFHYYDWKSVPADFESVDANIGELLAKKQELTDKLDEIETAKKLTKNKDEKAELTEEIKALKEEVKAWNAEYGEVIEQMTHYKKNLLERVYLDEYTYPCYMEAARLGLWEVNPITNRGQIFSFKQGNQPQALAQNERLVPRAYRIKELKSLWSQAQRLLTQLQAFEVDYLLFGEAKAPYATVWQRTLKAHRGKGPNYLFRRRGDARLPIAVDEPNRFIDTQGVLGQKVPRFDNRIIAKCQLMPTRNVCNAKDPLASKVGLMLQLKNTRFIDSDGVVRQAGLTPAEFNTLIEAVHPLLNDKGEVTYTKFVKALEDTLKAHGTGLSHLQHPALKENIKVNISGRSRFCRPALKVIHYTLTHGDAFPNIDPLTVTYEGKAVVNASHPQGVTAEEVVKTLKRLGTSWESFSVGDDRDDTFALGQALQTNEARRHAVMKLLGRSNNPIVRNRMLIFYNKLVKLEANLTAKGYNVRQDAKVIIEFIRGADSGFDGKKKGDEWTKHINANEKENEELLKELRENGLPDAYRLRLKLFKQQRGQCAYTLDTEKAKLSITDLGSYEIDHIYPFSLAFSSDAVWNKVLVRREANQDKAKQTPYQWLHGQKGEAVWQQFIAKVEAMYAKDDKSTTKKKALLTSPNPEKQMEKYTGLAETATMARLAQQVLGLHFAWPLQVEGQDRRIFVSDGAWTSRIRSRYDLGRLLLDNEKECALDNAIAKQRENYQRRREAIRFNDTATVQAMETTIKEQADILKKLHKDRTNSKHHALDAFCISFSQDVRPSKDERGRPKLKPSGEQEWTLLNEDSFLTFKQALPAYMEALFPQPYCRNKSKLALEETIYGYRKALRSMVVRKPLFDLLKDADDKKIKNLSLVDKAIEEDLKAHHKTIATKKEWNEFLETYPHPTRGNRVKAVKIIPMAEVDFMGYGTGNRSRFGELQDMGNGQTKGQYKKAAAHNGQIVYQDKQGKWNVFTVPAFMSELEARATLASRGIKTLFSNGDLLYPSLTVRVKQMFLGPKGIMMKAGLYTWKTMNHLGYCIIEDANGFSPSGIAIAKLISVGLEIVKTP

SEQ ID NO: 395 - protein, 1111 aa, unidentified
  REGION 1..1111: note = Description of Unknown: Cas Enzyme sequence
MSRENVKRGDYILGIDLGSNSVGFAAISAHDPASPVPVEELEVFQIGSHVFEEAGADNVSKGVRELNNHVRQKARRARITYRRWKWRKERLYEIFTELGVLPEDPFERDRILCIHKDEGLEKDPLTLRVRGLDEELDPVDFAKALCHLNRRRGYLSTRDLQTREIPQGMLEEARRAYLDVPDTSEDDVPAKAEGDEEDKRVVLGGIQRARKALVKNEARTFGELLHKAHAQGSYTRHYTERFKKKSKEKEKAKLAPEEKQLKYRADRAMIEAEFDLLWERQSKARPELWTPARRDEIHQIIFYQYELGPSDHLRKACMFYPSKKCAPRASRAFQEFRIVQDLVSYIFVGEKKKKKGETGERTVLPEETLRAMLAVLASGYDIAVDEKDRDLPNVRGCLADYIKVPHDLVKRSKFHKYRIIHGSPTIRLMRQGSKGQWDAWSEELREHVLDVLTSAQTPSGAYKALVKRGIEPQIAANLAMAPLPEGYGEYSTKALKEMTRRMIEHGLQQKVVFDKMLAESTEKRLTYYKAPEVSDSPSGGEFGNLIRLRGRPRGRHEDQKADSDLNLRNPIVEKALRRAVDVINQLIHRYGKTGEQPGKGAQYRLPKIVRIELPRELTLPPDAKKKIEDRMNENEARKLHLEREIRLAGHDPKVGSNLLKAWLLMESNFELLYEGGKASFNDLPGLEIDHAIPRSELYVNERFNLVVCWKDTNTRKGNRLPLKFLEEDLGETAAAAYKRRVLSSKLSSHKKSWLLKTEVPDDFLASQLHATSYLARELKRLLEENGLKVEVTAGRGTAHLRHLWGLEKDLFPDWLAVAKAAKAKDQEEGGRTKKKTFAKNRSDHRHHAVDALVVALTDVSTFQALSRLHSQKVFGSREERARANAETCPVRGLRQWLETNRDNIPVTSYVRKKTTGSMNRATAMGPKESGLQGEFLEGSPLQSARVGNKLVKFDKRGKAAQVYELGNNHHLQVYVTPPDKNGKTRLEPQIVTLHEISERISARTDPYAPDRERLAQGYRLAHIFEKGEVVEFADRPGQFYRIASISAENTFEMKFQLMSVATMAPELRNFVVGEKVPIIRMSSVQSIALLQRRVNLNIFGEVVREEVLSWE

SEQ ID NO: 396 - protein, 1067 aa, unidentified
  REGION 1..1067: note = Description of Unknown: Cas Enzyme sequence
MGFPYRLSLDVGTASIGWAVLRLREDGDRFHPVAIVRGGVRIFPSGRDPRSGSSLAVERREARSARRNRDRRSARKRNLVRALIDFGLFPADREERYALADLDPYELRRRGLDQPLTEFEFGRVIFHLNQRRGFKSNRKTDSADPDGSKMKSAISEVRERLKADGFRTVGEWLADRHDRGEGVKARREPAVRGPEDYTLFVDRQMIEDEFDALWEAQEELSGGVGSDGAREGLRGIIFTQRPLKAVPKGRCTLEPTKERAAKALPSVQRLRVVQEVNNLKVRSNVYEERGLTLEEKQVAVRELIANKSRTFRQLRKAMQIDLAETFNLETAKRTRLDGDSTASLLSQDEFFGADWSNLTLERQDEIVLKLISEEDDSAVIEWLVSEYAVSEDLAGQIAALPLPPGYSSFCLDVTRKLLPPMEAEIIPISEAVVQAGYRSHSDLQASRETGELLFEMPYYGEALQRHVRFETGNEVDGNEDDPPEKRFGKIANPTVHIGLNEIRKIVNELIGEYGTPTQTVIEVTRDLKHSAKVKDEIEKAQKAQQDRNEAYKQQLKPVIGSSPSSEDLRKMRLWEELSESPIDRRCPFTGEQISLERLFRPGSDIEIEHILPLSRSLDDSLANKTLAVRQANRDKGDQTPYEAFGHSPGQYNYAEILERSANLPKKKSYRFAENAMERFVRDDKDFVARALNDTAYLSRLAREYMSTVTPWTNVWVVPGQLTGLLRRQLGLNGLLGRDGEKNRDDHRHHAVDAAVIGIMDRGFLQSVARATGKGRDPNTGIEKLVSGPPWPSYRESVERMVNHIHVSHKPNHSHEAGMANDTIYGLRPDGEVTVRKPLSAFDSAAMIDRTNFADRTLKKRLLTAIKGAETPAEIRHAIADFSTETGIRRVHVNETLEVIKLFNNDEAPERAPRPSRSDDGAYAGRKGDSNYCIEIYADEKGRWRSEVITTFAAYQIVRASDGSTAQLRNPQLTQSGKPLIMRLTKNDTVRIVIDSVPLDYRVCKFGHNGQLSLAPTNESNVDSRNRDSEDDFKYLSKAAGPLKDLQARNVTVSPAGRLRDPGPTATS

SEQ ID NO: 397 - protein, 1038 aa, unidentified
  REGION 1..1038: note = Description of Unknown: Cas Enzyme sequence
MGKMRYRLALDLGSTSLGWALVRLREDQPVAVIKAGVRIFSDGRNPKDGASLAVSRRMARAMRRRRDRLLKRKNRMAALLVQHGYFPIDMAQRKALEPLNPYELRAKGLDSPLSPAEFARALFHINQRRGFKSNRKTDKKDNDSGALKTAISALRQQLDTTGLDGKARTVGELLWRRMQNGTGVRARYREQRVAKDDGKTRIDKSYDLYIDRAMIESEFDALWSKQAALNPQQFNDAARIALKDCLLHQRPLKPVKPGRCTLLPDQERAPLALPSQQRFRIYQEVNHLRILGDGLQDTVLTLAQRDAMVEALERNSKRSFTQIRTLLKLSGPTQFNLEDPKRQELKGNATSTLLAKKDFFGPAWHEFDLAQQDAIVMRLLTEESEAALVSWLQSEFDVDEARAETIANGSLAEGYGSLSAQALARILPTLSADVLTYDKAVQAAGFEHHSHISHAASTGEILPALPYYGEYLPRHVGFGTGSPQDPPEKRFGKIANPTVHIGLNQVRTVVNALIKRYGHPSEVIVEVARELKQNQEQRKEQQQQQAQNQKRNERLRADAAAILGASTERVRHADIQKLILWEELGRDPAERRCPYSGVQISAAMVLSDEVEIEHILPFSMTLDDSLNNKTVALRRANRVKGNRTPFDARADLERQGWAYDAMLARAELMPKNKRYRFGVDGYQKWLREDEDFLARALNDTRHLSRVAREYLSLICPQGTRVIPGQMTAMLRRQLGLNNILGPDGEKNRNDHRHHAVDACVIAVTDQPMLQRFARASASTRERQLNRLVENIPLPWDTYREHVARAIGSIWVSHKPDHDYQDELFDQTIYSPGGFSKIAAKTRAVIPFRARAGTTAEQRHTNKNGQPKAYKGLLSNSNYCIEIVRIEGRWEGKVIPTHQAYAFVRNYKKRHHGCAEVDALRSLRNPHQSISGKPLVMRLSIDDTIRAEVDSAVETLQVLKINSSGSITFIRVNETNIPARYTAKLAAQKLSAAGEVCDQIALNDSFFQKAISAGSLRSMKARRVTITPIGELHDPGFRE

SEQ ID NO: 398 - protein, 1038 aa, unidentified
  REGION 1..1038: note = Description of Unknown: Cas Enzyme sequence
MGTMHYRLALDLGSTSLGWAMIRLREGQPVAVIKAGVRIFSDGRNPKDGASLAVTRRMARAMRRRRDRLLKRKNRMMALLVQEGFFPADSDARKVLERINPYELRAKGLDTQLSPAEFARALFHINQRRGFKSNRKTDKRDNDSGALKTAISALRQQLDPAGASGKARTVGELLWRRMQTGTGVRARYREMRVEKDDGKTRIDKSYDLYVDRAMVEAEFDALWEKQTSFDPQQFNEAARATLKDCLLHQRPLKPVKPGRCTLLPDQERAPLALPSQQRFRIYQEVNHLRILGADLQDSDLTLAQRNAVVDALERHGKRSFTQIKTLLKLAGTTQFNLEDNKRLELKGNATSALLSKKDFFGPAWFDLDPARQDAIVMRLLTEESEQALIAWLQAEFDLDEHRADTIANASLAEGYGSLSAQALARILPQLKADVITYDKAVRAAGFEHHSHISHAATTGEILPALPYYGEYLQRHVGFGTGNPEDPAEKRFGKIANPTVHIGLNQVRTVVNALIRRYGHPSEVIVEVARELKQNQEQRKEQQQQQAQNQKRNERLRADAAGILGIAAERVRQADIQKLILWEELSRDPAERRCPYSGVQISAAMVLSDEVEIEHILPFSQTLDDSLNNKTVATRRANRVKGNRTPFDARADFEREGWIYDAILARAELMPRNKRYRFGVDGYQKWLREDKDFLARALNDTRHLSRVAREYLSLICPQATRVIPGQMTAMLRGRFGLNDILGLDGEKNRNDHRHHAIDACVIAVTDHGLLQRFAQASASARERQLNRLVDDMPLPWPTYREHVVRAIHNIWVSHKPDHDHQDEMFDQTIYNAQGFSRSAAKTRSVIPFHARAGSAAMQRHTDKNGQPKPYKGLLSNSNYCIEIVRSEAAWEGAVIPTYQAYAFVRDYIKRNPGCSDADATRSLRSPSKSLSGQPLVMRLSIDDAIRAEVDGSLETLKVLKINSSGSVTFVRVNETNIPARYVAKLAAQKLASEGKPHDKAALNDNFFQKAVSAGSLRAMKARRITISPIGELRDPGFTE

SEQ ID NO: 399 - protein, 1069 aa, unidentified
  REGION 1..1069: note = Description of Unknown: Cas Enzyme sequence
MPQKMRYRLALDLGSTSLGWAILRLNNDTPPAPIAVIKAGSRIFSDGRNPKDGSSLAVTRREARAMRRRRDRLLKRKARMMRTLIDHGFFPKDDAARKALETISPYGLRAKGLNEALKPEEFARAVFHINQRRGFKSNRKTDKKDNDSGALKTAIKQLHAALDSSGAEGKPRTVGEYLHRREQAGQTVRARYRQQRVEKEDGKTRIDKSYDLYIDRAMIEAEFDALWAKQSELNPQLFNETARAELKDCLLHQRPLKPVKPGRCTLMPEEVRAPLALPSQQRFRIYQEVNHLYVLREGLKEEALTLEQRDRLVAALEEGGKSFKTAIPKLLGLPGTVKFNLADAKRTELKGNATSMELSKKQFFGSAWHEWSLRQQDAIVRQLINQESLGKLVKRLQKYCGIDEASAEHIAEKSNLVLGYGSLSRRALIKILSALRAEVITYDKAVLAAGFEHHSRLTNFGEIPNRTFDTGIERIDPKTGEVQNLHAFNELPYYGEFLQRHVAFAKDKPRNDEERFGKIANPTVHIGLNQVRVVVNALIKRYGHPSEVIVEVARDLKQSQDQRKEDNERQAKNQRRNERLRADAATILQTVPERVRHADIQKLILWEELSFDPADRRCPYSGAQISAQMVLSDQVEIEHILPFSQTLDDSLNNKTVAMRQANRIKGNRTPWDARADFEALSWPTAAMLDRAEQMPKNKRYRFGEEGYQRWLREDKDFLARALNDTRYLSRVAREYLSLICPHATRVIPGQMTAMLRAKFGLNDILGLNGEKNRNDHRHHAVDACVIAVTDQGMLQRFAQASASARERQLNRLVEGMPLPWGTEEDKRFQRSVKRAIDAIWVSHKPDHDYQSEIFDQTIYNAQGFSRSAAKVRSVIPFQARKNSPGERRHGESNGVPIAYKGLLSNSNYCVEIVRSNTGSWNGDVLATHQAYELARALRKNAPTCSAADVLASLRNEATGRSGESLVMRLTKGDPIRAEVSGVLETLQVLKINSSGSITFVRTNETNISGRYIAKLNARKLAAEGKVHDAIALNDTFFQMAFSADSLRNMKARPITISPIGEIRDPGFKE

SEQ ID NO: 400 - protein, 996 aa, unidentified
  REGION 1..996: note = Description of Unknown: Cas Enzyme sequence
MVRLNAVNDPCAVIKAGVRIFSDGRNPKDGSSLAVIRREARAMRRRRDRLLKRKARMLATLVVHGFFPLDAGERKALEILNPYALRAKGLDAALTGPEFARALFHINQRRGFKSNRKTDKKDNDNGALKIAIGKLRQTLLDDKCRTVGEWLHKRNLGGYTVRARFRQNKVLKEDGKTRIDKSYDLYIDRAMIEAEFDTLWAKQAVLNPSLFTEAAHAELKDCLLHQRPLKPVKPGRCTFLPDEERAPLALPTTQRFRIYQELNNLRILRDGLKEEPLTIQQRDALATALDCNSKRSFTQIKKLLGLGGAVRFNFEDPKRQELKGNTTNAVLGNERYFGKAWHEFDEATQDLIVNQLVREENEARLIHWLQDHTGIDETRAEAIANVGLPEGYGSLSEKALARILPAMRCDVVTYDKAVQAAGFEHHSDISAAATGEILPQLPYYGLPLQRHVGFGSGNPADTEEKRYGRVANPTVHIGLNQVRVVVNALISRYGHPSEVIVEVARDLKQNQEQRKEENERQAKNQARNSRLRAEVAKVLNISPERVRAADIQKMILWEELSFDPANRNCPYSGVQICVTMLLSDEIEIEHILPFSETLDDSLNNKTVATRAANRVKGNRRPWQAFGAQVVAGYDYSEILQRAELMPRQKRYRFAQDGYERWLKDDAGFLARALNDTRYLSRVAREYVSLICPQNTRVIPGRMTAMLRAKFGLNDVLAVNGEKNRNDHRHHAVDACVIAVTDQSLLQRFAQASASAREKQLNRLVEDMPLPWPSYREHVQRAVNSIWVSHKPDHSHEGGMHNDTAYSLLGNGRVSVHKTTDGIRERIIDNLKVIEFSSFKSAERHGVLPDGRPRPYKGYKGDSNYCIEIVRAEGGKYGWEVVSTFDAYQMERIHGHARLRDPALSMSGKPLAMRLVIGDYVRASFKGELRLLTVKKIKSNGGIFVAQHNEGNVRAREDAKDPSLIYGSFSAGTLQKAQGRFVTVSPIGELRDPGFKD

SEQ ID NO: 401 - protein, 1014 aa, unidentified
  REGION 1..1014: note = Description of Unknown: Cas Enzyme sequence
MGSLHYRLALDLGSTSLGWAMIRLDALQAPCAIVKAGVRIFSDGRNPKDGSSLAVTRRDARSMRRRRDRLLKRKARMQRTLIEHGFFPADEAQRKALETLNPYALRAKGLDTALTPAEFARVLFHLNQRRGFKSNRRTDKKDNDSGALKVAIGKLREALQTENCRTVGEWLNKRDVAGQTVRARFRQTKVQKDDGKTRIDKSYDLYIDRAMIEKEFDALWAKQEELNPSQFHDTARAELKDVLLHQRPLKPVKPGRCTFLPDEERAPLALPSTQRFRIYQEVNNLRILRDGLKEERLTLGQRDELVKALEENGKRSFLQIKKLLGIGGAVQFNFEDPKRQELKGNVTSAILSNARYFGDAWLSLPDSRQDEIVMQLVGEENEARLVRWLQDVTGVDEAHAEDIADAGLPEGYGSLSAKALGRILPELRRDVITYDKAVQAAGFEHHSHISPAATGEILPHLPYYGKALQRHVGFGTGKPEDSDEKRYGKIANPTVHIGLNQVRLVVNALIKRYGHPSEVIVELARDLKQSWEQRKEENQRQADNQQRNSRLRSSVAGTLQISEERVRSADVQKMILWEELSFDLADRRCPYSGVQISAGMLLSDQVEIEHILPFSDTLDDSLNNKTVALRVANRVKGNRSPWNAFGALSVAGYDYAGILMRAELMPKHKRYRFAEDGYQRWLKEDQSFLARALNDTRHLSRVAREYLSLVCPQNTRAIPGRMTAMLRGKFGLNDVLGVNGQKNRVDHRHHAVDACVIGVTDQGMLQRFAQASASARARQLNRLVEDMPLPWPTYREQVARAVSHIWVSHKPDHGHEGSMHNDTAYGLLGNGRVGFHKVVEGKRTYIQDNLKVIEFASSKGPQRHGVLPDGMPRPYKGYKGDSNYCIEIVCNEKGKWDGEIISTFEAYQIARVDGTTRLHDRHRSASGKPLVMRLIIDDYVKLEHDGVARVMRLAYANSAGTLALADHQEANVDKRTRAKELAYVFKTAGSLQKSNGRQISISPIGELKDPGFKG

SEQ ID NO: 402 - protein, 1016 aa, unidentified
  REGION 1..1016: note = Description of Unknown: Cas Enzyme sequence
MAALRYRLALDLGSTSLGWAMIRLNAENNPCAVIKAGVRIFSDGRNPKDGSSLAVTRREARAMRRRRDRLLKRKTRMTQCLIDHGFFPADEARRKALVTLNPYALRAKGLDEVLTPSEFARALFHINQRRGFKSNRKTDKNDNDSGALKQAISKLRSAMEDENCRTVGEWLHKRDVAGQTVRARYRQIKITKDDGKTKIDKSYDLYIDRAMIEAEFDALWAKQSALNSVIFNDLARDELRYCLLFQRQLKPVKPGRCTLMPDEERAPLALPSVQRFRMYQEVNNLRILRDGLLEEALLQQQRDQVIALLEKSRKVTFTKIRKMPGIGSHKFNLEDAKRTELNGNATSAELSKAAYFGEAWFSFDEAKQDAIVWQLVKEENIAKLVRWLQQETGVDEAHAEAIANAGLPEGYGSLCMKALDRILPELRRDVVTYDKAVIAAGFDHHSNISPAATGEILPELPYYGIPLQRHVGFGSGKIEDSDEKRYGKIANPTVHIGLNQVRVVVNGLIKRYGHPSEVIVELARDLKQSKEQRDEDNKRQADNQRRNARLRADIASVLSISPERVRAADIQKMILWEELSDNVADRRCPYSGVQISAAMLLSEQVEIEHILPFSETLDDSLNNKTVSMRQANRIKGNRTPWQARDDFAAQGWDYDSIIERAKQIPNKAKRDRFAEDALQRWLRDDKSFLARALNDTRHLSKVAREYLSLICPQNTRVIPGRMTALLRAKFGLNDVLGLNGEKNRNDHRHHAVDACVIAVTDQGLLQQFAKASASAREQQLNRLVVDMPLPWPNYRDHVQRAISNIWVSHKPDHGHEGAMHNDTAYGLLGNGRVSVHKMMAGKRERVEDNLKVIEFSDAKANARHGLLPNGQPRPYKGYKGDSNYCIEIVRNDKGKWDGEVISTFEAYQLVRLHGLARLRHPSLSVSGKPLVMRLILDDAVRIEVDGKVQTMRVATLSGNGQVFMAAIHEGNVDARNRDRSDPFTYISKTAGSFQKSKARRATISPIGELHDPGFKG

SEQ ID NO: 403 - protein, 1021 aa, unidentified
  REGION 1..1021: note = Description of Unknown: Cas Enzyme sequence
MLPKAPYRLALDIGSTSIGWCLLRLETDNTPKAIIRMGVRIFPDGRNPKDGTSLAVTRRNARAMRRRRDRLLKRKDRLLNALIRMGLFPQDEVQRKALVLLDPYSLRRKGLHELLTGPEFARALFHINQRRGFLSNRKTNKKDNDSGALKKAIKNLREKLNQENCQTLGEWLAKRHESRLSVRARLRGKTQKDKAYDFYADRAMVEHEFDALWAKQSALNPQLFTAVAGAELKEILLHQRPLKPVRPGRCTLLPDEERAPLALPSTQRFRIYQELNNLRLLTPDLREASLSLAQRDKIAKLLERQGEVRFTAMVKELKLPGTTRFNLEDIKRDRLKGNATAATLAKDINFGDAWFEFDPILQDDIVDMLLNEASESKLIEWLQANTSIDEATAERIANTGLPEGYGNLSREALSVVLPELIKDVVVYSEAVKRAGFDSHSVLSHSETTGEIMDELPYYGDPLRRHVAFAKENPRNDEERFGKIANPTVHIGLNELRKVVNAMIKRYGHPSEVVVEVARNLKMSRERKLEIQHEQKVKQDLNDKQVAEACSVLGLTQANLNRAKRRELSQKMQLWVELNAKNVADRQCPYTGEQISIQRLLSDEVEIEHILPYSMTLDDSLNNKTVAMRHANRDKGNQTPYDAFGKTPMPGYDYEAMLQRAARMPKEKAKRFAPDGYQRWLKEDKDFLARALNDTAHLSRIAKEYLSLICPYNKVRVIPGRMTALLRGKFGLNQLLSGTTEKNRNDHRHHALDAAVIGITDQGLLQRFAKASAHAREMQLDRLVEEMPLPWPTYREHVARGLEHIVISHKPDHGYQGAMHEETAWGLRGDGQVTRRVRPEDGGPRQREIRNKNVVAINSTNAPNRHGLDENDNAKAYKGYVGGSNYCIEIWRDEKGRWNGDVISTFQAYQTVRKLGETEGLKQLRSPSFSQSGQPLVMRLQKDDLVRMHLDDSVKAMRVVKIGGNGQIFFAAHNEANVDARNADREDSFVYISKVAGSLQKAKGRRITISEIGELRDPGFKG

SEQ ID NO: 404 - protein, 1024 aa, unidentified
  REGION 1..1024: note = Description of Unknown: Cas Enzyme sequence
MATMRYRLALDLGTTSLGWAMVRLNAENNPCAIIKAGVRIFSDGRNPKDGSSLAVTRREARAMRRRRDRLLKRKARMTHTLIAHGFFPADEVQRKELVTLNPYALRAKGLDEALAPAEFARALFHINQRRGFKSNRKTDKKDNDSGALKQAILGLRAQLDPLGADGKARTVGELLHRRYTNTAIPPEQRTVRARYREARVPREDGKTKINKSYDLYIDRAMIETEFDVLWATQAELNPSQFTPRARDELKDALLHQRTLKPVKPGRCTLMPEEERAPLALPSTQRFRMYQEVNNLRILREGLKEEPLTLQQRDTLIAALEANSKRSFTQIKKLLGVGGAVQFNFEDPKRQELKGNTTSAILSKDDHYGDAWFAFDEAKQDAIVLQLVKEENEAKLVRWLQDETGVDEIHAEAIANAALPEGYGSLCALALARILPELRRSVVTYDKAVLAAGFEHHSNISPAATGEILPELPYYGIPLQRHVGFGSGKPEDTDEKRYGKIANPTVHIGLNQVRLVVNALIKRYGHPSEVIVELARDLKQSKEQRDEESKRQADNQRRNTRLRANIAGVLGISPERVRVADIQKMILWEELSDNVADRRCPYSGVQISAAMLLSEQVEIEHILPFSETLDDSLNNKTVAMRQANRVKGNRTPWQARSDFEAQGWSHAGMLERAEQMPKAKRYRFAEDGVQRWLKDDAGFLARALNDTRHLSKVAREYLSLICPQNTRVIPGRMTAMLRAKFGLNDVLGLNGGKNRNDHRHHAVDACVIAVTDQGLLQRFAQASASARERQLNRLVETMPLPWPNYRDHVERAVDNIWISHKPDHGHEGAMHNDTAYGLLGNGRVSFHKVVDGKRERLEDNLKVIEFTNAKAGNRHGLLPNGEPRPYKGYKGDSNYCIEIIRNDKGKWEGEVISTFEAYQLVRAHGVKRLRHPALSVSEKPLVMRLIIDDIVKFEHEGQPRVVRIAYANSAGTIAFASHQEANVDKRTRAKELAYIFKTAGSLQKSKARRVTISPIGELHDPGFKE

SEQ ID NO: 405 - protein, 1019 aa, unidentified
  REGION 1..1019: note = Description of Unknown: Cas Enzyme sequence
MTKMPYRLALDLGSTSLGWAMVRLSVQQSPAPIAVIKTGSRIFSDGRNPKDGSSLAVTRREARAMRRRRDRLLKRKARMMRTLIQHGFFPKDEADRKALETLNPYGLRAKGLNEALTPEEFGRALFHINQRRGFKSNRKTDKKDNDSGALKTAISKLRTAMTEDHCQTVGEWLHKRDAAKLTVRARYRQQRVEKEDGKSRIDKSYDLYIDRAMIENEFDVLWRRQAEFNPALFNDIARDELKDCLLHQRPLKPVKPGRCTLLPDEERAPLALPSQQRFRIYQEVNHLRILREDLKEQDLTLAQRDELVASLAQNGKRSFTQIKKLLGLGGVMQFNFEDPKRQELKGNITSAILSKKDNFGLAWFDFDEAKQDAIVMELLTEENESRLVRWLQDETGVDEAHAEVIANAGLPEGYGSLSAAALARILPELRRGVVTYDKAVLAAGFDHHSHISHAATGEILPELPYYGEYLQRHVGFGTGRPEDPPEKRYGKIANPTVHIGLNQVRMVVNALIRRYGHPSEVIVEVARDLKQSQEQRKEDNERQAENQKRNERMRADIAAVLGTAPERVRRSDIQKMILWAELNPKNVADRRCPYSGVQISAQMLLSDQVESEHILPFSQTLDDSLNNKTVAMRQANRIKGNRTPWDARNDFAAMGWDYAGMLTRAEQMPKNKRYRFGEDGYEHWLREDKDFLARALNDTRHLSRVAREYLSLICPQDTRVIPGRMTAMLRRQFGLNDILGLDGEKNRNDHRHHAVDACVIAVTDQGMLQRFAKASADAREKQLNKLVEEMPPPWPNYREHVARAVGHIWVSHKPDHGHEGAMHNDTAYALLGGGRVRVRKLVEGVRVREESALKVIEFTSNKAGERHGLLPTGEPRPYKGYKGDSNYCIEIVRNDKGKWEGEVISTFEAYQFVRQHGLARLRHRKLALSGRPLVMRLLLSDTLRLEIDGVLRTMRVATLSGNGQVFMSDTAEANVDARNRDKADPFAYISKMAGSFLKAKARQVSISAIGELRDPGFKE

SEQ ID NO: 406 - protein, 1016 aa, unidentified
  REGION 1..1016: note = Description of Unknown: Cas Enzyme sequence
MATMRYRLALDLGSTSLGWAMVRLSAEDNPCAVIKTGVRIFSDGRNPKDGSSLAVTRRDARAMRRRRDRLLKRKTRMTNTLVRYGFFPADDAERKALVTLNPYALRAKGLDQALTPAEFARALFHVNQRRGFKSNRKTDKKDNDGSALKVAISKLREVMRQENCRSVGEWLHKRDAGGETVRARYRQTKVTKDDGKTRIDKSYDLYIDRAMIEGEFDALWAKQAQLNPALFTNNARDDLKDVLLHQRPLKPVKPGRCTLLPEEERAPLALPSTQRFRIYQEVNNLRILREGLKEEPLTLKQRDYLITALEGHSKRSFTQIKKLLSIGGAVQFNFEDPKRQELKGNTTSAILSRSDHFGDAWFSFSEAKQDAIVLQLVKMENEATLVRWLQAETGIDESRADAIANAGLPEGYGSLSALALARILPELRSDVVTYDKAVLAAGFDHHSNISPAATGEILPALPYYGIALQRHVGFGTGKPEDSDEKRYGKIANPTVHIGLNQVRLVVNALIKRYGHPSEVIVELARDLKQSKDQRDDESKRQADNQRRNARMRTDIANVLSISPERVRTADIQKIILWEELSFDPADRRCPYSGIQISASMLLSEQVEIEHILPFSETLDDSLNNKTVAMRQANRIKGNRTPWQARDDFAAQSWNYAGILNRAEQMPKGKRYRFAEDGLQHWLKDDAGFLARALNDTRHLSKVAREYLSLVCPQNTRVIPGRMTAMLRAKFGLNDVLGLNGEKNRNDHRHHAVDACVIAVTDQGLLQRFARASASAREQKLNRLVENMPLPWESYRDHVQRAIERIWVSHKPDHGHEGAMHNDTAYCLLGNGRVSVHKMVEGKRERIEDNLKVIEFTSSKSVERHGLLPNGQPRPYKGYKGDSNYCMEIVRNEEGKWEGEVISTFEAYQLVRRHGVARLRHPRLSVSGRPLAMRLILDDAVRLEVDGQLRTMRVATLSSNGQVFMSDAQEANVDARNRDRNDQFSYISKMAGSFQKAKARRVTVSPIGELKDPGFKE

SEQ ID NO: 407 - protein, 1053 aa, unidentified
  REGION 1..1053: note = Description of Unknown: Cas Enzyme sequence
MAISGAYRMALDLGSTSLGWTMFRIRQDPHLGTIPTAIIRSGVRIFSDGRNPKDGSSLAVTRRAARAMRRRRDRLLKRKSRMLGQLVRHGFFPADEAARKALERLNPYQLRAKGLREALTPGEFARALFHINQRRGFQSNRKTDRKDNDSGALKQAIHQLRERMTASGCRTVGEWFWQVRMQQKPEGVAGQGVRARYRETPYTSNEGKKRIDKSYDLYVDRAMIAQEFDALWAAQAALQPALFTEVARADLRNTLLHQRPLRPVRPGRCTLLPDEERAPLALPSTQRFRILQEVNHLRLLDGTLREVPLTLAQRDAVVAALEAKNKLSFDQIRKLLKLSGSVQFNLQDAKRTELKGNATSAALARKDLLGAAWAGFAPELQDEIVWQIVNEEGEGTLIAWLQQHTGVDEARAEAIANVALPEGYGSLSRKALARTVPELQRDVITYDKAVQAAGFAHHSDLGFDFDHNSDEVEQVGERTIASTGEIKPVYAFKELPYYGRALQRHVAFAKDNPRNDEERYGKIANPTVHIGLNQVRVVVNALIRRYGRPAEIVVELARDLKQSREQKQEAQKKQAENQRRNARIRERVAETLGISTERVRASDIQKWILWEELSFDVADRRCPYSGVQISAAMLLSEQVEIEHILPFSQTLDDSLNNRTVAMRQANRIKRNRTPWAARVDFEAQGWSYEGILQRAERMPLRKRYRFAPDGYERWLGEDKDFLARALNDTRYLSRVAAEYLRLVCPGSATRVIPGQMTAMLRNKFGLNDVLGLDGEKNRNDHRHHAVDACVIGVTDQGLLQRFAQANAQTREGGLTRLVENMPLPWDTYRDHVERAVRHIWVSHKPDHGFEGAMMEETSYGIRKDGTIKQRRKADGSAGREVANLIRIAEPAQPARHGVDDEGRPLPYKGYVGGSNYCIEITRNEKGKWEGEVISTFDAYRIVRAAGEGDAGWRQLRHARLGQNGKPLVMRLVIGDCVRLQLRDREEVMRVVSVNSAGRLTLAAIHEANVDKRNADKTDPYSYTYKNAAPLQQAMARRVSVSPMGELRDLGFQG

SEQ ID NO: 408 - protein, 1031 aa, unidentified
  REGION 1..1031: note = Description of Unknown: Cas Enzyme sequence
MAKMRYRLALDLGSTSLGFALLRLDEASNPCAIIKAGVRIFSNGRDPDGNSLAVTRRMARAMRRRRDRLLRRKARMMHLLIEHGFFPKDPEARKALETINPYELRARGLDESLTPEEFARALFHLNQRRGFQSNRKTDKKDNDNSALKSAIKRLRDALAEGQGRTVGELLFRRMQTGQTVRARYRESKALKPDGKTKIDKSYDLYIDRAMAIDEFEALWSKQASLNPDIFCAAAYHELKECLTKQRPLLPVRPGRCTFMPEEERAPLALPSTQRYRMYLEANHLRILREGLHEEVLTLTQRDALVQALEHNPKRTFVQIKALLGLKGAVQFNFEDPKRQELKGNITNAILSKPGHFGQSWFTFDEAKQDDIVSRILSEEDESALIKWLLLETGVNEAQAEAIANVGLPEGYGSLSRKALARIVPALRQEVISYDKAVQAAGFEHHSQLDASAIGEQHPTLPYYGEALQRHVSFGTLDANDPDEKRFGKIANPTVHIGLNQVRTVVNDLIKRYGHPSQVVVEVARDLKQSRQQREETNKRQADNQKRNARIRQEVAEASNGSISPERVKVADIQKWILWEELNENDVLNRCCPYSGARISALDLLSSDGRVEIEHILPYARTLDNSLNNKTVSMRWANRIKGNKTPAEAFGQNQVESCNYEAILKRAEQMPKGKRYRFAMDAMERWDKEGNGFLARALNDTRYLSRITREYISLICPHATRVIPGQMTALLRHQFGLNGILGLRGEKNRNDHRHHAVDACVIGVTDQKTLQELSNASKRGRDQHIMDWAESMPDPWPTYREQVKRAINHILVSHKPDHSHEGAMHNDTAYSLLGNGRVGVHKLVDGKRTLVEDTLKVIEFDYAKAKHSTNEPWFDSDHNHRSGAYKGYKGDSNYCIEIVSNDKGKWEGEVISTFDAYQLVRKERNAGRDGVSRLRHPTLSLSGKPLVMRLIRDDYVKLETDEGMKLMRLAKLAADGRMFWVEHNEANESARARDKEDAFTYTVKTPVGLQKAKGRRVTVSPIGELRDPGFKG

SEQ ID NO: 409 - protein, 1042 aa, unidentified
  REGION 1..1042: note = Description of Unknown: Cas Enzyme sequence
MRKGGTMLRYRLGLDLGTNSLGWSIVALGDTGEPTRLEGLGVRIFSDGRNPKDGSSLAVMRRGPRQMRRRRDRYLRRRERFMQALIDHGLMPADAPERKTLESLDPYFLRTRGLDEKLPLFELGRALFHLNQRRGFQSNRKTDKRRDDDTGKIKQAIAAFREEVKGRARTVGEALQLRRLEGKPVRARTVGEGAKASYELYVDRALIAEEFDALWKAQQRFHDARPSDKARDYLRATLLHQRELRPVRPGRCTLEPNEERAPNALPSAQRFRLYQELNNLRVALPGEFERPLTLEERDTLAQDLDRREKADFDRLRKLLRLPDGAAFNLERNRKAVLGNATGYRLAGKRAFGKRWHDLQPQEQDEIVSLLLDEPSEEKVMHELSARWKLSHEQAQAAADTRLPDSFARLGRTAIAKVLPELRKAVVSYSDAVAAAGYASHSQLGTGELLERLPYYGIVLERHVAFGSGDPSHGDEKRYGRIANPSVHIGLNQLRKLVNALIERYGRPAEVHIELTRELKLSRERKEVIEEQNKRNRERNEVLAAKLRDLGQAVNAENLQRLKLWEELNPANPADRRCAYTGEQISIGRLFSPEVEIEHILPFERTLDDSMDNKTVSVRRANRDKGARTPHEAFSYSPPGYDWQEILARAANLPVRKRQRFSETALADFLRGQDFLARQLTDTAYLSRAAREYLSAICPENRIVSLPGRLTALLRGKWGLNRLLSDADRKDRSDHRHHAIDAVVVAATDRGMLQSLATASARARELGLQKLVERMPKAWEGFHEQLAAKIRRVVVSHKPDHGPEGALHNETAYGILAGPDKKDRFEVRYRLPVSSLTTRERIEAVRDAPIRAELLSLIEKTPQKEFRGALADFSRTRGMRHVRINETLSVIPVRDRNGKVYKAYKGDSNYCYEIHRDERGRWDGRLVTTFLANQKLYKDFRADNGRFRTQTFEGEPLVMRLCIDDALAIEDNGARRIMRVVKQSEGMITLAEHFESGNLKERDKDDADPFGYLYKAPNALRELKARRVFVDPLGRVLDPGFKG

SEQ ID NO: 410 - protein, 1118 aa, unidentified
  REGION 1..1118: note = Description of Unknown: Cas Enzyme sequence
MAAYRIGLDVGTNSIGWSVLELNGAGEPCAVRDTGVRIFNDGRDEKSKATLKADRSEARSARRRRDRFKQRQTFLLTFLTKSKLFPEDESKRKNLQLLNPLELRAKALSEKLEPYHIGRALFHLNQRRGFKSNRKDRSEETTSGKVSYSVRMLLEEMHLIDPPMPPEEYRRLSKADKKLARQDEAENRNRALEKLASQSKLTYGSFLRQRQQDGKQTRARLGAGDNGKFYDVYPTRELYEDEFKKIWNAQARHHPALMTDEVRERVRHIIFTQRPLKPLQRGQCQFLPNEKRTFRAMPSFQRHRIYQEINNLEWTTSSHKHSLKDYREARDEIVRMMERPSLKEKPTHKNAQVSFHKMKQLLKEMDLAEGNFTFNFETPKRKDFDGNQTSNIMQHEDYVGKAWHDWPLEKQDDFIALILDDEKTDDEVQNVLVTDYSLSEYAATSCMNAPLIEGTASLSLKAARLLMQKMRGSYLIQSDATIAVAREVDEFVNPFLRASEGELLSKLPYYGKAFSDGRHIIPGDRQEADKHDDLKYYGGVTNPTVHIALNQIRHVVNELIRRYGHPTSIAIELARDLPAGKERRAAINKEQADNQMKNEELDKQLLERGQTINPDNRLRLRLWQELDENDPNGRRCPFSGKKIGKADLFSDAIEIEHLIPFSISLDDSRNNKVICTRQANRDKNNRTPFDAFGNSPAGYSWDKIFERSKQLPKAKQWRFQKDANEIWKRDYSDFTERHLNDTRYIGRLAKEYLENICPFNKIDVLTGRLTSLLRSHWGLNNVLHDRNQERKKNRDDHRHHAIDAIVIGMTSRAMLQKVSTAANRAEELNLTRLFEKGSNGKSPIDPWPGFRDHVKTVVDNIVVSHKPKRKPVDKNSTDGQLHNDTAYGIISGPDRKGTSEVVVRKPIKDFKNRLDVLAIRDKHLRQKFLQAFDTEGAAGVARLAWDKKIRHLRRTKILSVIPIMDKFGKAYKAYKGDSNWGMEIYEYPKGHPKAGNWDGKVISRFEANQKDFRLGQPNSPHPAARLIMRLQIGDCIEIEQGGLKQIMRVQKLSKPGRLDLAPHNEANVDARNRDNDDPFKYVNIADGKLKERNARKVHVSPAGRLSYEQRRKPRRKKE

SEQ ID NO: 411 - protein, 1116 aa, unidentified
  REGION 1..1116: note = Description of Unknown: Cas Enzyme sequence
TKATLAATRRQARSARRRRDRFKQRQRFLLSTLTQAGLFPESEADRKNLQEQDPLRLRAKALTQRLEPWKVGRALFHINQRRGFKSNRKDQSEEGKSGGKVSKSARLLLEQMGLIDPEISSEEYKKLSSDGKRQVRQQEATARIEALKKLEEEKELSYGSFLYQRQNEGKPTRARPESAGDKGELYDIYPTRELYEDEFSKIWQAQERHHPGLMTEAVKERVRRAIFHQRPLKPQKRGKCTYMPEEDRAFRAMPSLQRYRIYQEVNSLEWSDESGEKKLLRDFPPARDAIINLLEKPSVKNGRVTFGTMKKEIKKQGIAEGNFKFNFETEKRKGLDGNLASKLMQDEDRIGKEWHNWPLEKQDELIDIILNGTPAQQKRDREWLEGGGKSPPRTGALDDEEVCDYLMQHFELGRTVAESCLNASLEDGTANVSLRAARLMLEKMQGRIVDCETGEISLPLQSEAASAVAQEVDKFIDPMRTRGDDGKYLSLEKLPYYGEAFSDGRHIIPGTGCPEDDDKTRWGGVTNPTVHIALNQIRLVVNELIERFGHPQSIAIELGREFPLGAEKRREIEKEQSANQKKNEELDNTLRKYKQKENAGNRLKLFLWQQLDEGPTGRCCPFSGDSIGICDLFSGNIEIEHLIPFSRSLDDSRANKVVCTRQANREKGNQTPHEAFGHSPDGYDWQQIFARAESLPDSKRWRFKPEAMEIWNREEGGDFTSRHLNDTRYIGRLAREYLENICDIDRIDVVTGRLTSLLRRHWGLNSVLDDRTDRKNRDDHRHHAVDAIVVAMTNRSLLQKMAKKARELEKLDQDPARNLDRYFPPVDGKKSAIDPWESFRSDVADVVERMVVSHKRCRKELRGESTDGQLHNDTAYGIVRELKGDKHEVVSRKPVTGLDDLKKIKKIRDTKLREKFNSAFVAAEKNEKGTGKKAVKELANNLKIRRLRCMETLSVIPISGQDSENPYKAYKGDSNWGVEIYSLPSGHKNAGDWKAVTISRFDANKKDFKPGETFRPHPAARLVMRLQIDDCVEMLESGSEERKLYRLQKFSQNQLTFVEMHEANVDKRHRSKEEEFKYSSIGAKTMKLRQAMKVHISPTGRISYEQRRSGRRRQQQ

SEQ ID NO: 412 - protein, 1065 aa, unidentified
  REGION 1..1065: note = Description of Unknown: Cas Enzyme sequence
MLGKMRYRLALDLGSTSLGWAMIRLNVEDRPCAVIRAGVRIFSDGRNPKDGSSLAVTRRNARAFRRRRDRLLKRKARMLRTLVEYGFFPANEAERKGLANLNPYRLRAEGLDRALTPTEFGRALFHINQRRGFKSNRKTDKKDNDSGALKSAIKKLRELLQAEKCRTVGEWLNKRDLAGQTVRARYREQRVLKEDGKTRLDKSYDLYIDRAMIEAEFDALWAKQAELNPALFTDSAGADLKDVLLHQRPLKPVQPGRCTLMPEEERAPLALPSTQRFRLYQEVNNLRILRDGLREEALSLAQRDAVISALERNGKRTFTQIKTLLHLGGAIQFNLEDAKRTELKGNTTSAILSKAEHFGPDWFGFDEARQDAIVLQLVKEENEAKLIRWLQDETGVDEARAEQIANVGLPEGYGSLCQKALARILPKLREEVVPYSDAVKAAGFEHHSMLDKPREIPGKTFKLEAVDADTGEIRLFHVFHELPYYGEHLQRHVGFGSGKPEDVPEKRYGRIANPTVHIGLNQVRKVANALIERYGHPSEVIVEVARELKQSKNQRDEENKRQTENQNRNNRLRKDVAGILVIGEERVKRADIEKMILWEELNPRDAADRRCPYSGVQISARMVQSDEVEIEHILPFSQTLDDSLNNKTVALRQANRIKGDRSPWDAFGKQPVPGFDYAGILERAENMPKGKRYRFGEDGYQRWLKEDKDFLARALNDTRHMSKVAREYLSLICPNTRVIPGKMTSLLRGKFGLNKVLSLDGEKNRNDHRHHAVDACVIGVTDQRLLQRFAKASSSAREQQLGRLVETMEIPWETYREHVQRAIEAIWVSHKPDHGFEDSMFKATCYGINHDGSIIQKKTQEGKKERVVDYIIPLSEPSQPLRHGVNASGEPRAYKGYAPDGNYCMEIIRDSNGKWATEVIPTYSAYRIAKELGWGKRPQDEVLSQMNTKKLAQNEGELVMKLMRGDAVRVNYKGEDRILHVVKMSVEGGATFTELTEANVSGRYISKLAARKKYKAGATLSRDEQAALSDNFLLSQIGADELRKGKARRVSISPVGELRDPGFRE

SEQ ID NO: 413 - protein, 951 aa, unidentified
  REGION 1..951: note = Description of Unknown: Cas Enzyme sequence
DHQLTLFELGRALWHLGQRRGFKSNRIVDGADDADVDDVSAMKDAITEMESALQEGDARTVGEWLAGRRDKGLPTTIRPRVVKNKAEYDFYFDRSMVEHEFDMLWDSQRQFYPDVLTDAHKDAVHHAMFFQRPLKEVDPGLCTFEWENNEKRAVKALPTMQRFRLLQELRNLRIINAQLESVPLDDAQMQVLMERLLAQKEVSWAGMRRALKLPKDTEFNFQRGKRKGLDGDVTSVALRKPERFGDGWDTLSLDQQDRVVGELYTNPNVDEVVGWLSQEFGLTEDAARETAGYVVPRGYARISRTAAMKIVPLMEEGCSYHEAATEVYGSHSALTFSQETGELLDELPHYADVLGSRVPPPKNGEKHGRITNPTVHIVLNQIRQVVNDFIRQYGVPQEIVVETTRDLSLSADDRQEITQAQKKRQKWNAKVTERLHKELKIVASRDDLQKFRLWEELAPNEEDRCCPYSGKRITLQGLFSARVEVEHILPFSRTLDNSIRNKTVSYKTANKDKDERTPYEAFHNNANGYRYDEILVRASALPRGKQWRFTSDAMDIFLRSNETFLDRSLNDTAYASRLAREYLSCLTPNVWVVPGHTTGLARRLLDLNSLLSDTDEKNRNDLRHHALDAFVIGIIDRSTLQKFAAANKQKKGNPDTFPLPWPTYRERVNESLQAINVSNKPDHSHHRQMSNETIYGLRSEGKVAIRKPLTVFIPTSAQEKKNITAADLITRATFADKPLQQKLLNYVTNHPGTNAEAIADYTRDHGTRRVRLIEKITVIPINGDRRATSHTSWQGPHGEPSGVKGDSNYCLDITVTNKNTWTGTRKTTMDAYQMTDEERHHPPAEVIWRIHRGDIIHLNTPTGPQLMRVCTLNGTKVNLAPLHEGNVDKRNRDPNDPFKYTQKSAIGLQKADARPATISPTGRVHTHPHPTKNITNTPTTTPHHPNFHPRT

SEQ ID NO: 414 - protein, 1034 aa, unidentified
  REGION 1..1034: note = Description of Unknown: Cas Enzyme sequence
MARVLGLDIGIGSCGWAVVETPEIDEATGKVQGEAAIVACGTRCFDVPEEPKTKELKNKTRRLLRGQRRVLRRRRQRIAQIRRLLATHGLPADPGPLPAGAPGDLVWRLRAQGLDRRLEPAEWARVLIHIANHRGFKSNSKRDRGNKSESGKMLKAIAATGQKLADWRSFGEMLARDPDFAARKRNRTGEYALTPLRADLEREVARLFEAQRRLANPASSPALEAAYRELAFAQRPVAAREPPVGRCAFLEGEKRAPRHAPSFERFRFLAKLATVKVIPMGERPRFLTDEERPRAIGLLGRQELVTYKALRNALELPPSTVFADLPQRKADPESAPFARFDGTLALREGLGKRRFTELLRSAPEKLDAAMEALVWLDDLDQIRARLAASGLDPADVAALTGDEALARFAGFKGAGHISTAACRALIPHLEHGRGYAEACAALGWDHAKAGVPRIEEVANPVVRKILRECTRQIAVVLAEHGPVDAVHLEMARDVGKSAEERNEIRKGMDERAAQRDRHREEFRKLLGHAPNDEELLRYELWKEQNHRCPYTFPDEAAYIPPECLLATDNRVQVDHILPYSRSGDDSFRNKVLCYVRANQEKRRRTPYEWLGDDPQRWRLFEARIAGLADMHHQKRRKLLMRTFADREQAYRARHLQDTRYAMRVLRFALEAQFPTDARRRLFPRPGAITALLRRAWGLDELKKGGALGDRDHALDAIVVAFTTESLLNRLTRLHQELEEIGSGRATPLVETPLGSSPQARERFRQMVKAAAEGVFVSRPETRRGRGPAHDATLYGFERTPEGQEIQYERKNVWELKAADLDRLKGDPARHRVLREVLGAWLQRAEERRVKPEKLWREEPPRLPNGPPVRSVVLVRAKTTAGVKLQRGNALAHADQASMVRVDVFTKGGKFFLVPIYAWQVAKLETPPFLAIKSLADEDGWYPIDDTYAFLWSLYPGSFIKAVNRKGERFEGYFRSLDRSNGRISFSPPGNGDSKAQERFTTKTLQVFEKYHVDRLGRLHRIEREPRLWHGAVCS

SEQ ID NO: 415 - protein, 1047 aa, unidentified
  REGION 1..1047: note = Description of Unknown: Cas Enzyme sequence
MVECLKYRLGLDVGTNSLGWFMVWLNDANEPIGLGPGGVRIFPDGMTNDKKASNAAERRIARGQRRNRDRYLERRGALMSAMIDGGLMPNDEAARKALVDLDPYDLRARAITEKLPLHHIGRALFHLNQRRGFKSNRKSDGANDEKGAIKEASSRLREAMAEENAQTLGTFLNGMHREREGVRVRNTSSGNKATYDFYPTRDLLADEFEAIWHEQSKHHPQLTDAVRERVFDTIFFQRPLKSPPIGKCTLDPAKSPDDADGFRLAKAHPLSQRFRIWQEVRNLTVGETGSTPRDLTKEEADIIALALIQSNTVTFDKMRKLLKLPEGAHFNLESERRKELLGDQTAKRLGAKKLFGKTWRGFPLERQMEIVERLLSEQNEETLIEWLMFETGVDRELAEQIADTPLPDGYGRLGRRAISAILPHMEGGLRYHEAAEAAGYDHAKRPTGEILDYLPYYGEWLQDQVVGTGDPRDRPESRWGRFPNPTVHIGLGQIRRVVNALIKKYGPPEQIVVELARDLKNSKKRKDEIEKEQKANQRKNDHRREKIEAEGHRPNHDSLLRLRLWEELNEKDSLDRRCPYTGEAISIKRLFSADVEIDHIIPFQSCWDDSAANKTVCMRDANRAKGKQTPHEAFGHSPNINGRPYDWGAIAALAASLPKNKRWRFEPGALERFKEIGGFEARQLMETSWLARLTREYLSCITNPKEVWVTPGRLTAMIRAKWGLNTLLPDHKFTNAKNRADHRHHAIDALVICLTDRGLLQRMSGAYDDDRQKIGVPDPWEGFRGQLDDALQSMIVSHKPEHGHEAKLHEASAYGLNKNRQEGEGNLVYRKALTGLNENEIDRIRDPEIREALTTWLAETKDAETKLADALATFGERTDLPFAPRGIRHVRLTKKEKPEYLVPIKDKEGAAYKAYSSGENLFVELYETSDGKWHGEPVTVFQANQKGYEPGWHSQFPEAKFIMRIYKGDLLKIHHDGLEKIVKVVRLSPSNNIFYLVQHNEAGSFPARHSNTDDPFRWVFGSYGKIKEWDATLVRVDELGTVWKFQP

SEQ ID NO: 416 - protein, 933 aa, unidentified
  REGION 1..933: note = Description of Unknown: Cas Enzyme sequence
MIRLNQNNEPVAIIKAGVRIFSDGRNPKDGTSLAVNRRNARAMRRRRDRLLKRKARMMQALIEHGFFPKDETERKALERLDPYALRAKGLDDALTPAEFARALFHINQRRGFKSNRKTDAKESDSSVMKSAIHSLRALLANGEARTVGEWLHQRSRAGEPTRARRREKITTNEDGRNKREVSYDLYVDRTMVEQEFDALWAKQSALNPAIYTHAIGAELRDILLHQRPLKPVRPGRCTLIPTEERAPLALPSVQRFRIYQEANNLRILGRGLESMPLAKDQRDKVVDALERNGKQTFTQLKKLLALGGGATFTHEDVKRTELKGNGTSAALSKTNHFGKRWFTLDSALQDEIVTRILTEESEVALVNWLVAATGVDEACAERIAQVGLAEGYGSLSRAALARILPELARDVVTYDKAVIAAGFEHHSNLNPAATGEILPELPYYGEPLQRYVGFADPRATESDPPEKRFGRIANPTVHIGLNQVRKVVNALVHKYGHPAEVIVEVARDLKQNKEQRDEESKRQRANQDRNNRYRSLIATQLGIAEEKVRRDDMQKVLLWEELNLGDPLNRKCPYSGVSISLGMLLSDAVEIEHILPFSMTLDDSLNNKTVATRRANRDKGNATPWQAFGERSVSGYDFGDILDRAELMPKNKRYRFGKDGYQQWLREDKDFIARALNDTRYLSRVAREYLRLICPGARVIPGQMTAMLRGRFGLNSVLGVDGEKNRNDHRHHAVDACVIGVTDQGMLEKFASASASARGKHLSRLVEAMPEPWPNYRAHVERAVNAIWVSHKPDHSYEGAMHNETAYGLLADGLVRHYKVVDGKRERTVEPLKVLPMSSHQGRHRHGLGDDGAPRPYKGYKGDSNYCIDIVRNEKGKWDGEVVSTFSAYQIVRTEGVSRLRDSRLSISGKPLVMRLIVNDYVRLNVNGVLRTM

SEQ ID NO: 417 - protein, 1013 aa, unidentified
  REGION 1..1013: note = Description of Unknown: Cas Enzyme sequence
MQKMRFRLALDLGSTSLGWAMVRLDASNIPCAVIKAGVRIFSDGRNPKDGSSLAVGRREARAMRRRRDRLLKRKNRMTATLIEHGFFPKDEAQRKALADLNPYALRAKGLDHALTPGEFARALFHINQRRGFKSNRKTDKKDNDSGALKTAISKLRASMAQDNCRSVGEWLYRRDATGQTVRARYRQTRILKDTGKNAIDKSYDLYIDRAMIEAEFDILWAKQASFNPNLFDDIARDELRFCLLFQRPLKPVKPGRCTLMPDEERAPLALPSTQRFRMYQEVNNLRILRDDLREDSLTLAQRNTLIDALERNNRRTFTQIKRLLNLPGGVKFNFEDPKRQEFKGNSTSASLARPEHFGEDWFGFDEVKQDAIVWQLVKQENEATLIRWLQAETGVDEARAEVIAQTALPEGYGSLCVQALSRILPALRQSIVTYDKAVVLAGFAHHSNISSAASGEILPELPYYGLAMQRHVGFGTGKLEDSDEKRYGKIANPTVHIALNQVRVVVNALIKKYGHPSEVIVELARDLKQSKDQRDEDSKRQGENQQRNRRYRQDIAGILGISEERVRTADIQKMILWQELSHEPADRRCPYSGEQISATMLMSDEVEIEHILPFSETLDDSLNNKTVALRRANRIKGNRTPWQASADFAQQGWQFANILARAENMALAKRYRFAEDGLARWLKEDAGFLARALNDTRHMSRVAKKYLSLICPQNTRAIPGRMTAMLRAKFGLNDVLGHHGEKNRNDHRHHAVDACVIAVTDQGLLQRFAAASASARDRQLNRLVDDMPLPWPSYYNHVKRAIECIWVSHKPDHGYEGAMHNDTAYKLLGDGHVSVRKIVDGERKQIKEKLRVIEFVSTTSLRHGKLEDGSPKPYKGYKGDSNYCIEIVRNELNKWVGEIVSTFDAYEVVRRYGVARLRHPELSAKGNPLVMRLLRDDIVRIVVDGELMTLRLCTVNSAGNMALANPRESNVDARCRAKELAYVFKTAGSMQKVFARKVTVSPVGELHDLGFRG

SEQ ID NO: 418 - protein, 1019 aa, unidentified
  REGION 1..1019: note = Description of Unknown: Cas Enzyme sequence
MSGMRYRLALDLGSTSLGWAMVRLNAANEPTAIPKAGVRIFSDGRNPKDGSSLAVTRREARAMRRRRDRLLKRKSRMLRTLVEHSFFPVDEAQRKALETLNPYALRAKGLDAALTPAEFARALFHINQRRGFKSNRRTDKKDGDSSALKTAIRQLREALQAENCRTVGEWLHKRDAGGKTVRARFRQAKVQKDDGKTRIDKSYDLYIDRAMIEAEFDALWAKQAELNPVLFHEAARAELRYVLLHQRPLKPVKPGRCTLLPDEERAPLALPSTQRFRIYQEANNLRILREGLKEEALTLQQRDALVSALEANSKRSFVQIKKLLGIGGAVQFNFEDPKRQELKGNVTSAILGKAEYFGKAWFKLTEALQDEIVQQLVSEENEARLVRWLQDATGVDESRAEAIANAGLPEGYGSLSNQALTRILPELRRGVVVYSDAVQAAGFAHHSHIGAAVDGEIHACLPYYGKPLQRHVGFGTGDPDDSDEKRYGRIANPTVHIGLNQVRVVVNALIKRYGHPSEVIIELARDLKQSKEQRDEESRRQADNQRRNQRLRTSIAEVLQISAERVKAADIQKMILWEELSFDPAERRCPYSGVQISAHMLLSDQVEIEHILPFSRTLDDSLNNKTVALRTANRVKGNRTPWDAFGAQSAAGFDYASILARAESMPLHKRYRFAEDGYQRWLKEDQSFLARALNDTRHLSRVAREYLSLICPQNTRVIPGRMTAMLRAKFGLNDVLGLNGEKNRNDYRHHAVDACVIGVTDQGMLQRFAQASASAREQQLNRLVDDMPLPWPNYREHVMRAVNHIWVSHKPDHGHEGAMHNDTAYGLLGNGRVSVHKNVDGQRILIKDNLKVIEFSNPQASARHGLLPDGSPRPYKGYKGDSNYCLEIVRNDKGKWEGEVISTFEAYQLVRAHGTDGIARLRDRHLSASGKPLVMRLVIDDFVRLSIDGTLRTMRLASVNSAGRLTLADHQEANVDARNRDTQGDWRYTYKQAGSLHAAQGRRVTISPIGEVSDPGFKA

SEQ ID NO: 419 - protein, 1019 aa, unidentified
  REGION 1..1019: note = Description of Unknown: Cas Enzyme sequence
MKYRLALDLGSTSLGWAILRLNADTPPAPVSVIKAGVRIFSDGRNPKDGSSLAVTRREARAMRRRRDRLLKRKARMMRTLIEHGFFPKDEAARKALETISPYGLRAKGLDAALMPEEFARALFHINQRRGFKSNRKTDKKDNDSGALKSAIKQLHAILDQSGTDGKPRTVGEYLYRREQAGQTVRARFRQQRVEKEDGKTRIDKSYDLYIDRAMIEAEFDALWSKQSALNPQQYNEKARAELKDCLLHQRPLKPVKPGRCTLLPEEERAPLALPSQQRFRIYQEVNHLHVLREGLKEEALTLEQRDRLVEALERNGKRSFIQIKKLLGLGGVVQFNFEDPKRQELKGNTTSAILSKKEHFGDAWFGFTSEQQDSIVRQLVTEENETRLVRWLEAEAGVDEARAEAIASAALPEGYGSLSAKALARILPELQREVITYDKAVLAAGFEHHSHISHAATGEILPALPYYGEYLQRHVGFGTGNEKDAPEKRFGKIANPTVHIGLNQVRVVVNALIRRYGHPAEVIVEVARDLKQNQEQRKEDNERQAKNQKRNKRLRAEAASILQIAPERVRHADIQKLILWEELSFDPADRRCPYSGVQISANMVLSDQVEIEHILPFSQTLDDSLNNKTVAMRQANRIKGNRTPWDARLDFEAQGWSTTAMLDRAEQMPKNKRYRFGEDGYQRWLREDKDFLARALNDTRYLSRVAREYLSLICPQATRVIPGQMTAMLRAKFGLNDILGLDGEKNRNDHRHHAVDACVIAVTDQGMLQRFAQASASARERQLNRLVDDMPLPWPTYRDHVARAVNHIWVSHKPDHGHEGAMHNDTAYALLGNGLVSVRKSVDGVRQKETAALKVIEFSNTKASTRHGVLPDGSPRPYKGYKGDSNYCIEVVRNEKGKWEGEVISTFEAYQLVRRFGLQRLRHPTLSVSGKPLVMRLINDDTVRLELDDGLRTLRVAKIGGNGQVFMAPHNEANVDARNRDKDDSFQYTSKMAGSFQKARARRVAVTPIGEIRDPGFKE

SEQ ID NO: 420 - protein, 1023 aa, unidentified
  REGION 1..1023: note = Description of Unknown: Cas Enzyme sequence
MPQKMRYRLALDLGSTSLGWAILRLNSDTPPAPVAVIKAGSRIFSDGRNPKDGSSLAVTRREARAMRRRRDRLLKRKVRMIRTLIEHGFFPADDVARKALETLSPYSLRAKGLDEALKPEEFARALFHINQRRGFKSNRKTDKKDNDSSALKSAIRQLHAALDASGADGKPRTVGEYLYRREQAGQTVRARYHQKRIEKEDGKTRIDKSYDLYIDRAMIEAEFDALWAKQSTLNPQLFNEAARAELKDCLLHQRPLKPVKPGRCTLMPEEERAPLALPSQQRFRIYQEVNHLYVLREGLKEDALTLEQRDRLVDALERNGKRSFTQIKKLLDLGGVVQFNFEDPKRQELKGNITSAILSKKEHFGDAWFDFAPVQQDAIVSQLVSEENETKLIRWLEAETGVDEARAEAIATAALPEGYGSLSAKALARILPELRRDVITYDKAVQAAGFEHHSHISHAATGEILPELPYYGEYLQRHVGFGSGNSTDTPEKRFGKIANPTVHIGLNQVRVVVNALIKRYGHPSEVIVEVARDLKQSQEQRKEDNERQAKNQRRNERLRGEVAAVLQISPERVRHADIQKLILWEELSFDPADRRCPYSGVQISAQMVLSDQVEIEHILPFSQTLDDSLNNKTVAMRQANRIKGNRTPWEARLDFEAQGWSCTAMLDRAEQMPRNKRYRFGEDGYQRWLREDKDFLARALNDTRYLSRVGREYLSLICPQATRVIPGQMTALLRAKFGLNDILGLNGEKNRNDHRHHAVDACVIAVTDQGMLQRFAKASASARERQLNRLVDDMPLPWPSYRDHVARAVNQIWVSHKPDHGHEGAMHNDTAYSLLGNGMVSVRKTVDGVRQKEIGTLKVIEFADARAADRHGVLPNGAPRPYKGYKGDSNYCIEIVRNEKGKWEGEVISTFEAYQLVRQHGVKRLRHPSLSVSGNPLVMRFSLNDVVRLVVDERVRTMRITNISGNGQVFMCDLNEANVDTRNRNKADTFSYTSKYAGSLQKAKGRQASVSPIGELRDSGFKE

SEQ ID NO: 421 - protein, 1021 aa, unidentified
  REGION 1..1021: note = Description of Unknown: Cas Enzyme sequence
MPQKMRYRLALDLGSTSLGWAMVRLGPDNTPIAVIKAGVRIFSDGRNPKDGSSLAVTRRAARAMRRRRDRLLKRKARMMRTLVEHGFFPSDGRARKALELLNPYALRAKGLEEALKPEEFARALFHINQRRGFKSNRKTDKKDNDSGALKSAIKRLHAALDPGGAEGKPRTVGEYLYRRDHAGQTVRARFRQQRVEKEDGKTRIDKSYDLYIDRAMIEAEFDALWAKQSALNPELFNARAGAELKDCLLHQRPLKPVKPGRCTLMPEEERAPLALPSQQRFRIYQEVNNLRVLREGLKEEALALEQRDRLVDALERNGKRSFTQIKALLGLGGVVQFNFEDPKRQELKGNTTSAILSKKDLFGHAWFSFPEAKQDAIVMQLVTEENETALIRWLQEHAGANEAQGEAVANAGLPEGYGSLSAKALERILPELRRDVVTYDKAVQAAGFEHHSHISHAATGEILPALPYYGEYLQRHVGFGTGNDQDPAEKRFGKIANPTVHIGLNQVRVMVNALLKRYGHPSEVIVEVARDLKQSQDQRKEDQERQAKNQKRNDRLRGEAAALLQIAPEQVRQADIQKLILWEELSFDPADRRCPYSGVQISAQMVLNDQVEIEHILPFSRTLDDSLNNKTVAMRQANRVKGNRTPWEARADFAAQGWAYEGLLNRAEQMPRNKRYRFGEDGYQRWLKEDKDFLARALNDTRHLSRVAREYLSLICPQATRVIPGQMTAMLRAKFGLNDVLGLNGEKNRNDHRHHAVDACVIAVTDQGMLQRFAQASASARERQLNRLVDDMPLPWPSYREHVARAVNHIWVSHKPDHGHEGAMHNDTAYALLGGGMVSVRKVTEGIRQREISSLKVIEFADSKAIDRHGQLPDGSPRPYKGYKGDSNYCIEIVRAATGKWESEIVSTFDAYQIVQMYGLKRLSHPTLGVRGKPLIMRLIIGDYLRAYFRGETRLLTIKKIKSNGGIFVAEHQESNVRSREDARDDTLVYGSFTAGSLCKASGRKVTVSPIGEVDDPGFKD

SEQ ID NO: 422 - protein, 1012 aa, unidentified
  REGION 1..1012: note = Description of Unknown: Cas Enzyme sequence
MRYRLALDLGSTSLGWAMVRLNPQNEPCAVIKAGVRIFSDGRNPKDGSSLAVSRREARAMRRRRDRLLKRKNRMMTTLLRHGFFPQDETARKALEKTDPFALRAKGLDQTLLPEEFARALFHINQRRGFKSNRKTDKKENDSGALKTAISQLRQAMQATGCRTVGEWLYARHQQGLSVRARYRENRIAQDNGKTKVEKSYDLYIDRAMIEAEFDALWAKQSELNPVLFHETARAELKDCLLHQRPLRPVKPGRCTLMPEEERAPLALPSQQRFRIYQEVNNLRLLREGLSEEPLTLTQRDQLAYALETNNKRTFTQIQKLLGFSGQFNLQDEKRTELKGNSTSAMLAKKEFFGSQWASFDEVKQDAIVMQLVSEENEARLIAWLQTEAGVDDITAERIANAPLAEGYGSLSAKALEKILPALRAEVITYDKAVLAAGFDHHSHISHAATGEILPELPYYGQYLQRHVGFGTGKPEDPAEKRYGKIANPTVHIGLNQVRTVVNALIKRYGHPSEVIVELARDLKQSQEQRKEEQKRQADNQRRNTRMREDIAQLRNISTERVRAIDLQKMILWEELSSNVADRRCPYSGVQISAQMLFSQLVEIEHILPFSKTLDDSLNNKTVAMRQANRIKGNRTPAQAADDFEAQGWPVADMLNRASLMPKGKRYRFAHDGFEQWLRDDKGFLARALNDTRHLSRVAREYLSLICPQGTRVIPGRMTAMLRAKFGLNDILGPDGEKNRNDHRHHAVDACVIAVTDQGLLNRFAQASASAREKQLNKLVDSMPLLWASYREHVARAIHNIWVSHKPDHGHEGAMHNDTAYGLLGGGRVQVRKTVDGVRMREVASLKVIEFSNPKAAARHGLQANGEPKPYKGYKGDSNYCMEIVRNENGKWEGEVVSTFEAYQLVRQHGLARLRHPTLSVSDKPLVMRLMIGDMLALCLAENSKMIVRIAKISGNGQIFMAAHNEANVDARNRDNSDSFAYVSKMAGSLQKANSRRVGVSPIGQLSDPGSFA

SEQ ID NO: 423 - protein, 1061 aa, unidentified
  REGION 1..1061: note = Description of Unknown: Cas Enzyme sequence
MAMDYRLALDLGTNSLGWAMLRLGQGETNKPVPKAIIRSGVRIFGDGRDPKSGSSLAVNRRLARGMRRNRDRTLSRKQRLLDALVISGFLPTDIVDRRELTTLDPYQLRARGLTEELTPHEFGRALFHLAQRRGFKSNRKTDNADSDGSLMKGTIEKLRLALAADGYQTIGQWLAERHEERKSVRARLHGSTIKDKAYDLYFDRAMIEDEFNTLWETQASFNRAFFSESKRKLIHEAMFFQRDLLPVRPGRCTLEPTLDRAAKALPSSQLFRIYQEVNNLGIEDGNFAYRPLTLFERDAITVKLLNQKSMSFDAMRRTLKIGGSTRFNLEDEKRKELKGNLTGAILGHPELMGEVWGNLSVQEQDQIVIQVLDIEDERELIVWLTETFSISEDAALATSKARGSLEKAAAGYSNLSVTAIYKILPHLQGSVLKYSDAVLAAGYSSHSALSHMEQTGEILNELPYYGEYLTRHVGHGTGEPEDADALRFGRIANPTVHIALNELRKVVNDLIKHYGPPSEITVEIARELKRTLEQKREDSKQQAENQRVNERLSQEIYELTGITAKRPDLQKMKLWVELNKSDPTNRRCIYTGEVISIQRLFSSEVEIEHVLPFSRTLDDSMNNKTVSFVRANRDKGNRTPFEAFGESPEGYDYEGILERARLTNMRRAYRFGPEGYAKWLKDDADFLARALTDTQYLSRIAKEYLQLICSEPVTVVPGRMTASLRRHWGLNHLLSEDGEKNRLDHRHHAVDAIVLGLMDRGSLQRYAKNQGRGIDITQQLEKKPHEEPLPELRAKAQVAVDSIVVSHRPNHSYERQMNNDTNYGLRANGKVTSRQLLADFETLESINKADFADPSLKQRILRFVGDATPEQLKMRLQEFSDTQGVRKVRTLSNLDVIPIPINEKALYRAPKREKARDDNAIRGVKGDSNYCIEISADEKGKWRSEVVTTFEAYRIVREEGKDRLRDPKLTQLGAPLVVRLMRDDIVELQIDDEGKRQLMRLCKFDSSGRMNFAPVNEANVDARVREKSLNYLTASAATMQKRNPKSVSVSPSGRVSKRKLM

SEQ ID NO: 424 - protein, 1115 aa, unidentified
  REGION 1..1115: note = Description of Unknown: Cas Enzyme sequence
MRYRLGLDVGTASLAAAAVSLDTENQPQELVWRAIRIFSEPLENDQGKLKSKKAARRAARMQRRQIDRRRARARHIAALGNLLGLTPQSHQSGDGTNLVQIRALAARYRVELHDLLRIFLRMAKRRGYAGEFRPKKEGAKLGEVEGGNNDLKAAMHQLAEAKGFETVTLGEYLYHRLQQGLPTKLKVKADNSDASILLHNLYALRSQVEEEFDHIWQTQSAYHPVLNAVRDGQPVKMIFRRAMFYQRPLKSVGGMVGQCSLEPTLPRAPRAQPAFQRFRIEKTLADLRWGAGKRAERLTPEQRNVIRQLLDEKEKASFTAIYKALEKAGCPKPETRGLNLEGLSRDELHGHKTNHVFHKLGLESEWRKLDERTQVQAINFLADLGSPEQLDDPQWHARFVRRARTDKKDKDGKWIYEEKPRVFDQAFVDFINLLKQNEKFDRLSKMGFDGGRASYSVKGLNRLTEWLISPWWPGDYSGEMRVDEEAAVCACYNPGCYKQKAMVSVLHSRLSAPKPTGNAVVDGALRQMRFEVNRMIDALGAPPAEIVVEMAREMSLGPMRRNEREAENAKNRNARLAAEKAIREANETVTPSRIRKYLLWREQGEKFCPYCERPINLADALSGAETEYEHILPKTLTQVGMKRSEIVLAHRSCNQEKGNRTPWEAWGDGRDPARWNIVEQRADWFEKNRQYRKAKLLRLKDHETEVLTDETIAGFSDSQFHQTSWIAKEAALWLQSICPTPVSVSRGQLTAMLRRGWKLETVIPEARVAEGLPVLDEEGAVITPEEFERFRPIWEGHRAPSRELHTDRKLNKRIDHRHHLIDAIVIALTSRSLFQAMARRYKMESENRAEGERPRLKTPEPPLRTVREAALAAVRECPLTIKPDRYPDGAMFQGTAYGVAQKEGEEKLRLTLRQPLAELVDRKKGTVEQARKAIASIVSDDIRGLVSKAFEERISKGKSAPAALAEPVYQMLYGKRLPIAKASCYTDKYAEEAIVIVHNSRNGEHRKYLLNEGYAYLEIKPSVRPRLVSISEAMREKSKRSKNDVARIYKGDTVKDMDDGLLYRVCYFKAAGIIALLPVCEPRSFKEANEKAKSGTKMGKSISFAPAAKRLVVIG

SEQ ID NO: 425 - protein, 1083 aa, unidentified
  REGION 1..1083: note = Description of Unknown: Cas Enzyme sequence
MKYRLGLDVGTASIGLVALELDDGNRPIGVVWHSVRIFDEPLLPPKSAGVGETKKSARRLARQQMRQYERRARRLKRIASMATLLGLDPKNIPWGMSRHIHHMRATAAYSEITLDDLLLVFLQMSKRRGYAGGFKIKKDQDAGVVESGVKALKVAMKENECRTLGEYLWWRIRNKQHLRLKDDKLFADRAMVENEFNLIWEVQEEHHPVLKECHRGKSLREHFYRAIVEQRPLKSPAAAVGNCLLEPMLPRAPMAQPLVQAFRIEKQIADLRWGMGRKAPKLSEKQKAAIRKQLSSKGEVKFSSLYKALEKADCPDPAGREFNLVRGDREALTGDRTTAAMKKLGLLEEWQTLREGYQRSVINLLAEMGSPEVFDVPGWEKNLQGTRKQTRHINPEISGFINKMVSSGKFDRLSAMGFDAGRASYSLKALSRLIPVMQEHEMDEYDAVVAAYPSFGETSTNRSATGNVTVDVALRQLHREVGRAINVLGTDPSEIIIELTRDMRVGLKKRKKINEKMRDNEKRRKHAATEIKEHTGVPATESQIRRYLLWEEQDKEYCPYCNNTIGISDAINGATTEYEHILPRRITRIGKKKDFLVLAHKSCNQDKGGETPWDKWGNTDRWDIIMRHAEKLKKKNKGKARQLLTKDLETDSLSDDVISDFTDRQFHESAWIAKVCIERMRSICPNVSVSRGLLTAHLRRVWKLDTVIPQIRYEEGMPVFDEDYQPNKKEASQIGCRIAEEDFEKYREYWEGHRGNNIARPGRRINKRIDHRHHLIDALVISLTTRSLYQHMARHYKQVSNANEKKLKLYAEPELKDIRLTALRLVRECRPTHQPDRWSSGNMFMDNPNTIIDQGGKRLKVDEFKAKIRDNQKVLYAHRKRLADLIGSAKTIEKVREKFEKIVAESTRMMICTEFEKRINAGASLKEALAPENPIIHPHRGTPIRRVLVSGKDASEAIPVLHCNRKGHTLHKYLEPSGYAYLEFQRNDPNAEIRLVRLCQISKETKRENLEVVRFYKGDTVRDPNDGKFYVIRQIKAAGPSLIMSPITEAVANVGIVLTPRQKKISKQKIKKLILVEVESDSS

SEQ ID NO: 426 - protein, 1038 aa, unidentified
  REGION 1..1038: note = Description of Unknown: Cas Enzyme sequence
MSHLIWGLDLGSGSVGWAVLSAKTEKGKLVPTGIVDAGVRIFEAGMSGTPDEYAAGKEESRATARRDARLRRRQLARRRRRRAKVFHQLQRMGLLPQEPASKANERHAILEDLDKKLGQAALSGMSPEQKRIAGLTWLYDLRASALDRALQPFQLGRALYQLSQRRGFLSNRRSAVDKDEDLGVVKEGIVRLQQEMTATGSRTLGEYFSKLNPEDARIRGRWTARGMFTAEFDAIVAAQSEHHACLRDGKAVRQLRSAIFHQRPLRSQKDLIGRCELEPLKRRCARARPVAQRFRYWQRLHDLRYRGSFREDWTELTLEQKHVLAEHLELNERATWKKVRDLLDLRKVKFNFEAAKERSIRGNSTIAMLATCWGDGWAALGPAKHDEIAEDLLSIQSAELLERRALHHGFPAAGASELSTTFSPEDDYGQLSSKAMKKLLGRMIEGLSYSDARAALYEERVMPTHDVVPPLAEIMPDLRNPSVARVLTELRKVANSLVREHGIPDKIHLELGRDLKRGRKLRAKIDQRNRKRRKQRDQARQRALEAGITRPKRDDINKVLLADECDWTCPFTGRPFGMTQLLGSTPDIDLEHIVPYSKSMDNSYGNLTLCYASENRNHKRNRTPFEAYSGNPARFDEILDRVARFKGDGKRKLTRFRAPPDQVAKMLGDFTTRQLNDTRHATVLARDYLGTLFGAQAGVADGSRVIVTLSGGATATVRRALRMNNILGLYAEKTRDDHRHHAVDAIAIALTNQAMIQEIAKRARKRETEWERPSTVDLDEPWPAFRESVKRVIDPMYVSLRPNRKVNGQLTKDTNFADPAGKAQLTVRKRLDGMTAADLKKIADPATLQLVERRLAELGKRVPKDAFGDPANLPVDSQGRFVKAVRLTRTGTPVKVGETRWVENASNHHAVIYRLTVKGREKVSSEVVSTLEAMRRIQSGRPVVERDTGDGREFVCTLRGGDVIYLPEGKYKEGLYRVRSVWHEGAGARFTIHALNDARLQKDMKASKQLFKPTAASIAGLFKKVEVLPSGKIVARND

SEQ ID NO: 427 - protein, 1030 aa, unidentified
  REGION 1..1030: note = Description of Unknown: Cas Enzyme sequence
MTRPDEGLRYRLGLDLGTGSLGWAVLELDAHGKPCRIVRMGSRIFGSGREPKTLTSLAADRRQARQMRRRRDRYIQRRTRLMHELVAAGLMPTDEVERAALKTLDPFELRARGLDEQLEPHELGRALYHLQQRRGFKSNRKADRGNVEKSAMKQAIRDLDAAMGDDETVGSHMWRRIQDGKRARIVPEKIGSKNSYEFYVDRAMIEREFDRLWETQRKFHSDILTDANKAKISHAIFDQRPLKPVDPGRCTLEPGQKRAPVALVSTQLFRIYQELNALRVQDQTSVTLANRPLTREERDAGVAFLGTKAKVSLSALKKELFGREPMTLSLEAGERAHILGDIVSAELSKASAIGARWWGLALAKQDAIAAVLHDAESDEEVITQLLAHGLTQEEAEGAADASLPEGYSRLSRVAIGKILPHLIDDWDTEADAALTYDRAVLAAGYASHSDLHGGELFEALPYYGQVLRRHTQDLANRDSYHVRTTANPGEWEFGKVANPTVHVGLNQVRVVVNALVERYGSPAEIHVEVARDLGQSAEGRREASSKRAQNEKANDALRAELAALGQRDTFANRERLRLYNELSALNHVCVLTGIPIPKSRLFTNDFQVDHALPYSRTLDDSLSNKILVHHTANQYKKARSPFEAYASLENREDNPEWAAILDRAESAFGKTSPKFRRFSADAMDRYENGEQDFIARQLTDTSYLARLTREYLATLVLAGDDGFHPERIVAMPGRLTSLLRGKWGLNSLLSDNGEKQRSDHRHHAVDGLVIALSDRSTLKAVTDANKKAEDKYRLANDAGVKKLLDDLPLPWVGFVDDAQAAVDRIVVSHKPDHNERGQLHEETAYGVHDGPDKEGRYLVAKSGEEPKWRPVVPIFRRGEGPDSALPYKAYVGGSNYCIEIVRNAKGRWEGEVISTFQANQADFQAFMGETSTFRSQSFSGRDLVMRLVAEDCIAVEREEGVREVLRFIKTSGASQMFFTNVREGNVDARSRDKSVAFAMLSKNPGPLQAIRARRVFVDPIGRVFDPGFAG

SEQ ID NO: 428 - protein, 1017 aa, unidentified
  REGION 1..1017: note = Description of Unknown: Cas Enzyme sequence
VQYYHCFSGGASKLKRSKESVGDPTSFVLGLDIGASSIGWAVLKTDSNDGAQSVVACGTRVFEAGVEGSIETGRDTPRGVARRDARLSRRQTARRVQRRRNVYRALMSAGLLPQLSSLDHSGVDGAIREIDTHLRRQWIAEGDHKGQLVFPYQIRAAAAQGPLDPQSLGRAIYHLAQRRGFLSNRRVDKKDEKIGVVKEGIASLAADMTAGNHNTLGQFFASIDPRDIRIRNRYTHRTMYQHEFDAIAAANTQVPAETWAAIRKCIFFQRKLKSSAHLIGRCTCIPKARRIPMWHPLFQRYRILEKISNLRVRDPSDGIWHPLPDQERAVLLSYLTENEKATPAKIKTLLKLKGRELSIETEGSSAMIGNRTGCAMRAVFGERWNGMSPDEQMKALLDVHSFEKDESLKRRGERRWNLSPESAAKLASTRLEPSYASFSAKAIVLLLPHLERGLNSRQAIDIVFPSRFAVAESCDRLPPVSEILPDLRNPAVGRALTEVRSLVNQIIGRWGKPTTVRLELARDLKKSRDQRDLISKENRSQERIREQAAVRVVQEAGIPRPSRGDIEKCLLADECDLTCPYTGKKFGMRDLFGPHPTVDVEHIIPFSRSLDDSFVNKTLCVADENRQVKRNKTPWEAYGRMGERFSEIMGRVDKFRGGRASAKRERFLMKDVGEELLSEFASRQLNDTRFASTMAAKFVALLYGGVNDASGTKCVQASTGGVTARLRRAWRMGYALHDEGEKNRDDHRNHALDAIAIALSSPGIVKRMADAARRGAEAGRDGKLLEFSEPWSGFLEDVKAAISTAVVSHRPDRRLAGKLHEDTYYSRPLRVGNEWVHRVRKPTANSEAAQSTKTRGQVRHTRTEGDRTPVAIETQTGTRWVAPGSNHHMAIYEVVGKSKTSWEAETVTRLEAHRRKRCGEPIIRTDRGDGSRFLFSLRSGDTIRLRDQDGLAMLAVVRSASGKTIEAIGINDARSTKDVRDGGVSMGRLRLSLTKMRARGVEKVDVNPIGVLTVARD

SEQ ID NO: 429 - protein, 1049 aa, unidentified
  REGION 1..1049: note = Description of Unknown: Cas Enzyme sequence
MPRSNSENFAASAGHAAASQGRPDAIKPFVLGLDIGASSVGWALLAIDDSGESRGIIACGARTFEAGVDGNLTDGRDESRGVARRMARQQRRQTARRVQRRRRVYRALMAAGLLPSIDVVNHAGIDAALRQLDDQLRHAWIPAGDHRAQLTYPYQLRAAAAMRPLDSYALGRAIYHLAQRRGFLSNRKARARNDEEGVVKQGIADLQSEMDAAGHSTLGAHFASLDPRSRRIRGRYTHRGMYEREFDAIARTNPQVPAEHWKAIRKAIFFQRKLKSSAHLIGNCECVRKARRAPMWHPSFQRYRILEQVANIRVTEDAAREDRPLTPEEREALVAHLTAHAKVTAAGAKKALKLKGATLSIETLGSGALIGDRTAAAMRSAFGDRWAIMPAAERMAALQDVHSFEKEEPLRRRGERHWKLDPAQAKALAEVSLEPSYASLSVAAIERLLPHLERGLNGRQAIDIEFPDRFKAGSAVDRLAPVREAMPDLRNPAVARALTEVRRIVNRVVEHWGRPEVIRIELARDLKRSRMQRERIAKENRAQEKVREQAAARVLEEAKVAAPRRSDVEKMLLAEECEFTCPYTGRRFGMHDLFGPHPLVDVEHIIPFARSLDDSFANKTLCFVDENRAVKRNRTPFEAYAGDAGRWQDIIARVERFRGGRARFKLERFLMQEAGAEVLEEFADRQLNDTRFASKMAAHFVGRLFGGSIDAAGTRRVQASAGAVTARLRQAWRMGFALHDDGAKNRADHRHHALDAIAIALSTPSIVKRMADAARRGADAGRDGRLLEFSEPWPGFLEDVKDAIQNVTTSHRPDRRLAGALHEETNYSRPIKVKDNVVHRRRKPIESVKASDVESIPDCALRQTLSKAIESAPRQQIDPAARPLQDPSRPERVRRLRVAADRSPQPLATRKGRRWVAPASNHHMAVYESASGRWAVDVVTRLEAHRRKREGEPIVRLDRGDGSRFLFSLRSGDTMRLKGDDGQPMFVVVRSVSGTVVEAVSANDARPAQEVRKAGAAAGRYMFSPASLQRKCAERVDISPIGEITVAHD

SEQ ID NO: 430 - protein, 1034 aa, unidentified
  REGION 1..1034: note = Description of Unknown: Cas Enzyme sequence
MLRFGLDVGTNSIGWCVFETENGVPVRLQAANSRIFSGGREPVKKEPLAVGCRMARGARVRRDRIIERKQALLKKLIELGLIPSDETERQALKLLNPYELRAKAVFAALTPHELGRVLMNLAQRRGFKSNRKSDSKEDAKKTRPDLDALAKALTESGLTLGQYLWQERLEKNESTRSRIGEGLYPQRQQYEDEFKIIRSTQEQHHAQVAHGDWNEIFDELFFQRPLRGQEVGYCQVYFEQHEKRAPIALPSYQKFRSAQNIANLQIISADRANKKRLDLSQRKLLAEALQGQRTMAFSKIRKLLKLHEGETFNLESERREKLEGNETAALLSDKKYFGKTWFDLSDAEQDTIALYLLDADAPAIMQKAEQDWKLPVEQAKNLAELVPEDFPKGYARFGHRALQELVEILTEQGISTTEAIMELRGKRGDNSVRREHLPYYGEILQESMIPSPKRGDADTKQYGKINNPTVHIGLNQIRKLVNELIDTYGAPDEIFLELARELKLNSKAKAELEKFQNKNQKLNDEAKQHMQESGITPSDEDIKKYKLWKELAYDVNDRCCPYSGQPINMTALWSDVIEIEHILPEAKTFDSSMKNLTVAFKEANRLKGNRAPDDAFNVPGSPYLYQDIIDRVQRSSMSPHKKKKFDPGAMKTFTDDPKNGFIARQMTDTQYLAKVARKYLLAVCEQVHVLPGQLTARIRHEWGLNAMLASPDATPEKREKKNRDDHRHHAIDAIVIACTDRTMLQKASKASGRDGKNWDVHFDPPWERDQFRRDVADVIGKAIVSHKADHGIQAKLHEDTYYGIIKDERRNDYERENNYNVVKRGDFRGHFAKVTPDKAANKIALIRDPLIRQELEVELSAAASVADITHIVDAYAKRKGIRRIRLLKKEATVQAVTHLSTSGQKFEKGIVPGSNHHVAFWKLPSGEIKARGCSFFELNSVKGDMNQLKPHPAAKLVCRLHKKDLVRVYKNGKEETCVITKLTPSEGNETITMRIHSDSDGGGFAVSFSQLGNYKLRKIHITPAGKVHDSGSMF

SEQ ID NO: 431 - protein, 1039 aa, unidentified
  REGION 1..1039: note = Description of Unknown: Cas Enzyme sequence
MAYQTPYRLALDLGSTSLGWAVLRLNSQQEPSAIMKAGVRIFSDGRNPKDGSSLAVTRREARAMRRRRDRLLKRKARMMHTLIRYGFFPADEAARKELQDLNPFELRARGLSEALAPEEFARALFHINQRRGFKSNRKTDKKDNDSGALKTAISKLKQTLQDEECATVGEWLFKRQQAGQTVRARYRQTRMMREDGKSRIDKSYDLYIDRSMVEAEFDALWAKQSALNPALFTEPARQDLKDCLLHQRPLKPVSPGRCSLLPDEPRAPLALPSVQRARVYQEVNHLRILRPGLQDTPLTLAQRDQLVSALEQSHKRTFHQIKKLLDLGDAVQFNFEDPKRQELKGNATSATLARKELFGAAWFNFTAEEQDELVMALLTEENESKLIRWLQERTGVDEARAETIAAATLPEGYGSLSRKALNLILPELQRDVVTYAQAAKEAGFHHSHLSANDEIPGRTFAIEKVIGETGEIKALHVFKELPYYGEYLQRHVGFASPDAKPDDLPEKRFGRIANPTVHIGLNQVRVVVNALIRKYGHPSEVIVEVARDLKQSREQRKEEQDRQTRNQQRNQQLRQDIACVLSIAPERVKPADIQKMILWCELSNNVAERRCPYSGVQISVQMLLSDEVEIEHILPFSQTLDDSLNNKTVAMRQANRVKGNRTPWEARHDFAAQGWDYEGVLYRAAVMPRNKRYRFAEDGYAQWLRDDKGFLARALNDTRYLSRVAREYLSLICPQNTRVIPGQMTAMLRAKFGLNNILGLDGEKNRNDHRHHAVDACVVAVTDQGMLQRFAQASASARARQLDRLVDNMPLPWPTYREHVQRAVQHIWVSHKPDHGHEGGMHNDTAYGLLGNGQVRHHKMVDGVRQLQVENREVIEMFSANAADRHGTLPNGQPRPYKGYDGNSNYCLEIVRDEKGKWCGEVISTFEAYQYAREHGPTSLRNPDTSISGKPLVMRLTANDIVRLKVDGIAQTMRVASIRRSDGQLSLAPHCEANVDARNRDKGDPFSYTTKVPGSLMKAEGRHVTISPIGDVRDPGFKG

SEQ ID NO: 432 - protein, 1072 aa, unidentified
  REGION 1..1072: note = Description of Unknown: Cas Enzyme sequence
MKNTSAKNLSLAFDVGHSSIGWAVLEKRIDQAHPNIVGCGAVIFRADDCLASTRRGFRRQRRHIRSTRQRISRMKRLLIQLGVLTESQLNAPGCAWPWLLAGRVLRGGALLSWPELWDVLRWYAHNRGYDGNRRWSAAEAEAQQEDSEKEANARTLMDKHHCKTMAETFCAELGIDPLGNKKSSHVRFKGLNAAFPREIVEAEVRHILRAHFGKLKSVDECLERTLLEDWHTVNCAEIKLPSRYAGGLLFGQLVPRFDNRIISVCPISGHKVPSRNSREFYEFRWAMQLANIAVAAEGDRDLRPLTAAERESIDKVMRESGHLTAKQLKEVVRKETNCVRDNLDTMLMHPDAKEALLLDPVTKLLTSAKIAQLWRAMPQQLQKRFAGKLRQGKQVALAEVRAALVLLNVSTLAFDAEVQRQIDSANSKGRKKQRQITSDEFLAEPLSIPRLDGRAAYSREILRQAVAEVMSGKHPKEKDGCLYRSEEIRHAQINREIAQQTNNHLVRHRLLILQRLLRDMISEFAAGDKSRIDGVTIEVTRDLREMSGKTNKQIAQELGLRLANFKSVVEKLEADESFMRKLRDLGWHRIPPGIIRKARIAEDLGWTCPYTLQKYEPIDLLTKRVDKDHIVPRSERMSDALDSLVITFSTINKWKGKRTALKFIEDEQGKSVPDLPNLSVITANRYKQFVEALEAFKGHDDDKRRKRKRKELLLLRDYEEQEFTPRDLTQTSQLVRLGALAIRKDFIGEKKQPVITPLPGSVTGTLRKGWNRNLLGCLSTACPQVLDANGEIKTKTDIRDITHLHHALDAIVLGLSAFYIPNNGRIWELIVKRKLDDTEKLQLRALGIFDFSPEGFGLKALPPEVEKQLRARLAEKRVVQHIPARIEGLRVEQNIWRVVKREKGETTLRQQIRQPDGKRIEKEAKEKNAKLLGLAPLMGNGKLQKLKGVLIIPENFGVALDPEPTIIPFHKVWTRLEELKKSNNGKMPRLLRNGQLIEVPNGIYRGIWRVFSAKNNASGMALDIGHPDVVRLKNKVQGHRINVLLFSLLKSGMQIVKTPLTGMATCPSTSSA

SEQ ID NO: 433 - protein, 1185 aa, unidentified
  REGION 1..1185: note = Description of Unknown: Cas Enzyme sequence
MEYHIKSAQTARSTAAGVSKKPADISLAFDVGHSSIGWAVIKSETSGPDILGCGTVTFQAEDCLASKRRVFRRQRRHVRSTRQRIDRMEKLLAHFGVFTAEELKSKHAQGRGHPAPWLLAARVLAARTSNLDTTPYLLKWEELWDVLRWYAHNRGYDNNRLWAREEAVMADDLDSDIEKVENALALMKEHGTHTMAETITSVMFEPHGKLKALDVGDSKLPFFTNKSRYKAKNAAFPRDTVEKEVKALLEAHVGALEHVTKDLIALLGEDTSDAATRVRLRGMNIKLPRRFQGGLLFGQLLPRFDNRIISTCPVSGGKVCAKSTPEFRLYRWLMQVANVRVVRSGPEQPHQLSVTERVALHERMVARGALTPGEFKTAVKEITGCATNNLETMLMHPDADKALVLDPVRKLIQTDRVQFLWPHFPESVRERIQKRAAGKWRQGKVLTLNDMLSWCDELGVSSQTVLTAAKDAVAAKAVKKASKAKPINEAEMLATPLKIEAMNGRAPFARHILTKASEEVMAGYDPRKKCRANDPAGGEDKPEDGCLVRDSLQAAKSKPFPDFEVWKGKWIKKTANAARSEQDALETYRKAQASSAHDAQTNNHLVRHRLLILQRLVTDIIADPLLVNGDASRITGVAIEVNRELKEMSGKDSKGLEKALNQRLGNFKSVVKKLEEAGILHPSPGLIRKARIAEDLGRFCPYTGVHYSLKDLLHPDKWDKDHIIPYSVRPSNGLDSLVITTKAINREKKARTGLEFIEWMNQPENLVRRDELKVWSPKQYKDFVNSLESWKGHDDDVKRKRRRKQLLLLPKWEEKDASFLPRDLTVTSHLVRLGALILHRSLPHLEPHEITSLPGSVTAAIRTSWKLLGCLSSANAGVLEKNGELKTKTDIREVTHLHHALDAIVIGLTHHYFPKNGRLWEAMVRREKQRSKEDNELLLATGLFNTTQYGVVFAQEPPKYLTELIRRRLAERRVVQHLPSDMSGMLVEQNTRGVVSIDEDGTVHLKQIERDDKTGKLKVNLTKKHLSRLIGLRPGKLSEQKGVRVIEPNYGVAILDAPPPKADGSAGNSDDRFVVIPFAGVWKRLKELRELNGGKRPIVLRQGTLIQVPKKGRRTDLRGVWMVRGIADKKRDGVILELCWPDVIDSRETGVAWAKPDASLRTLINECEMTPIRSKLTGLAAIANG

SEQ ID NO: 434 - protein, 1099 aa, unidentified
  REGION 1..1099: note = Description of Unknown: Cas Enzyme sequence
MVTMSDAVSFSFDIGHASIGWAALAADGKVLGCGSVIFPKEDCQNFARAGLRRQRRHVAATRNRMKRLRQLFVEKGVLTVQEAYEQAQPSSGVMMPWLLAAQALEKGRQLTWRELWQVIRWYAHNRGYDGNAEWAGDGPTAEDTEKVQNAKQMMEDSGADSMAVAICRFLEVDLETGVLHGDKYFKGQNVAFPRETVRGEVRTILTQAESYLPGCDVTFIRMVMDELSPEEAKRFGLPERYRGGLLFGQMIPRFDNRIISTCPISGEKTPLKHCPEYYRYRWAELMANLAVEVDGVKRPLLPREREALHACMTEQGYLTKGQLKKALEEITGGSAKQVDDYFLHAEMEKALVLDPVRKEVTGSKLGPIWQTLSSKHQKIFANQFFRDGKIKLEDWRARLLKDGEDVSAFDAAVEEVVAQTKPRGKRKAEPLTVDALMTQVHRLGAAASGRAPYSRQLMQQAVEEVMAGLHPKAVKSDDPSNPQQRNGCLARTNEILERERGRRLDEQTNNHLVRHRMLMFRRLLEDLYQQYAGGDIRRVGPTTIEVARDMVEYSGMSAQDKAKLFGQKVAPFNRAEKYLREAFEDADIFKPITYNMIRKARIAMAQNWVCPYTGRSFGPQEIAYDQVDFEHIVPRSQKISDSLDGLVITFREVNKMKGNRLALDFVRQCAGTSVAVVYEDENSEIVSEKRFRQIVDGWYPKRDPRSLPNATDEDFIRWRRKQNLLRETYDEKDNDFTPRLLTFTSHLNKLAALEARKFWHAEAAKVDALRQVEPEHLVGHMQGSVTHRFRSDWKLLGCLAEVCPEVVEKVGDDSRLLPKAQIREITHLHHAVDAVAIGLTRQCFARLGYPVLEREKCQTILKRKASNNDERDWLASLGIFQFDHQGRHHLKPLDEDIRASLIAALAQKRVVQHVPASMSGLKVEQTQWRVLHGPDGDGKLTLRQRGPRENGHRRFKEAKEASSRVLGFAPTREESKLKPRQAGIVISENFGAAISDAGATVIPFHRVWNRLQELKGADGKPPLVIRRGQVIQVANGRYKGLWRIHSVKDNKTGVSLDMARPELVKAENKKAGCGMNVRLASLVKNGLRQYETTLTGDPM

SEQ ID NO: 435 - protein, 1076 aa, unidentified
  REGION 1..1076: note = Description of Unknown: Cas Enzyme sequence
MNAKQKVSSKIDAADLHLAFDVGHSSIGWAVLQTVGRASPRDESPSIDILGCGAVTYRAGDCLASARRAYRRQRRHIRSTRQRIARMKVLLRHLDVLTDDQLNQPGCAWPWLLAARVLCGGKLLTWEELWDVLRWYAHNRGYDGNRRWSAVEADARDEDSVKEANARTLMGQHETQSMAETFCKELGLDPMGKAKSSMKRFKGLNAAFPREIVEREVQKILQAHFGKLKGADANLERALFSDWRAIPCPDLKLPKRFQAGLLFGQLVPRFDNRIISICPISGGKVPSRNCPEFLNFRWAMQLANVQVARFGEQKLSPLTAGERVELDRQMREHGSMTTDQFKKTVRAATSSIRDNLDTMFMHPDAHEALLLDPVQKLTQSSDLKAIWPLLPERLQKRTRGQLRRGRSISFSDLRQQLEELGGNTAAFDTELTRQLDTTNTKGKKKDKPVSREELLKKSFSVKKLGQRAAFARHLLKQAYAEVLAGKHPKEEGGCLFITEEIRQKQMNREIAEQTNNHLVRHRLLILERLLGDVIKEYGTGDKERVTKITIEVNRDLREMSGKTTKEKAQDLGLRIANHHAVTAKLESAFAEEGKRIPITAGLIRKARVAEDLGWRCPYTGVEFEPKDLLTRRVDKDHIVPRSERVSDSLDSLVVTFSAINKWKSNRTALQFVEQEQGKTVPDLPNLSIMSLTRYKQFVEGLESYRGHDDDKRRKKRRKDLMLLAKYEEKGFVPRDLTQTSQLVRLGAQVLKRAFAGCNEKPVVVSLPGSVTGTVRKAWKVMGCLGLANPQVLDPDGKAKNKTEIREITHLHHALDACVLGLASHFIPNNGQVWELIVKRNPNDAEKRQLVALGVFGFGKDNRFEMRDLDSRLKEQIRQRLAEKRVVQHVPSRMDGLRAEQNTWRVLEVKDGVATIQQRIRQADGSRPHNPPTKEKTTKLIGLAPGKLSAIKGALVIPDNFGVALDPQPTIIPFHKVWTRLRELKKANGGKMPRVLRNGQIITISDGKYKGIWKVFSAKNNATGMAIDMGQPDVVRLKNKTEGHKINVLLASLLKNKMTVVKTPLTGIASCPTTSSA

SEQ ID NO: 436 - protein, 1058 aa, unidentified
  REGION 1..1058: note = Description of Unknown: Cas Enzyme sequence
MKKQEKQEKKQYRLGIDMGSTSIGWCMLELDDKKQPCGVINMGVRIFPDGRDDKSKEPLSVSRRTYRGIRRNLDRFLERRKSLLEFFDRNSFLPQDTNARKLLFAQDPYLLRATALDNKLTLAEIARAFLHLAQRRGFKSNRKQTSAEKDTKLTEATENLTKQLAEHHSRSLGEYLYSRNADLAKDKYHLRKPLKFRYDKEYSEEERIFPTRDMVEAEFDLIWDTQAKYHKELTDKLKAELKNLIFYQRPLQKQQVGKCTLEPEEDRCHKAYPLFQENRIRQEINILKLINTWDNSTRELTFEEKEALYQQLYVKESIKYDALRTKLLGKIGAEEYRFNSETENKKSVQGNLTNVAFRKQKELYPVWEKLSLQQQTEIIDILQDDALNDEAALLALIDTGLTRELALQALNVHLPSDHGNLSVKALNKILPFLRKGVNYYEACLQAGYSHSGFYNGLICFEGKLPYYGELLKRATLPLQRQTHDSDADEHGKINNPTVHIALNQLRKIVNALSTRYGAPAEIALELARELKLGQKQNDEINKTIGKNTKTNERIVQELTKLNVENNAENRLRYKLWEELAPDDFNRCCVYTGRQISQTRLFTAEFEIEHILPKSRTYDDNSANKTISYRGANHEKGERSPFEAFGSNPGSYDWQAICERAKNLPDNKKWRFQADAMERFANESDVLDRMLNDTKYMTTVARDYMQYVVGDKKVTTCNGKLTATLRRKWGLNALINEADNKDRTDHRHHAIDAFVIAMTDRTTVKRFADSVKQSKERFLEKLPQPYPSFKHEDMQKHIDKLTISFKPDQTNPVLLRSRNQTAEALVKETAYAYVGADPDDSKFAIYCVRQNVTGLSAKNVANLKDPYIKQQLLNLLQVSDNEKDFQQKLPDWAKQHNIKKVKLLEKANPKSMIPVYDKKGRAYKYYASDENLFADVYNPKPFDPKSKWQIEIVKSYDAHLPNFTPDWKKQNPMGKLIMRVYKNDVIAYTNEQGERELRRIKKMTKGTLFIRELNIAKKLKGLDDTGEQYSPLQLQRLNACKAGVDVIGRYFDPNAKKIE

SEQ ID NO: 437 - protein, 1124 aa, unidentified
  REGION 1..1124: note = Description of Unknown: Cas Enzyme sequence
MKKLSFSFDIGHASIGWAVLDITQNQMPEIKGCGTVLFPTDDCLASTRRQLRRQRRHIRSTRMRIARMKRLLAQLGVLTPAQLDEPGGPWPWKLAARVHAGGAFLSWRELWDVLRWYAHNRGYDGNRKWSRDEEEETDDTEKVKNARFLLDKFGKATMCETICAKLKIDPRSDDKKTSPIAYKTSNAAFPRDVVRDEVLALLQIHVGKLPKVDAAFITALCAEDNTPKDGKTARDVLKELGFDAHLPGRYVGGLLFGQAVPRFDNRIIGECPVSGEKRPLKDCREYLEFRWAEILANITVRRTKDGERQSLTAEERAKLTAIARTEGGFTAGEFKKAVLEVSGAAASNVELMMTHPDAADALVLDPALRLTKSNGMLKAMWIHPDTDQDEDTLALKSLKALLRRIRGRWNKGRKVTWEWILAQDEAVDAGLELKLKEAWNKTKQKPRKGQSEEKWEDRLKQRIAPEYPSGRAPYGREVMKRVVEQVMEAKMHPRENGGVLDAEIIKKHDLGKEIDELTNNHLVRHRLKILLRLVDDMVKTYADGDPTQVDKCVIEVARDLVEFSGKTNQDISKELGIKLKNFKDVSKRLTSDLEGTSIPINAGLIRKARIADDLGWTCPYTGKEYDAVTLARGKVDKDHIIPRSKRPSDSLDSLVITFSEVNNMKKDRTARQFIEDHQGQKVDGRPDLTIVTLKQYEAFVNKLAGEKKPSRFTPGQGSLDDKLRQWSRKQKMLLKDYEEKEFTPRDLTVTSHLVRMSARQLEKRFVHLQNTDRIVSLPGSVTGVVRKAWDCLGCLAPACPEVMAMLPTVNEKREYVMDADGKPSLSLQVRPKGEIRDITHLHHALDACVIAFASHFLPKDGKLWEQIVTKKVLKQDEEAFRERYGWHGLLKLAEPKDERDKARAKKLEVLDLPDMFKKQIVEALKERRVVQHVPADMSGARLEMNTWRVLSVDGDQVTLRQRTFGPKDIDPETGARKRTTKPAKERASKLVGLKDGKLSALKGALVIGENYGVALDPEPTMIAFHQVKKQLEELRVKNGGKPPRVLRNGMLIRVPSGDFAGVWRVRSCKLDTSKGLLLDVTLADSVPPQASRVDWCKRDVRLKTLLKANMAIIESVYCGVASEA

SEQ ID NO: 438 - protein, 998 aa, unidentified
  REGION 1..998: note = Description of Unknown: Cas Enzyme sequence
MMKQTSRVLGLDLGTNSLGWALIEADNKSHGKVIDAGVRIFQEAVEAKSRTPKNQARQQARSARKRLARRGRRKQVLRESLQEMGLLPSNNDELDQLMQQDPYILRTKGLDEKLSPFQLGRALYHLNQRRGFLSNRKADKKDTDSGKVKEGITQLQQEITAKKARTLGEFLAGREKKRGRYTHRDMLKTEFSALLSKQKKYHKTLLTPERETRLHRIIFFQRPLKIQKHLIGMCQFEPHRHRAHIASLTFQYFRILQSVNNLEVRDPKTFEWRSLTQAERQKLIKALDNAKTMKWDSIRRKIGIHDGEIFNLEQGKQSGLRGNETAYSLRKALKKSSSPWDKLTPSEQEQLVTDLLTIDKERGLMRRLQEHWGFDESTALDVAKIDLPGGVGRLSNKAMKQIIPHLEKGLIYDKACEAAEYDHANPRGRDFTTLPLLDAPPQLRNPVVMKALWETRKVVNNLIRVYGKPDVIRIEMARDMKQTRLQRIDDQKRQKQQEKKREHAKEILQRDFNIQQPRRDDIEKFILWQECDLTCPYTGTPISKEMLFSEEVDIEHILPLSRTLDNSYMNKSLCIAHENRQVKRNKTPFEAYGGDPEKMEKIALRVRGFSSMPWPKKKRFTQKELDTDKFIERQLVDTRYISREVKDYLKRTGADIQVTKGTLTWWLRGVWGLNRILAVDGSGEKNRADHRHHAVDAAVIAVTTRSLFQKLSRLAQENPTEHGLRDLQHYVPSPWKGFEQEVTKAVQSIVVSHAPLRKIHGALHEETAYGVAEPEGENGKMKLTYRVRLDGPITASQVKRIRDDKVRERVEERIAEYGGDIKEAFSQPLHMIRKDGKQGPPIETVRIENEVSPSSVFILEDEEGHPLKAFQYGSNHHVEIIEHRETGKREGRFVTMMEAARRARIERKPLVQKDHGPDWKFVMALHINDMVEVVGEETGVITYYRVQKLSGANNRIDLKKHTQVLADQNLEVVRFTPNSFDGSKIEVDPIGRIRESRD

SEQ ID NO: 439 - protein, 1125 aa, unidentified
  REGION 1..1125: note = Description of Unknown: Cas Enzyme sequence
MTKVLGLDLGTNSIGWSVISFQAATQTGSIQAAGVRIFQEGVDNLGDGEREMSRNASRNQNRGIRRQHFRRKLRKRQLMKLLRKNEMCPLNEDDLSAWFRLNPYVLRAQAIKGRISLVELGRICYHFVQRRGFQSNSRSIDVKESKTLFEGGEGKIGIKETQDHLNGSTLGDYLYSIFPKEREPFQGGLPRIRNRYTTRKMYIDEFEAIWQVQTDYHPELTYELKMQLGGRKKDGHITDGILFYQRPLRSQRHLIGNCTFEPSKSRCPISHPLNEIRRIWEWVNTVEYNGVALTGEERNLIVSWLQTKDKVDFKAVRKLVKKEGAGFKFNYQDDDKVVGCPTISKLCSKNGFGAGWFAFDEKQQNDIWHALHFFEDRDKLKQCVIDKWQLSEKNAEYISNIFLKQGYASLSMKAIRNILPFLEMGYTYDIAVVLGGIKNAFGDTWQKLTAEQQQFIFDNVPEMIRSGLKGGFISHLKQMLQEQFGLSDKQLNKLYHHSTIIRQKELLSRLPTGVEADRTLQQIRNPVVTSALFELRRLVNELLDKYGSFDEIKLEMARDLKITKMQRQQIRFEQKRLEAQYDRIKEELDKLGQRHTHENILKYRLWEECQRTCPYTGRSISPSQLFSLDNQVQIEHIIPYSRSLDDSYLNKTLCFTEENGRKGEKTPYEYYCLEMGETKWEEIKDRALKLFYDTKEFPKRYQKFKRFVTKDIAELNDFIARQLNDTRYISREAKSYLEQICSTIIVSPGAATAALRHHWGLDRLLNLEENEKTRDDHRHHAVDAITLAATTRSHLYKLANWNRYEKKRWQDAADRIGLPWTSFRLDAKTAIDNILISYNNRQRVLVSRTYKVEKQGKVFRNKGVAARGPLHKESVYGKPKSYGASGTTYHIRKPLENIKESQHVEKIVDPVVKRLIYDRLVSMGVDITAKKYKVPPGAFFDPEGRPVIYLPNERGERVPVRKVRINEEINNAVMLKPSMKLNQYVNPRNNYALVVYEKNDGELERQVISFWQAVERRRETRKIIELPENAKQIISIFRENDMFLLGLEPSEIPQARLQDHLYKVQKIAGADYFFEICFRKHTDARKDQEAKEDYKYIKNFGKGITGWQTHKPIKVRITTAGEIIL

SEQ ID NO: 440 - protein, 1438 aa, unidentified
  REGION 1..1438: note = Description of Unknown: Cas Enzyme sequence
MGKVLGLDLGTNSIGISVRDEDNGGNLVNQLDYFSSVIFKSGVGRGKSGEFSYAAQRTSKRSTRRLYQSRKYRIWATLKLLIENGFCPLSMEDLEKWSKYDKAKGLKRRYPIEATQFEQWVRLDFNGDGIPDYSSPYQLRAELVEKQFDFTNQANRYKLGRAMYHIAQRRGFKSSKGETIQEQENAATAELQETDIADALKKSEEKKSGKLVEYMQMHQLKTVGAAFAHLEKNGIRVRNSEYQAVRSQYKDEIRHIFDFQNGLDTNSIFYKRLTCETKNEGTIFYKRPLRSQKGLLGNCTLEPDKPRCPISHPEFEKFRAWCFINNIRFGDGLKESLTLEQKEQLYQDKFLLTRSSFKFEDIRVWIEKRIGQHLDYDNKSINYKDKITVLGCPISGRFKKLLGDDWEKWEYYSGSSKTIIKKRGNETIERTKEIKYHTNDLWHICFYCSTFDNDTDFVRTFAKDKLHFNDNQTDELIRICDNIQQGYGMLSLKATKNINRFLQKGLIYTDAVLLAKLPEIFKDKWSEIEGSIISQIDGIIYTIREQKLIYGIVNALIADYKSRDFTDQFAFKNYSYKLNNDDFNEIRKKTVAVIGSKTWTSIDEAEQEEILDQVAKLYQAFFASAKRDYFKAPKLADALSTFLHNTYKYLSEKDLRKIYHPSMIEFYAPADNTQIEDGRSLKLLGSPVIGALKNPMAMRVLHTLRKQVNSLLKTVDENGNALIDEETRVVVETARELNDANMRWAIEAFQREREAENKEYEKIIKEYFPNRDINDDDIEQIRLTCEQHDIPENGTPNKQPKTKENKNVPIFKKDITKYRLWLEQGCRCLYTGKIINIKNLFDDNAYDIEHTIPRSQSFDDSLANLTVCEAHFNRSVKKNQLPTQLANYEDIRLRLQPWFDKVEKLKDNVDFWKSQSKRAQTKERKDHCIRQRHLWQMELDYWQNKVNRFTMTEVTTGFRNNQLNDTRIITKYAYHYLKTVFNKVEVQKGSVTANFRKMLGVQSLDEKKSRDKHSHHAIDATILTLIPVASKRYRMIELFYKIQEKKKQEQDCSILENELLSYRESCNLNGNISDIVSYIDSHILINHVSKDQVLTPAHKRKRVHGKVLWKKDNNGIIIFDKNGKPIPNQWITGDCIRGQIHGETYYGAITQAKKDDKGTLLREIDGKIIVGDETFYVIRRELIYKKNPNSPGFRDWAELENAIVDKDLFKIIKGQFVEGTSFKDASIKGIYMFKKNPDGVIDFSDECKVNKIRHIRCFTSIKNPLKIKKQAYISHKEHKQYYYAEMGDLYSMCKYENESGTEKEYHIWSIYDISNNRKEGIEEIPNVLLSKKDKTLYLTQKITVGDMLLLYKETKQELFEMDVDSLSNRLYVVRGFENPSLIKLVKHTNAQSDKDLGKGESIKDFNKMPEKIRCGVNTIKFLKKDIDFTLSTKGIEFK

SEQ ID NO: 441 - protein, 1527 aa, unidentified
  REGION 1..1527: note = Description of Unknown: Cas Enzyme sequence
MKKILGLDLGTNSIGWAVINAEEKKRENETTYLQPTGISSAGSRIIPMSADTLGDFDKGNSVSQTKERTSFRSTRRLLERNLLRRERLLRILKIMGFLPDHYSNQIDTYGKFINHAEPKIAWFSDTDGKLSFLFKDSFNEMLADFATNQPQLVAKGKKVPYDWTIYYLRKKGLSQKLTKEELAWILLQFNQKRGYYQLRGEEDEESQDKKIEFLAQKVIRVEATDEKKGNDIWYNVYLENGMIYRRTSRIPLDWVGKIKEFIVTTDLEKDGTPKIDKEGNVRRSFRAPKEDDWTLLKKKTEYDIDNSNKTVGCFIYDALLKNPNQKIIGKLVRTVERKYYKDELKQILDKQVELIPELQDENLYKSCIEELYPNNESHRNIISKPDFKNLFINDIIFYQRPLKSKKSLISDCPYEFRFDNEGHEHPVKCIAKSNPLFQEFRLWQFIQNLRIYQREKEINRKLYTDVDVTPELLKNENEYVALYEWLNDRTSIKQDTLLNTYFRIKKAKGKDQYPYRWNYVEDKDYPCNETHAEILKGLDKCGINHTILTHEQEISLWHILYSVEDKIEISKALQKFAAKNNLPESFVQVFALTKPFKKEYGSYSEKAIKKLLPLMRMGKYWNADSIDAKTKKRIDIIITGEYDDGIKNRVRENAINLTDIEHFKGLPVWLACYIVYDRHSEAKEITIWKNPQDIDFFLKSFKQHSLRNPIVEQVITETLRTVRDIWRQEGNLDEIHLELGREMKNPADKRKKMTEKNLQNENTNLRIKAMLQEFMNPEMGIENVRPYSVSQQDILRIYEETALDSLSKDDKDFDFINKISKTAQPSKSDIIRYKCWLEQKYRSPYTGEMIPLAKLFTSAYEIEHVIPQSRYFDDSFSNKVICESEVNKLKDRQLGYEFIKNHKGQKVQISQGQTVQILSVEDYEKFVKDHYSNNQLKMKKLLMDDIPDGFIERQLNDSRYISKYVKSILSNIVREKSPEGEYEQEAVSKNLISCNGSITDRLKKDWGMNDVWNCIVLPRFQRLNELTGRDCFTTLNSEGHMIPQMPIELQKGFNKKRIDHRHHAMDAIVIACATRDHINLLNNEAAHSTQNANRYQLQRKLRRFEKIVIDGKEKEIAKEFLKPWDSFTTDAKQTLENIIVSFKQNLRVINKATNHYQHYDEDGKKVLIKQDKGDSWAIRKSMHKDTVFGEVNLRFIKTVSLNEALKNPKRIVNKDFKNKVSEFLSLGCDAKYIKKYVEDNKDVWSDIDIKRIKVYYFTKETKERYYATRFLSELVSYMSGITKKEDAINKIKGITDTGIQKILIAHLETKNGNPELAFSADGIDEMNCNIITLNNGKFHQPIYKVRRFEKGNKYAIGQTGNKSTKYVEADKGTNLFFAVFSSEKLNKESGEIEKVRSYLTIPLNVMIDCQKKYGSKWHDNIEEYLKEQELVSVDVKLLFILSPNDLVYLPKNNSIIDRSRIYKMVSSSGPQCFFVNNTMAKSIVDKVEFTSLNKAERAITGEMIKEICIPIKVDRLGNIIELNNKQL

SEQ ID NO: 442 - protein, 979 aa, unidentified
  REGION 1..979: note = Description of Unknown: Cas Enzyme sequence
KYVLKLMSPIKPEKTDLQSYEDMCERLKLNRFLPKQKNTDNRVIPHQLYEYELIQILKNASVYLPFLNDTNNGISEADKVLSVFRYKIPYYVGPLNEESSFAWISRKQGKITPWNFKDMVDEDASENAFIRRMTNKCTYLPTEDVLPKDSLCYQKFMVLNEINNLQIDGLKIPVKAKQGIYHELFEKNKKVKRKDIEEYLIRNNYLDKDSTELISGIDEQIHSGLSSYCAFFNLLNKKILSEDDVERIIERASYAEDKSRVIKWLRKEYPGLSEDDIRYIARIKIRDFGRLSKTFLTGLKGCDVSKGFDGQDVEMISILQTMWETNDNLMEILSDKYTFLEAVEAFTQEYYTGKKKSLKERLDEMSVSNSVRRPVYRTLAVVKDIEKAFGKPDKIFLEMTRGGQADQKGKRIKSRKQQILDLYDKCKDDVHDLMWQLESLGEYADSRLQSDRLYLYFMQFGKCAYSGAHIGFEQLMAGSVEYDIDHIYPQSYVKDDSLNNKVLVLSDLNGTKDNIYPVSPEIRGKMQGLWSWWNHVGAISDEKYKRLIRSAPFTDEEKMGFINRQLTETSQSTKFIADLLKERFPDAEVVYVKAGLVSDFRHEFDLPKSRSYNDLHNAADAFLSVVAGNVYDMRFSKKWFRIDEKYSVKVKTIFTHEVKCRGDIIWDGMPMLEKVEDTARKNTAHFVKYAAFKTGGLFDQNPVKKGTGLIPLKAGLPTEKYGGYNKAGIMFLMPVKYKIRKKCAIIIMPVELLHGKHFLEDETFAREYTFNRLESILGKKVDEISFPLGMRPWKINTMLSLDGFRVCITGTGGKGKCLVAQSIMQFSSEDCWKGYMKKLEKFIEKFKKNPDFIYDKEYDKVSVEENQKLYELYIEKLQNTIYSKRVNSPVQILMDGQERFEKLNIKEQCVVLMNIQTVFGRMTSGCDLSLIGGSPNSGATVNFSSTISNWRKNYSDVRIIDQSPSGIWEKRSENILELL

SEQ ID NO: 443 - protein, 1400 aa, unidentified
  REGION 1..1400: note = Description of Unknown: Cas Enzyme sequence
MKRILGLDLGTTSIGWALVNEADSATEKSSIEKLGVRVNPISTDEMTNFEKGKSITTTADRTLARGMRRNLQRYKLRRDNLIEVLKKGGILKDDTILSEVGNNSTFKTYAVRAKAPVERIELEDVARVLLMINKKRGYKSNRKAKGGDDGQLIDGMAVAKLLKEEGLTPGQYALRVLESGKRFVPDFYQSDLKTELDRIWAFQKPLHPDLLTDELRVKMEGKGKEATSKLIYALYKVDTAENKGTRDEKRQQPYQWRAAALSQPLTVQQLAFVIKDVNGEINGSSGYLGAISDRSKELYFGKKTVGQYLYEQIAKDPHTRLKNQVFYRQDYLDEFNAIWAEQAKHHRELTNELMEEVRDVVIFYQRRLKSQKGLISFCEFEQKQIEVVIDGKKKIKNRGLRVSPKSSPLFQEFRIWQVLNNLELTQKGKKRARVQKPSDQKSLFAEQEDNLFVLDIEAKQALFQELTWRKGMSKSEALKMLFKEHASFDLNFKELEGNRTNAALLEVYQRIVEASGHDADFSKMSAVQSVEKVREVFAAIGINTAILDFNADADQSEIEKQASYQLWHLLYSYEEDKSATGDANLLRMLQEKYGFEPTYARMVASVTFQDDYASLSSKAIRKVLPHLKEGNTYDVACMYAGYNHSKSLAKEERATRELKEKLDILPKNSLRNPVVEKILNQMVHVVNGVSEAYGKPDEIRIELARELKKSAKEREDMTKNMDAATKEHEEYRSLLKEKFGLSYVSKNDLIRYKLYLELKGNGFRTLYSNTYIPLTTADDGLFSKKFDIEHIIPQAKLFDDSFSNKTLELRSENREKGDDTALAFIKRKYGEEKVEEYKMRVENLLRYREKDEGRAISRTKYNKLLMDNDEIPEGFIDRDLRDTQYIAKKAKAMLEEVFRTVNTTTGTITDRLREDWQLVDVMQELNWEKYKALGLTYYEHNKEGKPLPRIKDWTKRNDHRHHAMDALTVAFTKYSHVQYLNNLNARSDKAGSIYGIEQKELSRDEKNRLRFNPPMPINEFRARAKEHLEAVLISYKAKNKVVTRNRNVTDRNGGKHVKIELTPRGQLHKQTVYGRNPWSRIVLNEKVTKKQIELIADQKLKATLEEHIAACGGMGKAFTDAKLKELVYKGKPLTEVVINEPCYTERLDLAKYAAAPGSASSKEATIESILDPVVREKVRERYYAHGKDFKKAFSNLEEHPIWMNEAKGIKIKKVVITGISTATPLHYGKDKDGRPTRDAGGNPIPVDFVSTGNNHHVAIYRDEKGNLQEQCVSFYEAVMRVNQGLDIIDRNYRAEEGWQFLFTMKQNECFVFPNAEKGFDPNGIDLLNPNNYPAISPNLFKVLSASTKDYWFRHHLDANTKKADSGAKLIYKRLRNASEMSGVIKVRIDHVGRVVHVGEH

SEQ ID NO: 444 - protein, 944 aa, unidentified
  REGION 1..944: note = Description of Unknown: Cas Enzyme sequence
PQLGRALIHICQRRGFKSNRKREPKPEEKATERQKARQELAKELKSRDITLGQYLADFYPPDRDRQAHRQKRRWIRNRDASETYNYTSRAMYIKEFEKIWSTQSAFHPILAATGLKGSVYDAIFYQRPMWWPADTIGTCELTGEPRCPKAHWAGQEFRLLQEIRNLQVVDESTGEERFLNEDERERLHELLSGQKTATFAGIAKKLWPDQPMRFSRFEDNAKRKGLTGNCVEAGLRRAPLKAWWKGASDQVKEEVFDALVAVDVKEVAGKRRVYGADQEAILGNADRWGLSPEQTEAMDKLSADLPDGYLEYSLSAIRRLLPHLRKGQRVDQAVEAAGLSVMDAPVCDFLPPVDAVVSYLTNPLVHRALSEARKVVNALIREHGKPSRVVIELAREMKQSRKHRAKVLSENKGREKEREAAKVEVEKLGLSGENNANIRKYLLWTEYRQCCGEPCRCPFCGRNISEADMASGRVHIEHILPRSRSLDNSFNNLVLACAQCNADKGQLTPFERWGDEPERWEQIKALKAKLPYPKGRRFDTRLTMEGARDHLFEDRVGKMLNDTRYTCRQASKYMAVLGMPVSVVSGTVVGPLRHYWGLNGISGMGPSDAKNRTDHRHHAIDAITIANITHKHIHGLSNKLRDRNAEFPWPWESFHRDVGEVIADIGEGTRQGVSHRPGRSLSGGLHEDTAYGPVNPEEGVFVTRKPVGKLTPALVNSDDIRDPAMRKLIRRACVDSGLAKSAGPQSKDAWQLDGRWYTIAKDKHFGAKLAKEPIRMVSGVPVKRVRILIRDRSAVPVRSGPDGQADKYVIPGDNHHLAIYRMPAGDLKGEIVSLFEANRRKSHGEAVVNPSYGDGGELVMRLCKNDMVLLTDPESGQKRLYRVQTMSLDNQRLDVRFRLHTAATIADKVERVRPRSWKDLAAHRLQKVEVDPLGGVHPVGQCLE

SEQ ID NO: 445 - protein, 1006 aa, unidentified
  REGION 1..1006: note = Description of Unknown: Cas Enzyme sequence
MSYILGLDLGTNSIGWTCINEKDEKILDFGVRIFQEGVDRDTKGKEVSKNATRREARQTRRQLWRRRLRKDLLIEVLREHKMFPESDKEIESFFKPGPYELRAKGLDEKLTQWEFGRVLYHLSQRRGFKSSRKGGEAKENGKVIPAINELQNKIDESNCRALGEYLFRVKQGGERIRAQYTSRNMYVHEFELLWNSQRRFYPEFDDGLKARVGGIVFFQRPLKSVAHLIGNCSLEPDKKRCPKAHFDHQEFRILEQVNRLSYFDGDGVEQKFSRTPEEDFEADTEHKRALLIAELRKKEDLKFDKIRKLLGLTPDITFNLEKSEKKLIGNRTAARLAKIFDKEWNKFSDLEKEKKYQAICLADHRDDPGWLEQHAIDKWNLKPDKAEKLAQKTHFEPGYSHLSLKAIRKLIPFLEDGFSLSDAREKAGYKYGAGEMDVEERLKNLRNPIVLQTLYELLRLLKIIEKVHGKPDKIRVELVRDLKNSAKKRQDIHFENLGRKKENQDIRDKLEEMGVRPNHDAVLKYKLWKECKEVCPYTGKTISQADLFSASPSFQVEHIFPKPRSGDDSFMNKTLCHVDANIEKGNQTPYEAYNGTPKYDEIIQRIKVLPYPKRKRFSRKEIPGDFITRQLNDTAYISREAKSLLESLGHKVTVCKGQATADLRYLWGLNSLLRDGGSTQNLKNRDDHRHHAIDAAVVAMTDERALHKLSAYNKYDRKTTLKAFPPPWPNFRNDLKPFVDKLLVSHRVNKRARGALHEETYYGDTEKKDEKGASLFVVRKPLESLTLAMVGKIVDPVVKGIVENRLRSLGVDPDDKKSKIPSNVFKEYTLYMKSKKDKKIPIKKVRIVQPFNNIIRLPGRNKTGVEPGGNHHVVLYRYKGSKGEIRQGGEVCTLFEAARRVKNNEPLIRRDLGQGKEFLFSLAINEMVLLDVDESQVDWENPDYKGLSKHLYRVQKLSIMNNINCMFFRHHREAILDNKAIAKTVGSFKGIKVRIDRLGRIYKAHD

SEQ ID NO: 446 - protein, 1012 aa, unidentified
  REGION 1..1012: note = Description of Unknown: Cas Enzyme sequence
MGYILGLDLGSNSIGWACIDPETKQIISMGSRVFKEGVNRDNKGGEVSKNTSRRLARQSRTQFFRRADRKQKLKKILQQAGMFPTSKEEISEYLNSQGKYNPYDLRKKGLDEQLSKLELGRALYHLNQRRGFKSSRKSGDSKEAGVVAQETAELQKKINAAKCRTLGEYFSQLDPSETPIRGHYTLRKMYEQEFDLLWEKQATYYSELNENLKENIKDKTIFYQRPLKSVAHLIGKCSLETVKRRCAKHAFEGQTYRILEQVNSLEFIDDDGVVYKFSRTPDEDFTEEVKELRDRLIEALENKKEIKFEGKKGIKELLGFTPATICNLEKGGLKKLIGNRTRHQLRSLFKKKWDSFPEEEQKKIHQVISQAEDSEWLENYALNNWSLTEEFAKKLAKANLEPGYFNYSSKAIKKLTPFLLEGFSLADAKEMAGYKENPETLSVEDLLKNLRNPIVSHALYELLRLHQVIVNEFGKPEKVQIELARNLKLPTEKRKELHFKNLELRDINDKAREEVERMGHKPTHDALLRYKLWEECGQTCPYTGRKISQSKVFNNNEFQIEHIIPFSRSLDDSYMNKTLCCTKENAKKTNQTPYEFYNGKPGYDEILMRIKNLPYSKQKKFKQKEIAEDFVARQLNDTSYISRQAKSLYQQMGYSVVVTKGTATAELRYLWGLNNLLDKTNQNLKNREDHRHHAVDAAVVAMTTTAALRKLSQYNKYRRDPNRKAFPAPWDSFRQDAETSIGNVLVSHQVNKRVRGTLHEATLFSALDKKDDQGVPIFAIRKQLTKLNTFSQLRNIADPAIRKIVIDYLTEKGISVENRTGNLPSNCFKEAGLFLTTKKGGKVPIRKVRLHKPSKNMILLPKQNNKAGVEPGNNHHIVLYRYQDSNKNWVQKGKVSTLFDVAKRLQKGLPLIDTTIGKNQQFVCSLAIDEMVLLGLTEDEVDWGRCDKNVLSPNLYRVQGISDNQLMFRHHLVSILKNEEGEELGRVIKSPSTFSGIKCYIDRLGNIWKAND

SEQ ID NO: 447 - protein, 1092 aa, unidentified
  REGION 1..1092: note = Description of Unknown: Cas Enzyme sequence
MFCLCCGKTRGHGSVTLVFFYQISIIGQAEINVFLENSGQKIMSYTLGLDLGSNSIGWAAIDLEGGQFHGAGVRVFPEGVDRDTTGTEKSKNLQRRTARGHRRQIARRARRKALLRQAIRECGWWGDDSHEQLVGVDPYFLRAKALDEQLTLPELARVFMHLNQRRGFLSNRKADRGRAKENSETLQEISQLQDDIVKSGARTLGEYFHHLREQDPEQGRSLRVRGRHTHRLMFLQEFERIWESQQRFYPDILTEKLRFGRHGRQDYPKEPIPRKRTGGATFLQEFGFHGLLFFQRSLYWPKSVIGRCELEPREKRCERADRAAQKFRLLNEVNNLRVIPQSGEPRDLNPEERKKLIAYLSSVKEASFDAIRKQLKLLEGDGFNLEAGKRTKLDGMPIDTALSSKKLFDKKAWQKKSEEEKDAIVRSLIDDEEPEILHKATSEWGVSEEIAHELANIDLTAIVRGYASYSRAAILKLLPHLEAGYRMMSKDGLPSALAQAGYLRPDQQKGAKGKKIPLPSEKVVNPLVKQALYEVRKVVHAVIKEWGIPKAIHIELAREVQGTATKRQEQIEKMRRQEARRQEAAEFARERGVAPTRNAIERYLLWREQGEDCAYSYPPRTISPNQLFSSEVDVDHILPYSRSLDDSLMNKVLVFRSENHDKTNQTVWEWVGTSNPEKYESILQRARNLPVDIRNRKRSKLQTKDVVLEQFLNRQLTDTAYITTQVVDLLKHLEGVDVVPVKGQCTAELRHMWGLNAVLRDDGLNLKKNRDDHRHHAVDAIVIALTSRSTLQTLARVRGTKEQLAPPWANFRNDVETVIDGIKVSHKAVRDISGALHEETIYGPTSKPHRANTEQDERPHASGWIEEEGVFVFRKPIEALTLSMVNDIRDPQVKAVIIERLAEFGLDPSQKKPIPKEVWKTPLFLTRKSGRTSSNPSPIRHVRVIKRDLTIQTIRGGSACVKPGNTHHITIFELPAKEGKKPKRELVAVTMLEATQRARNGETLVSRRHPTIPDAKFLFSLSWGEMISAEINGRDDLYVFRTAASTTGQMAFVSHTDARPSKDVTLFRPRANTLEAQKVIVDPLGRIRNAND

SEQ ID NO: 448 - protein, 999 aa, unidentified
  REGION 1..999: note = Description of Unknown: Cas Enzyme sequence
LIKAILGLDLGTSSIGWSLVDLQNKQHPIIAMGVRIFPEGMDRTKGEKSLNQQRREARSLRRQTYRRVRRKRKLLIALQSLNFLPKGSTELQLLLNDIDDYDPYTLRTKALDEPLTAYEFGRALYHLGQRRGYLSNRKTGDEKDGVVNLGVTELYNRIKKNGARTLGEYLYQQIEKGQPVRGFYTARQMFVDEFSAIWHQQLKPLKLQEKTRKRLFNAIFEQRPLKIQSHLVGKCELEPDRKRAYAATLMAQEFRLWQSLNNLKILFSNGQERFLNEKERLILYNSLSTAKTKNWGAIKKLLGFYDSDFFNLERVRKSGLQGNQSAAIVASSITKKTWNALTDSQQELIVFDLLNIEQDETLLRRLKNHWQLDTEKAKKLVENSKKLPKGVMGLSHKALRKITPHLRAKTSPEIRGVRYDEACELAGYHHSLKDKKTTVEQLPLPTKDLRNPLVQRAIFQVRRVVNAVIKEYGKPNIIRVEMARDLKNSAKQRDDIRRNQTRNEKANQQAREFIENELGISPSRGDLLKFRLWEECHRVCPFTGMPIAIHELYGDTPIFEVEHILPYSRTLDNSFMNKTLCHTSINREKGNQTPFEAFSGDKQRYAEILQRIKKLPYSKRKRFSVESLSKELDDKFVSQQLNETRYIAKEVKDYLAQLGCQIDAIKGGIITSCCRHVWGLNNILSDTGEKTRLDHRHHAIDALVIALIDRATVQAFSTHHSHSHDGLLRISGVHCPIENLRNHAEKAVQGTIVSHKASRKVSGALHKEFLYGITGDIDSKNVPEVVIRKPLSSFSTLKHINEIRDEHIRNMAIDHLDKVNNNFKKAFQNPDNPFGFITKKGDFLPIKTIRCVSSRSITKIASGKRTRYVWTMGNHHSEIIEILDKKQQPTWKTKQVVTNLEAHYRLQQNGENNIVENSTIENEKFIAALHANDMVELTHKNQREVCRVQKMDINGYITFRRHYDADIKDERKQIKLVPSSLMKAKPKFLSINCLGKILN

SEQ ID NO: 449 - protein, 1279 aa, unidentified
  REGION 1..1279: note = Description of Unknown: Cas Enzyme sequence
MRTLGLDIGSNSVGSSWVDTEKQEVTVGVSVFPAGVEETEEGRGAPKNQDRRGKRSLRRSLARRSARKRALRRFLTQHGMMPSDPKELKSLFEIDPWQLRRRGLDEPLTPREFGRVLLHLCQRRGAQGLSMPQPADETEVLENAPGADKGKNRVAKGEQIDPDAKVKGAVDHTIRQMQDRNARTFGELMAIISDERRNPVFDNDGNMKAGQNGQPIVYADAIRNRLDSFEFHADREIIRKEFESLWQKQKSCKSELSQLLTDEVRTALDNPVGDEKWRHQGALFGQRRTYWNTGTLGRCDLEPTDRCVPVADRHASYYRVLETVNNLRISGPGEESYRALTTKEHAAVVAKLRFQKTGSIAAIRTALGIDKRSLKKRDMSEDAYKLNVAGDEDRDLNGDWFYKAIVLDAVTAEIWESWNEPRKEGLNRAILRFDPQIEDDAARLKSIAKKLGLDEASADRLITGWRTRPKLERRLKMSRRAVLNLLPYMEKPRADGHWLTQIEARRAFAADLESSDKEALPETNHRVRRYRVGGSRLNKADRHYMDKHGILPPAPILSNPVVRKAIHEVRRHVIAHIRAHDGDFPDRIVIEFARETTKPKKLNDKLLYRAFNRNKIRKRIIEEVVKPAFGEQRFHLLSHNQLRAAVERVVLCEQQREVCAYSVPAKAITPHAAALGNGLEVDHIIPFSRCGDNSLNNRVLCFRDANRNKGRLTPREWWGDKFDERSAPVRFMETYFPAKGDYFERREYIAKWRNLTRADVADEWKGSQLSDTAYAAKEVQTYLQEGLWPDEPSHLEGGNRRILVTKGIYTSILRKDWQLYQKLVRGHEASPDDFQHASLKNRGDHREHAIDAVAIALTDGERIQELARRARLEEDEKVKAIAQGREPKRIERKPILPPWGDVKSFRQQVLSQLYNTFDRVDAKDTPIQQSKPIVVSHRSVGRRLTGAFHEETLFGPVPGNETLFVGKKKVAGLTPKHLRLPRPETRAEAIDRLTLRYLRCGESDVRQARKKAKTVVESPAFVAKTVDPPTEKSGLVRDLALRRILRNQINERLKSLSNPAVNRDADSFTPSDMNRILKAGPLRMPSGVPIKRVVLLRTMNGPVLIPRKRYDYQMNQWVYDDDPRSARAYVGGNNHHIEIREDTKGKWSGETVPTYKAVRRVRIDGKKAVDQTDDPSKGGRFVMSLSEGDTVFMKLRDQDKPDYFVVFKLDKPQTIQFKYHWDARRAKGEKNEDGEVISDTKREEFPITATQLKELAPPGEAAPIKVAVDALGRVRPAND

SEQ ID NO: 450 - protein, 1051 aa, unidentified
  REGION 1..1051: note = Description of Unknown: Cas Enzyme sequence
MNLSALTLGLDIGSNSIGWALVDEEAGSIEAAGVRIFPMGLESTQSGEKSKNADRRVARGTRRLLRRRSKRKKALRKLLCEMKLLPPVANKERNAPDRVEWERETFLSADPYTLRKKALDEPLEPYELGRVLLHLNQRRGFKSNRKADREREKETSGMLAEINELQKAIVSSGARTLGEYLANQIQPAERESQRIPIPDDPDEPDSIRGRHTQRRMYVHEFVRIWQAQRKFHPGLLTKPNRRKVLRAIFYQRPIQPPSPGLVGACELEPRLPRAPRADRRVQEMRLHQEVNNLRLIDQSTREERPLTDEEREKLIRYLSRKKEATFDAIRKHLFEIPDNVTFNLERADRSKMHGMPIDHAMSNAKLVGKVWWDLEDHTKNWIVAAIIDDDYARLVYLLREAGLNDDLAEKLLNRTPLESGYGSYSLKAVKSLLPHVKDGLPLYSRDETKPSAYRAAGYLAPWERSMDRVPKLENAPEVTNPIVQQALHEVRSVVNAILREHVHRQHRTLKCIRLELARSAKLSVRQRAELVKEQRLNEGRRAAAVRFIEGYRGEGHARRGDIEKYLLWKEQGEFCIYTGKSISPAQLFSSETDIDHVLPRWQSQDNSRMNRVVCFRKANADKRDRTPFQWLAQRDPKRFDEILQRARKLPYKKYKRFLQEQVDSDFVARQLNDTSYITTQVRTYLQSLGIDVEPVSGRYTAILRRRWGLETLLSELRDSPAWESAQDLAPGEKNRLDQRHHAIDALVVALTDKKRIYNLGTVFRFEHAREMGYEGDLPEAIRAAKRLAEPWPTFREDAYGAIQSINVSYRVNRKASGQLHEDKIYGLTSSPGVVAIRKPVENLSMAEVDRIRDPKDRQVVVERLAEFGIAPGRKASKKPTADVWKEPLWKNKEKRIPLKKVRITKNEETVLPIRGGQALVKPGNTHHLCLFEFTDTKGKVKRDAVFVTMLEAANRLRNGEQIIQRIHPEHPEARFLFSLSNNEMVLVEQDGQEQLYRLVRSASTSKQMWFKHHRAAGESGSKLGEISKMPNTLNARKVTVDPVGRIRWAND

SEQ ID NO: 451 - protein, 1038 aa, unidentified
  REGION 1..1038: note = Description of Unknown: Cas Enzyme sequence
MSKKILGLDLGSNSIGWALLEETDGKPSGIIDLGSRIFTKAVEEKTPTPKNMKRRDARLARRVVQRRARRKSRMLNYLVSLNLLPKELQGNTQPEIVLNNLGDPYYLRAKALDHALSPHELGRVLLHLVQRRGFLSNRKTLLGDMIDDPDVLDILNELDDNEESPAGEEGEFKQDIAILRKAIKDDNSRTLGEYLSKFEHHDCKRNRARDGGHKRTDRQMYREELDQIWQKQKQYHDVLTEETKDQIEEIIFYQRPLKLKADRIGKCSLEPNKQRAQVAKLESQRFRYLQDINNLEYFQSQEDKFVKLTEIDRENLKDLFEYKPIVTFAQIRKTLGLDKKAQFNLEQGNKKLKGNRTACEIRNVLLKWHVSPQWDEMPEVDQFNLVEDLLTIKKKSVLKKRLLNHWKFDLRTVIDLCLLEFEPSHSSLSIKAIRELLPYLEAGQIYSDARQSAGYGYEIKETHIVDKLGMPPEIANPIVSRALHELRRVINALIAEYGKPDIIRIEMARDLEMNTKRYKDNEAKQKKNTSANDEATEKFQLMRQKSAHLGLSKYPSRDDKIRYRIWKEQNEMCAYSGTKINLSTLFSAEIDIDHIIPYSQSLDNSYMNKVVCLAGENRFKGQRTPIDAFGGNEDKWNQITQRIYRWHGGLKSKKDRFYKTAQQVQERDFISSQLNDTRYISRVANDYLKQLGADINVTKGIMTGWLRHQWQLNNLIGFDRTAKDRVDHRHHTIDAVVTACIDRRFYQTLVAQSKDLEQKSPELHMRDINFDEPWPTLRDDLDASLNEMIVAHTPQRKITGALHEETGAGYINGVGTVYRANLNPDFKTTQVKKIIDDDVRTIISDHLAKYDNKPKQAFAEGIVVYHKDGKTPIKRVRIIQAKTTLKKLKENKLGIKDKDGKVFRWMAYGNLHHVEILYNKATDKFTSEFVTALEASHRAKGIGKPKQPIIKKDHGEGFEFVMALHINDLVSIDIDGIRSYYRIQVLDKANKRIKLRLHIAALLSNDGETLPDRDSTIPALMKSGLLVHRINAIGKIIE

SEQ ID NO: 452 - protein, 1213 aa, unidentified
  REGION 1..1213: note = Description of Unknown: Cas Enzyme sequence
MTLSLGLDIGSNSVGSAWVDTDKKEIVMGVSVFPAGVDESETKRGSPKNQHRREKRSQRKNIARRAARKRRLREVLTAAKLLPADPIQLKNLVDLNPWALRRKALTQPLTPYEFGRVLLHLNQRRGAVGVQTDPDDPEEGKVKESIDRLNKTMTDRDAKTFGQFMADLMDERRHPIQGKEGKFYHDAIRNRRDVFEFHATRDLIKKEFDVLWNKQREFDGELAARLTGELRKQVDDPAADKTWRQRGIIFGQRKTYWNLGTLGRCDLEPSDRCCPLADMYAQEFRVLETVNNIRIGEYGGTQRGLTSQERASVRKALQCQKAGSVATVRRALGIDKAALRRKNLPDIYRLNLESDKDREINTDWFHREIIREVFGEDAWREMDDAKRESVNRAVLKFDPESSSEAEGLRSGATQWWGLSPEAAEKFIKAWKTRPRLEKRLNLSRRAILNLLPYMREFGCGVTEARQLFAEDGDNSATPEQRERYALGGSGLTKADRRFLRKHPGLLPPAPMLANPVVRKAIHEVRRHVMAYMRKFGRKPDRIVIELAKEAKQTEKVRNRILAANREREREKKQIITDFNLGAKPLSQQAAAVERVILCRQQKGMCPYTDLTPGAPGEIITDDQAAKGTDVEIDHIVPESRSQDNYLNNKVLCCRQANRGKGNRTPKQWLTAEQFSLLEQRMGHWEKGLPRKWENLHRDPPPLEDFLNSQLTATAYAASQVGAYLSDALYGGAREGRRRVYFTKGTYTAMLRKDWQLFQTLKEADEGWAADATSDPQRSGEPGKKSRGDHRHHAIDAVIVALTGPEIIAQVAHLAAEREEYHERTGYWPKRQPLPPPWGSTQEFRRHVLSQLFDVFDKANLDGTRAEGAETGTPLVVSHRPVKRKVSGYLHKDDLWGAVDEGEGVFRIRCPVADLNPKMLRMPVPEDDSQVIQRLIHEMQSTGSTESQAKKAAKDRMRLGNFKRQLTDPPLGKGGLVRDWDLRRVIRKCLKDNAIDPDGFTDKQMQEFAKTGKLRMPSGVPIRSVITIGPISDPVKIVVRDPITRKQAVNPRTKKPLFRYHISRNNHHVEIMQEAATGEWCPRDGKCVTMFEAAQRVRPPKNKKGEHPKTPSAVNRDDGTGTTFVMSLSEGEMIHARRPDRSPDQPDALGYFVAVKLDGKRIYFASHWDARSEKEQDRWDVTYSNLKHCGPAPDTPPYKVRVDPLGNVVPAPHD

SEQ ID NO: 453 - protein, 1013 aa, unidentified
  REGION 1..1013: note = Description of Unknown: Cas Enzyme sequence
MTAYTLGLDLGTNSVGWAMIARGGDSFDDGHRIRAGVRVFPEGVPHLNEKKEQAPGQTRREKRSLRRVTYRRRGRRHLLRRILTTAGLLPAEGGSLIALMQLNPYELRARGLHEALQPHEFGRALYHLCQRRGFKSNRKTDSDDENKVTKDAGALQEEIEQAGCATLGEYRAKRLERHDPAAGQAEPIRGRYTLRAMYEHEFEMLWTAQAPHHPDILTADLKAQVDECIFYQRPLRFDPEVIGDCELEAGEKRCPRAHWMAERFRMLQEINNLRVVRSSGETTPLNTQERATLAEALGGKKKMTFSAIGKSLGLLETETFNLESEGKRDCLYGNRVEADLRKKTLAKWYGGLDADTRETVHDALADVQDPGELRRLALQEWGCTEAQAGQLLKINPLKGHLRVSLKAIRKMLPYLQPDHVCDDRCRQLCPQKDPDAGHVVSEAKALAGYELTRPVATFDRLPPVADVVQNLTNPLVRRALTEARKVVNALVGHYGTPAEIVVELARDMKHSRQTRRDIFFDNVRRRKENDAIRDRLVAEFNIPNPSRQDVIKYRLWEECGGLCVYTGKNIPKTKLFSPEVQVEHIYPLDRSLDDSYLNKTLCYGAEVNRIKGGRTPYEAYHGKPEFDDILQRAKRLPWKKRRRFTVKEVKFDHFANRQLNDTRYASRLATRYLRSLGCEVRPVKGQTTSKLGHYWGLYGVLGTDYSKARDDHRYHAIDAIVVALTTPSHLQRLSRVVGNAPKDAPMEPPWEGFWEEVRDTIDAINVSHRPQRKLAGALHEDTGYGPTDAPDTYAYRVPVERLTPAMVGRIRDPVVQQVVRDRLAEQGVEEKGSGAFGNVLTQPPLTMPSGVPIKRVRITTVEKTALPIRKVAGRAVKFVKPGGNHHLEIYEKPDGTWTGRCVSRFEACERLRRGEPVVSRRGPDGARFLMSLAINDMVQLTDPETGEVALYRVQKTSHNPDCDKPDITFRLHWAAQIGDKSTAVRTASWGACKKRLPTKVTVDPIGRVFPCHD

SEQ ID NO: 454 - protein, 1384 aa, unidentified
  REGION 1..1384: note = Description of Unknown: Cas Enzyme sequence
MNTLGLDIGSNSVGSAWLDAAAGTITAGTSIFPAGVDETDDKRGEPKNAKRRMTRRTRITLARRANRKRELKLLLINKGLLPRDEGSLRQLLDDNDAWELRDRGLREQLTPHQFGRVLLHLAQRRGALGLKLADMDNEEEAAEAAASEDGKVKAAIYEVRQKIKASGASTFGQFIAMERAKRITPLTSPDRRALEDRKGDRIYRDAVRNKAGSYEHCADRNLIREEFLALWNTQKKYPGKTSKLLTDEFCKLLDDDKGDTLWRHKGLLFGQRRQSWDLGTLGRCTLEPTDRCIAHADMYASRYRMAETLNNLRVQEFGKADRPLTLAEYTTLRDYLRGPLGMETPRKKKGEKTPPPQRPKRKVSVGDLRQQLGWSARVDKTGIRLNIENDEERLINTDWFHREIVHGVFTLDVWNALSASQQEGVNRAILKYDTDEEEDACKLKKWAMQYAGTSESQADALIAAWKTRPRLEKRLNLSRRAVRNLLTLMDPDTPAEHFEKPGHAQGLTEIQARKAIAEDANFKDVTTGQPLSEQTRMRYASGAKGATARDRYYMQKHLLIKDGKPIFGPDGKPLAEPPPAPLISNPVVRKAIHEVRRHLAAYMMHFGRKPDQVYVELAREAKMGAKRADELLFRNRLRNRIRLDIIEHFKLGHQSISQQRVAVVRVILAVQQNGVCPLCGNSNGQPAITPQMAAGDACDLSHILPRASGGNNSLNNLVLAHRKCNINMGRRTPREFWNDFCRGGFEEGLNRVQHIYTNITRPKFSEVKNATGIPLWQCYFNLRDDSKKKHQFSLDIKDIQGEMTNRQGAATQYATRQVMTYLSNALYEGKGLPELGGERKIFATDGLWTSRLRREWGLFFDPHNRKAKGLSDTQEQERHEKDRGDHRHHAIDAIVIALSGEQIRKAWEEREKRASVDGVNTADDSLLEYYRKNNPLKVPLAFKEREAFRQAVRTAVYGDEKLNKPICHRAVKRKIIGGLHEETLLGPVLNEHGQMLSRVARHRVSSQPPNDTQVSQDEPGTRFDPSSDIPSVLTGLYTAKKSALSLDANHLRMPVPEPDKQAVERLTSRRQRDKGITQKEARKWAKAVIASKGYRPILVDPPPGKSGLIRDIGLRKAIRDCLQHHGLDPDHFSAGDIKKLCPNDDPTNWKLRMPSGVPIKSFVLLRAMSEPVVIPRKKLDMTTGKMVYSDDPASLRAYLGGNNHHIEIRFDEKSKWTGSIVSTFEAAQRKLARLKAFRQADIPRPDEFRKLSKADRKKLHPVIARIEKAHPLVDRRNNPDIGGQFAMSLCEGETLWMKHKTTQEPDYFVVAKLDKPQGIVVVPHWDARKATERKDDNNQKVANSSREQFTITPSDLVTLAPSGHDHAMKVRVDPLGQIELMRRD

SEQ ID NO: 455 - protein, 1096 aa, unidentified
  REGION 1..1096: note = Description of Unknown: Cas Enzyme sequence
MPVTLGLDIGTNSVGSAWVDTDTRLVKTAVSVFPAGVEASEDKRGAPKNQARRQARLQRRSIRRRAKRSAALRKLLRENGLLPPEGTAFDHDVIQSSPWELRRDGLRRALTPHEFGRVLVHLSRRRGALGLDADSKDEGKMKDAVARVRAALAGRTFGEYMADLYDERTHPVEGKTSLFRDPIRNRRDSYEFHADRALIEDEFSRLWHSQKSRGGPVSGLLTDELLAKLNSSHPAKGWRQQGAIFGQRKTYWNQGSLSRCALEPTDLCCPQADMHAQEFRVLECVNNLRIEKRGELPRPLTPEERKRVVEALCRQKTATPATVRKALGIHKKEIKDFYTLNVERDPDREINTNWFAREIVLAVFGEEAWGALSEQARESVNRAIQKFDPDSAADRDTLRAGCGKWWGLNADQTEKLLTAWAARPNLSKRISLSRRAVLKLLPHVREGLSVSEAKAAAGYPASGRTLNKAGRRFASKHPGSLPPAPYLSNPVVRKAIHETRRQVNAYVRHFGRKPDRVVVELARDAKQPAVLRNQQLAENRARAKEFARLVKEFELERLGERQQRNAILRIRLAAEQRFECAYSGRRITSRMAAHGQSDEGERIEVDHIIPQSRTDDNSFNNLVLCYAGSNRDKGNRTPREWLTTEAFRLVEQRFAHLAGKDRLQIDGFEVRPNRRKWENLHREAPTVEDFASSQLTDTAYAARQVAAYLEEALYGGDDSGKRHVFCTKGRYTPLLRNDWQLYRDGRPKERTDHREHALDAVAVACTSPAVIQEVARRAEEQELAKVASGMTPRRRHLLPPWGTADEFRSQVLGAIDSAIVCHRPAKRRIAGALHEDSRYGVVDVVRKLFVIRIPIGKLTAKMLRMPRGDVSSPVAEDHDLALGKGGLVRDLSLRRRLRECLSQRGLDPDRVTDKEVQDVGKAGGFTTTAGVPIRQVRVLRTIAEPVVIGSCAFIGGNNHHMPIWEDLRTGKWSGVAVSMFEAAQRVRQSDGRLSPVDRTDPPGRKFVMSLSEGETIHARRPDRPADAPEAIGYFIVTRVARTWVEFASHTDAAPARSQDRWSAPPSVLKHCGTKPQTPPRKVHVSPLGEVEVLERD

SEQ ID NO: 456 - protein, 1389 aa, unidentified
  REGION 1..1389: note = Description of Unknown: Cas Enzyme sequence
MTTSLGLDIGSNSVGSAWVDTGKKEIRLGDSVFPAGVEDSDDKRGKPRNAKRASTRRTRTTLARRAERKRMLRQCLTKAALLPMDGKDLQTLMDMNPWELRRKALTEPLSLHQFGRVLVHLNQHRGASGVHLGAEEDKSNKKSKMKSKKGGEEDKEGAVKEAIGRLRGEMVDRYATEGDDRDGLKASREKFAAWARQRLVTVGRFVADEMPDRRNEMKTKDKRSDRERDKGHPRIWCNPVRNREGRFKFHADRELIRQEFVMLWDRQASFRGPVAALLTPELKQKLLDPTESTDWRCQGLIFGQRRQTWDLGTLGRCVLEPSERCAPHADRFASYYRTVETVNNIRIIPSGQSPRPLTVDERKKILTLLRGPLGVHEKGKYAGEPKTTVNVTDIRLALGLGKPTRRSQIRLNIENDPDREINTDWFHREIAHGAIGEDSWNNWDESRRESVNRAILKFNPDDDEHASRLRDGAISWCGSTNEQAERLIAAWRKRPKLEDRVKLSRRAIRNVLAVMDAVPDHASFGFDNLHQWLTQIEARKLIAEDVDFRDVTTGRPLDEFAKHRYATGAKGLNKRDRHYLKKHLLKKDGETVFGPDGRPIAILPPAPMLTNPVVRKAIHEVRRHVIEYLRQFGRKPDYIRIELGREARMTKKDADRTLERIRRQERIRKNIVKQFDLGDRTRNQQNAAVERVVLAVQQNGICPLCGNTDVKDYLCPTRAAEGNGVEVAHIIPLGNGGPNGWSNKVLAHTKCNQNMLNMTPRDLWGDRFKEKMKRVEEIYKDRNLPKKEDAEGQAEWPLYFDRRDDHAKLDMFSKSVKDLEGFRESQLKDTRYAARQVMAYLADALFEGKGLPERRGPRLIFASTGIWTKRFRREWGLFFDPHGQRAKGLAPDEEKSRQEKNREDHREHALDALVTAMATEEIKDSWLRRAAEAERLKMDEDVYRREHPIAPPSPWKSVKELQEQAKREIFGDPDKPRPVAHRPAKRKIVGPLHKETLYGAVLDKNGVRSRDRCTKRQSVYATPDDCLKPSHLRVGRMETLLEAIKRITKELLAEGLGRKEAKTEAQRQVNSEGFKFKWTEPDPQKTGVVRDPELCRVLRRQLVQRGLDPDSFTPAQLKATIEAQGPLTQKSGVPIHSVVLLWSNKDPAVFSRWQTDPATGAKIKQYDALTDSGDRRAARIYDAQSNHHIEIRRDDKDQWSGKIIKTWKVAERNSDRLRAVRDFLKKNGVQVRRPRRGERSPPPGVPLRRLPKPERERIRKAVGQINSQYPLVDRTNDPVKGGDFVMSLSQGEMIFARPWDSKSKGPLGSPNYFVVVKLDPPNSIVLVPHWDGRRAKGRKDENGKKVPNSQRDDFTVTPGNLPRCGPADGEPPYKVRVGPLGDVVRLNND

SEQ ID NO: 457 - protein, 1033 aa, unidentified
  REGION 1..1033: note = Description of Unknown: Cas Enzyme sequence
MTRYTLGLDLGSNSVGWAMVAHGRDAFAEGGRIICGVRIFAEGVDRTQKGTEQPRGQNRREKRGLRRMTYRRRQRRRLLARILKEVGLLPLAEQELAGVRAMDPYGLRAKGLDDPLAPYEFGRVLMHLCQRRGFKSNRKTGKSKDDGKVAKATTSLAEEMQRTGCRTLGELLHRRGREFVRTDPAARRMRSQYTLRSMYEAEFGALWAKQSESIPVLHSPDLRAKVEHAIFHQRPLRYDPNLVGDCELEPGEKRCPKAHWLGQQFRMLQEINALRLMDPGEGERPLASAWVEAIRRVLKDAGEGERPLTSAERTRLAEALAGEKKMTFDDVRKCLGLLEAQQFNLEGGGKRDYIQGNAVEAALRSRPLAKWYDAAPPAVRDKVYDALAEVETEEELIAMAPPWGMSPDQARHLARLSLPERYFSVSLKAISKMLPYLDPAHICDDRCRRLCPQTPPGAGHVVSDAKALAGYGVVKPSAALDSLPPLNRTHKYLANPLVRRALSEMRKVVNGLAREYGKPQEIVVELAREMKKPREERERLHFENIERKKENEEIAAVLTADFGILTPKRDDILKYRLWRECKASAYSGNPISKTQLFSAEVQIDHILPYSRSLEDSYMNKVLCFTSENAEKGNRTPLEAFAHDQARYQRILQAAAGLPYPKRRRFVQKDIDLDKYIERQLNDTRYISREAVRYLGLLGADVRCARGDATAELRWQWGLAGLWPNADERQRDHRRHAVDAVVVALTTRSALQKLSTVKYNPLRPRFDPPWENFRNDVDDAMKAVNVSFRPARKLSGALHEDTGLGPVEPAAGRYVCRVPLDRLTLGMIPQIRDKAVRELVEERCRQKGLDPQGKGTDKPGKVLTDPPVCMPSGVPVKRVRIEKTQKTAIPIRKVAGRAVKYVLPGGNHHVEIYQEKNGTWTGRCVSRFEAHERVRRGQAVVDRQPTGGRKFVMSLCINDTVLITDEQTGEARLYRLQKVTAFGSMLDMLLRFHAAAQIDDKSTALRVTSWTTLAALKPQKVVVDPIGRVLPCND

SEQ ID NO: 458 - protein, 1009 aa, unidentified
  REGION 1..1009: note = Description of Unknown: Cas Enzyme sequence
MAYTLGLDLGSNSIGWALVDEGGKKILRSGVRVFPEGVDRDQQGGEVSKNENRRIKRGMRRQIARRSRRKAALRAALAAAGLLPIDSAQIAVTDQLDPYALRAKGLDEKLELHEFGRVLIHLNQRRGFKSNRKGAKTKEERGMLAEITELAKQIENSGSRTLGEYLHAQRAGGPPPVRIRGKHTRRQMLEHEFDLLWRKQREFYPEVLTEELRTELWDRIIAFQRAMYWPKSVVGQCELEQREKRCRREHRIAQRFRLLQEVNNLRVIDGTGELRGLTADEREKLLAFLAKSKERTFDEVRSHLGMPESSGFNFEFGDRRKLIGLPTDVLLSGKKFFGSRWGELSEDVKNRVVEVLLDDGIEESEFSRIAREEWGVADDLAAKLAEIDLKAGYASYSLKAMARLIPYLERGLPLSGKAGEPDALHSAGYLRPDEREVGTRGFLPEPPEVTNPLVRAALFQVRQLVNAVVREFGKPGAIHVELARDVKGTAEERRRQSQRMRERERKRAEVAKLIEASGITPRRSDIERYMLWEEQGKICVYSGIPISQAQLFNGDVDVDHILPYSRSLDDSQSNKVVAFRAQNQEKGNQTPYEWLADRNPDRYEAVLQRAAKLPFAKRSKFAVKSVQLEEFIQRQLNDTKYISRKVVEYVRCLGVDVVCSKGQRTAELRHRWGLESVLRGDGLELKNREDHRHHAIDAIVIALTDRKRLQSLAGSRGGTQLALPWAEFRTDAAASVNEINVSFRVERRVSGPLHEETLYGPTDKPWQGEGKAPPEAERKAGARPWAGKWIENAGIFTFRKPLESLTPAMVKDIRDENIRGLVRERLALHGIDPDTSKVIPAAVWKEPLRMPGKDGAVVKKVRLLKRDETILPIRSGRACVKTGSNHHVCIFEFDDGGKRTRDAVWVSMIEAARRVRDREPLIRREHPTRRDARFVMSLSRGEMVLGNFKGQERLCVFQTGASTTNQMIFAAHTDARRSSEKERFSAKPGTLASRKVTVDPLGRIRWAND

SEQ ID NO: 459 - protein, 1014 aa, unidentified
  REGION 1..1014: note = Description of Unknown: Cas Enzyme sequence
MRNYTLGIDLGSSSIGWAIVDVEGDGVVAAGVRVFPEGVDRDQQGGEKSKGEQRRIARSMRRQIARRARRKAALRRLLVLSGLLPEDAEAQRALDQLDAYTLRAHGLDQELTPHEFGRVLIHLNQRRGFLSNRKADRARKKENSEMLAEISALAAEIQAAGHRTLGEHLAGLRGHDGLARIRGKHTHREMLEREFRALWESQRAHHPQLLTEQLREKIHAIIFFQRAMYWPRSVIGACELEPKLKRCPRADRVAQRFRLLQEVNNLRVIPPSAEPRPLLPDERDKLISLLERAKEETFDKIRKRLNLTEGYGFNLEAGDRKKLKGMPTDHLLAKPAFFGKEWYSRSEEDKNRIVRSLLEDDEEKIRALAASEWGLPDEAVAKLVEIDFDDGYARFSRAAIEKLLPHLERGLPLMKGNDGESCALEAAGYLRPDQRAVNQRDLLPAPPEVANPLVRQALFEARKLLNAIIREYGKPAAIHIELAREVKGNAEDRKQTAFKMRDRERVRDEAAERIRATGAKATRETIDRYLLWQEQGMECIYSGRPISLSQLLGGEVDVDHILPYSRSLDNSLMNKVVAFRSENAAKGDRTPYEWLAEVEPKKYEAVLQRAARLPFEIRNRKRQKFVQKTVELNEFINRQLVDTAYIARTVADYVRCLGTDVVCSKGQLTAELRYRWGLNEILRDDGLNLKNREDHRHHAVDAIVIALTDRSRMQKLAATRRRDAPPESLGEPWPGFRGEVEFVVNGINVSHRATRRISGHLHEETIYGPTQKRRFVPQDDRPWARRWIEKEGEFVCRKPLEALTLAMVDDIRDPEVKRVVVERLAQFDIKPGTKQKIPKDVWKEPLYLTRKGRRKSANPSVVKKVRLIRRDLTIQPIRNGQAFVKPGNTHHIVIFEIPGKGGKRKREMVSVSMLQAVDRVKRGEPIIQRTHPTIPDARFIMSLSAGEMVLANIKGQERLLCYRTSASTQGQIYFVDHRDARKSADTQKFVANANTLNARKVTVDMLGRIRWAND

SEQ ID NO: 460 - protein, 1063 aa, unidentified
  REGION 1..1063: note = Description of Unknown: Cas Enzyme sequence
MKKRTLGLDLGPNSIGWALVEEDSQQKGGCLIDMGVRVFTEGLDAFDTGKESSRNEKRRVARGMRRQTARRRKRRKEMTDALTSVGLWPSTTEERDNLMKLDPYELRAKAVSNVTLTPFELGRVFLHLTRRRGFLSNRKTDATGKEGEGLLHEIQENETKRVQSGHPTLGSWLNEKQQTQDPKNRQEDDHVRRRHLSRKQYQHEFDLIWKSQSGFHPKLLTDRLRWGNLGPIEFPCNPLPKTDRSATNLELFGIEGLLFFQRKMYWPTEVIGRCELEPKKRRCPLADRRYQRFRIWQEINNLRFIDPDSGRESQLTPGQRTLLFGKLWDVDKLEFSKIKKALGFLESVKFSHEKGEKSSLKGNATDKVAKGIWGKDWIHLEENLKDEIIEALTNPNLDDREFVNLATDKWGFDNEQISRLMKINLPSGYGSLSLKAIKKLLPHVEKGLTYSLQDEENSALHAAGYLRRDQLKKRIYDFLPSPQVERSAPIGDIPNPVVKRTLTEVRKLVNAIIREYGKPDEVHVEMARNLKIGAKKRKEINTENEKRAKKREDIASKLREHGVLANRENILRYQLWEEQSRRCLYSGRTISIAQLLGDGAGVEIDHILPRSRTLDDAQTNKVLCFRDSNQSKGNRTPSEWLASSNPTQFDEIIQRANILLRSGLMPYGKYKKLLQKEVNTDEFVSRQLVDTAYITKVTGEYLRCLFDADHHVLGLKGALTAELRWQWGLETILEELPDSPAWVTRDELRPGEKNRADHRHHAIDAVVIALTNRSRLQTLARSMSDRTNQREGELLDEPWENFRDTIKERVAKVWVSHRVERKVSGALHEETQYGKTERPDWWVTRKPIDSLKANEIPNIRDPLIRDLVISKLKQAGIDVGRKAEVDPKRLKEVLADVKMPSGVPIRKVRVVKTDKTIRSIRKNKSETFVKPGSTHHLSIFEWQENGKRKRSAVFLTMLDASQRSKNGNSIIQREVPEQNETIPKTAAFVMSLAQREAVLVDQNDKVDLVVFRTAASTQGQIYFSHHTDARSSSDYKKIVFNANTLRGRKVTVDLLGRIRNAGD

SEQ ID NO: 461 - protein, 985 aa, unidentified
  REGION 1..985: note = Description of Unknown: Cas Enzyme sequence
MSGYILGLDIGSNSVGWTIIWEGKRSGGGDRIGAGVRVFQEGVAQMNTGKEQPRGQQRREARSARRVHQRRSGRQRKLLAILRAHALLPNDAEILSRLLAGDPYPLRAKALDEALEPFQLGRALFHLCQRRGFRSNRKAPGESDGKIKKDTDTLQEEIEQANCRTLGEYLWGLGRDARWGERVRNRYTLRTMYEQEFEAIWQSQRRFHPHLLSDEAHDAAKEAIFFQRPVTWDASTIGECELEPGEPRCARAHWYGQQFRMLQEIAHLRVIDPLGEERPLTDDERAKLTSALGAKNEMKFDKIKDLLGFTESYAFGLVESSFGKREKLLGNQVEWALRAKLGKWYASAPQATKEAMWDALAGVEDEHELRRLAEDDWRLSGAQADKVLKISLPSGRFNLSVKAIRKMIPYLEAGKVYSEAKELAGYKLDKDVVVLGKLPPLDAWGGVLTNPIVRRAMREVRKVVNALIREYGLPAAVHVELARNAKESTARRREIHFENLKRAKENEEIRERITREFNILSPSRDDVVKYRLWEECDHECPYTGKPIPKHKLFHTSEVEVEHIIPYGRCLDDSYMNKTLCDQAENRIKGDRTPFEAYGEDEPKYEAVLQRAAKLPWPKRRRFSLKHIELDDFVQRQLNDTRYISRLVTQYLRQLGCDVVCTRGQMTAELRRQWGLNNLLDETGPNVKTRDDHRHHAVDAAVVALTSRSRLQRLAHIKFDPRRPQLDPPWETFRDDLKRAVEKINVSHRPTRRLAGALHEESSYGPTDKPDTYVYRKRIEDLTPSMIDDIRDPAIKRIVKEACESRGSVGKALLDPPVTMPSGVPIKRVRVLHRSSTMIPLRKDGERVTKFVAPGDNHHVEVFETIDKKARTVWTGRAVSRFKAHRRLRHGEPVVDRSGGERETFLMTLCNNDSVLLTVNDNTSLYRVEVISVVGNSPDLTFRLHTSANREDKTTKVRFRSWGKFAAARPKKVTVDVLGRIHPCND

SEQ ID NO: 462 - protein, 1005 aa, unidentified
  REGION 1..1005: note = Description of Unknown: Cas Enzyme sequence
MTPYILGLDLGSNSVGWAMIARKGKTFDGGRRILAGARVFPEGVDLLNTKREKPRGQERRLARGQRRLHQRRSTRKGALRGILRKAGLLPTDREALSAVLSADPYRLRKRALDEPLTEYEIGRVLVHLCQRRGFKSNRKQRESKDGQVAKETAALQADIEAAGARTLGEYLASLAVEPGDAAPHRSAALERIRDRYTLRSMFEEEFAKVWNTQAAFHPERLTHQLREVVHELIFYQRPITWDQARIGDCELESGEKRCPRAHWLGQQFRILQEINLLKVLDRGGEERLLDGEERKALAEALAPRAKLTFDQIRQLLGFYDSQTFNLESLSKRDCLKGNAIEAALRKKPLGSWYEAAGPQQREALYAGLAEIENDDELRRLARDELGLNDAQTERLIKIKLPPGRFRVSLKAIRKITPHLEAGLIYSDAKAAAGYQLVSAAPTHDVLPPVDDTLENLTNPLVHRALTETRKVVNAIVLEYGKPAEVVIELARDIKNSGRRRREIFFDNLKHRDENEKARTRLLEEFGLPNPSRDDITRFKLWEECDKTCVYTGRTIPKSKLLSGEIQIEHVLPYSRSLDDSYMNKTLCYVDENRRRKGNKTPYEAYHDTTENYEAVLQRGRCLPYPKRRRFTQKDIDLDRFVERQLNDTRYLSRLAVAYLRRLGTAVRSVKGLTTSELRHQWGLDAILSPLAPAQKARDDHRHHAVDAAVIAMTTRSALQKLSTVKYNPVPATLPKPWESFREDLQEVVNEINVSHRPTRKLAGKLHEDTNYGPGSSDRRGVLRVPVAELTWNMVGEIRDRVIREIVRAAVAHAATEKGIQLKGADKVSKVLGDRTLAMASGVPIRKLRIERTENTLVAVAADQDGRPIKLVKPGGNHHLEIYEKPDGTWTGRAVSRFEAHQRLRNGRPVVDRHPPRSLTFLMSFCVNDMACLTDPNTRQTQLYRVQKGSVSPDTGTPDVWFRLHTAARIDDDNTRQRFQSWRTLKQWCPQKVTVDPLGRIHPCND

SEQ ID NO: 463 - protein, 1080 aa, unidentified
  REGION 1..1080: note = Description of Unknown: Cas Enzyme sequence
MTIEGVTPPRYVLGLDLGETSVGWALVAYEGEEPQGIIDLGARVFPPGADVDERKGTATTLNQARREHRSARRNIRRRKDRKEKVRSLLRTRGFWPDAEGDEGEFLSMNPYRLRAMALDSQLSPEEFGRAIYNLAVRRGFKSNRKTDAAESDTGTVKEGIARLSGEVDEAGARTLGEFLWSLHQDEAQNCRSGVSIRNKGADYKRVSSRRMLEEEFEKIWTAQTAYHTALHDADFKESLYQAIFYQRPFELTAERLATMPSRANAQRAPSLAKCPLFQEEYRCSLAAWKAQRFRILKEIGDLRVVGRRGEFRFLTDPERTLVLSTLESYKKVTFKRLRKDLELSELESLNLERGKRDYMDGNEVEATLKGVKGFGKRWKAFDEDQRQGFRHLISNSEDEEQFLKRGLELGATKEELERIRTLRAPDGYLRYSEKALGVLLPYMNKGLDEHKALQAAREDGLLPATDATEEQPFLPAPEDLPNPIVMRTLHQMRKVVNAIIREWGKPWKIRVELARDLKNSGKQREEAASRRRDNEKRNDEAREFFQARGHQRVGRDDLLKYRLWHEQGMNCAYTGKPISDRMLTSDQNEVELDHIIPFSRSVDDSYMNKVLVATGANRDKGNQTPHEWLSGPDGEGYKGLLVRLGHMREMPDGKKRRFMLEDVDLDHNASRKLVDTRYISVQAAGYLALLYSPSERDGQKRVQTTSGQATAMLRHHWGANVLSADGQKTRDDHRHHAVDAVITACAERRHMLALANSHSGRADIDAERVHPPWISFRKDVEWMLLKRPRTWKIGDREITTHGTLVSHRVEKRIMDGLHKQSNYGISRRYLEEWGEKLTHAGVGPAGNFKKRIGVEGLNPKKLAKAKESNFLYICDETILKIIVAYCDEHAPGWEKLKGFKRGFFDGLTMPSGVPIRKVRTWYAFSQPAVFMDASGRPYRVVELGNNHRIDFFEKDKGDGRPLTCRVVPMLTAANELRRGTPAVAPESYRKLMSLHRGEMLFIDDGSSIRPTLVRVLKISGSMDVNSPSLDLSLVRHNDARPSQVITKESFGRIASLSAWTRSNVRKVVLSPIGQVIVAHD

SEQ ID NO: 464 - protein, 1036 aa, unidentified
  REGION 1..1036: note = Description of Unknown: Cas Enzyme sequence
MSKKILGLDLGSNSIGWAVLETDEGESSAILGLGSRIFTKAVEDKTPTPKNQARRNSRLARRVIQRRARRKQRMLNYLVKLSLLPKELQGNHQPEIIFNKLGNPYKLRAKALNEQLSPYELGRVFLHLAQRRGFLSNRKTLLGDLVDDPDVIDILNEAEFSEEKATKKSEETAFKNDIATLRERINASGKKTLGEFLASLPKGENKRNRLVNGGHLRTDRQMYQQELALIFQQQMKYHEALTPIVQSEIEDIIFKQRPLKLNPRRVGYCSLEPGRKRCRIARQEAQRFRYLQDINNLTYFDAYVDRELSISDKDRLKVVTLFETESLVTVTKLKKVLGLSRSQTFNLERGNKKLKGNTTACSIREVFPEWDQLSEIQQRDFCEDLITINKKSTLKARLVNHWKLGSDVAIRLCILELEPGHSNLSLKAINRLLPFLEQGLIYSEARQQAEYHYNREEREVLERLPRPPKTSNPIVNKGLHELRRVVNAVIAEYGKPDAIRLEMARDLEMNTKRYKAFISQQNKNTKANDEAVKKYQEMSAANPHLYLSKYPGRQDKIKYRIWKDQGECCAYSRRRISLSTLFSPDVDVDHILPYSQSLDDSYMNKVVCFTGENRFKGQRTPIDAYGGNNEKWEQITQAIANWDKSLLSKRKRFFLTAEDVQERDFAASQLNDTRYISRVALEYLSCLGGSISVTKGFLVSWLRYQWGLNSLIGTNNEKDRSDHRHHVIDAIVIASIDRQFHKTLCGAARHIESQNPEFQVKDLVVDPPWKSLRKDLGEALEEVIIAHDPQRKISGALHEDTGIGFKEKHGAVYRKNLDSNFTSSQLKKVLDPEVKLLIERHLDKFGGDVKRAFADDQTIYHRDGKTPIKRVRILQSRTTKKKLDKTKFGVRNKQGDVFKWLAYGNTHHVEVIQHGETSKISARFVTAMEAAARAKGVGGQKSTIVKTDHGDDYQFLMALHINELVNVEQEGELRIYRVQKIEATVNRMVLRLHTAANLNNKSEEIYFTFNSTSFDKWNLKKLAVNVLGKRYDKANC

SEQ ID NO: 465 - protein, 1037 aa, unidentified
  REGION 1..1037: note = Description of Unknown: Cas Enzyme sequence
MSKQKILGLDIGSNSIGWALLGADSGRPNEIIGLGSRIFMKAVEDGKTATPKNVKRRNARLARRVIQRRARRKQRMLNYLVKLGLLPEELQGHTQPEILLNNLGDPYQLRARGLDHPLSPHEMGRVLLHFVQRRGFLSTRKTLLGDMVDDPDVLEILAEREDEEDNSSERAKEETAFKKDISELRATIQMAECRTLGEYLAGFDHHDCKRNRLREGGHLRTDRQMYRDELDLIWQQQKNNNNILTDDVKKEIEHIIFYQRPLRLRSDRIGKCSLEPQRNRAKVARLESQRFRYLQDINHLKYFDSYSDEWISLNKDDREKLVALLEKKANPTFKTDVRKALGLDKKTEFNLDNENKKLKGNITACEIRAVYPDWGALDEEKQGALVEDLLTIQKKSVLKKRLVTHWCIDKKIAIDLCMLEFEPGHSNHSTKAINKLLPYLNQGQRYDEARVSAGYGYKIKDVKVVERLGKPPEIANPIVQKALYELRRLINAIIAEYGKPDIIRIEMARDLEMNTKKYKAFTKQQNLNTKANEKAVDEYRAAGIKNPHLHLGKYPGKSDKIKYRLWKDQDERCAYSNRPIMLSELFSAGIEIDHILPYSESLDDSYMNKVVCFSKENRNKAQRTPIDAFGEDRKKWEQITQSINRWHKGLRSKRDRFYQTKDDVKNRDFINSQLNDTRYISKVALKYLSQLGMDITTCKGTTTSWVRHQWGLNNLIGDGNQKDRSDHRHHAIDAVVIACIDRVFYKDLVCLAKDLERRQSAINIKDIVFDPAWEGLRDELKIRLDEIIIAHVPQRKLSDALHEDTGAGYIKGVGAVYRINLDGSFKIKQLKKIIDDDVREIVTKHLKKYDDNPKLAFSEGVKILHKDGITPIKRVRVVQSKTTLAKLERSKFGVVNREGSIFKWLTYGNFHHVEIIKNIKNFKYNSRFVTTMEAHHRVKGVGISEQSIIKVNHGPEYEFIMVLHINDLVSVDVKGQRCFYRVQKFEPQNKRIKLRLHTASTLNHSYETLLDRESTVSALMNANIQLHQTNAIGKLIS

SEQ ID NO: 466 - protein, 1032 aa, unidentified
  REGION 1..1032: note = Description of Unknown: Cas Enzyme sequence
MPDLTLGLDLGANSIGWALIDETGQRLVATGVRVFPEGVDNYDTGKEAPKMQERRIKRAMRRLIMRRAARRRALRRLLADAGLCQADDPRLWTEDPYELRRRGLDEPLTGVQFARVLIHLAQRRGFKSNRKTDRAREADDKGVLGEINWVQQQIAVSGSRTLGEMLAKVRAGEWHSPDAVKLHTRVRAIHTRREMFLHEFDMLWERQKSFNSPLSALLTDELKLRLNNPAKDDKWMHKGILFGQRKLYWPKEVVGRCELEPRLARCPRADRLAQRFRLLQEVNNLRYYDPDAREERTLTQEQRALLLDKLSRTATMDFDAIRKALGFIDSIRFNLERGQRPALKGLPVDAALACKEIFGRRWHEFSEQQKDQIVRTLIDESDEDLRRIAVEQWGLSPQAAEKLLTVELPDGYAALSRQALEKLLPHMERGLLYMTADGTPCALSEAGYLRPDQRPRKTLPFLPAPPEVANPVVRQALHEVRKLVNAIIRQYGKPARIRVELAREAALSADQRRKASKRRQENEDERNRAADTIRQAGGTVSRDAIERVLLWQEQDGACIYSGRPISLAQLLGGEVDIDHILPRSRCLDNSRQNKVVAFRDMNREKGNRTPREWLEADPARYDQVLQRASRLSYAKRRRFIQKELDLDQFVQRQLNDTRHLSRVVRQYLDCLVEQPHHILCPKGSHTAELRRHWGLDTILQSLPDSPAWQAADDLQPGEKNRADHRHHAIDAVVLALTDHKRLQQLARIQRQGGTRATGQVLPEPWPGFRDAVLQAVQSINVSHRVQRRVAGALHEETIYGPVFQRRLGLGIVQKPGEFVFRKPLESLSAPEIEHIRDKTIRQIVIDRLKERNVAFGRGAKKKTIPSSVWNPPLAMPSGVPIRKVRLLKYDQTIQPIRNGTAYVKTGSIHHLCIFQFTENGKRKREAVFVSMLEAAQRIRLRQPIIQRTHPTRPNATFVMSLSRGEMVLGTFKGKLRLVKLKTAVSTEQKIQFVEHTDARRGNLAQIISVTPNTLKGEKVTVDLLGRIRRAHD

SEQ ID NO: 467 - protein, 1030 aa, unidentified
  REGION 1..1030: note = Description of Unknown: Cas Enzyme sequence
MSKTVLGLDLGSNSIGWALLEQQDGNPNRIINLGSRIFIKAVEEKTPTPKNAKRRNARLTRRVLQRRARRKQKMLNYLLSLKLLPDALQDNYSPEAILNALGNPYQLRAKGLDQALTAYELGRVLLHLVQRRGFLSNRKVLLGDMVDDPDVIAELNVLEESDEEQTARDKEETAFKKDIAELRATINQANCRTLGEYLATLDHHDCKRNRLRSGGHLRTDRQMYREELALIWEQQIQHHPILTEQVREKFEQIIFYQRPIKLKADRLGKCSLEPKRQRANIARLESQRFRYLQDINNLQYFENQTEQWLKLNPQQREKLIAVFEAEASISFAKIRKTLGLDKSQEINLERGSKKLKGNITACEIRKTLSIWDDLSNQQQLALVEDLLTFEKKSALKKRLINHWQFTPAIAVNLCLLEFEPGHSNLSTKAINALLSYLQQGQLYSDARISAGYGYEVEQQAIVEKLGKPPETANPIVRKGLHELKRLVNAIIAEYGKPDAIRVEMARDLEMNTKRYAEHEKQQKANTKANDDATAKFQEQRALSPHLALSHYPSKTDKIKYRLWLDQNRSCAYSCKPIELSSLFGPEIEIDHILPYSESLDDSYMNKVVCYTKFNRQKAQQTPIDAFSSNPNQWNQITQALKHWDRRLTAKKNRFYMTAAEVQQRDFISSQLNDTRYISRLALDYLKPLGSDISVSKGITTAWVRHQWGLNDLIGDDDTKDRSDHRHHAIDAVVIACIDRKFYRALVNTAKDLERKQSQLDMRDIHIDPVWPSLRHDLQQALSEVIIAHAPQLKLTGELHEVTGAGFIEGVGNVNRKNLDVNFSQVEKIVDPHVKAIVEKHLQRFNNKPKQAFAEGNPVYHKDGKTPIKRVRIVQSKTTLDKLQKTKFGARNRQGEIFKWLPYGNLHHVEILKDKTTGKYSGEFITTMLASQRAKGIGQDKQAIIKTDHGENIEFVMALHINDIVSVVDNSVRVFYRVQNLDSGGNRFILRLHTAAKLDRKEEEIFFSINDASFEKWQLQKHTINVIGKLL

SEQ ID NO: 468 - protein, 1036 aa, unidentified
  REGION 1..1036: note = Description of Unknown: Cas Enzyme sequence
VSKKILGLDLGSNSIGWALLEEANGEAHSIIGIGSRIFTKAVEEKVPTPKNVKRRDMRLGRRVLQRRSRRKQRMLNYLVSLNLLSNELQRNFQPEIILNELGDPYHLRAKALDEPLTRFEFGRVLLHFVARRGFLSTKKQLAGDLIDDPDTIAYLNEMDDKPTKDKEEGAFKADISNVKQAIDESGARTLGEYLFKLEQGACKRNRSHEGGHLRTDRAMYKYELEKIWEQQKKHFTNLPDDFMADNKGIKDIIFYQRPLKLKKDRIGKCSLEPKNNRAATARLEAQRFRYLQDVNNLQYFEPQIDQWLSLDEQRKSDLIGYFERHRSIGVKALKKLLNLEARYKFNLEMKNLKGNITACEIRTVLDEQWDNYSDKSQHALVDDLLTIKKKSVLKKRLTQHWGLDTPIAIKLCLLEFEPSHSNLSLKAIKKLLPFLQQGMVYSKKDHKTGELGALQAAGYTDEIKELGLVDKLGTPIGTSNPIVNKAMQELKRVVNAIIKQYGKPDTIRIEMARDLEMNTKRYKENEARQAKNTKENNKAIDAHKDLNLGQYPSHDDKIKYRLWEEQGRRCAYSNKTIPLNSVFTANVEIDHILPFKKSLDDSYMNKVLCYVADNRDKGDRTPKDAWSGNTEKWMQITQAISQWKGVDSKVKRFYQTDDDLQKRDFISSQLNDTRYISKLALEYVASLVGTSNVSVTKGFVVSQIRYQWGFNDLIKKANKKDRTDHRHHAIDAVVIAATSRSLYTKAVKQIEQGKLKIAPPYPELRNELNEQLKHTVVSHATRRKLSGAFHKETGYGHINNKWLVTKVKLDGGFSLGNAQTIIDEAVRNQVTKHLNSFGNDSKTAFSGKHPVFHKDGVTLIKRVRILKPKTTFNNPITADELQQIKHGSKNKEGEIFKWYDFGNYHHVEIIQQIETGKYKGVFINMMEAYRRAKTGPTSTKENIINTSHGDNWRLVMSLHTNDLVSVALKEGNRGFYRVQVLDNDGGRLLLRLHTASTITDDSERIRKAIPVLMTSMGMTKHSINAIGILSDDQTNS

SEQ ID NO: 469 - protein, 1030 aa, unidentified
  REGION 1..1030: note = Description of Unknown: Cas Enzyme sequence
MSKKVLGLDLGSNSLGWALLEETNGSVNSIVDIGSRIFTKAVEDKVPTPKNVKRRDMRLGRRVIQRRSRRKQRMLNYLVSLELLPKELQGNTQPEIILNELGDPYELRVKALDTQLTPHEFGRILLHFVARRGFLSTKKQAAGDLVDDPDTIIFLNELDNESVDSKEEGAFKADIKEVHASINASGSRTLGEYLHKLAQGQCKRNRQHEGGHLRTERKMYQDELALIWKEQEQYFSHLPTDFMSKDQGVLQIIFYQRPLKLKKDRVGNCSLEPKNYRAPMARLETQQFRYLQDVNNLQYFERHTDQWLSISHEDKKTLINYFEHNTRVTITALKKQLGLDKLTKINLEAKNLKGNITACEIRSVIGEQWDHYGEEKQAALVEDLLSIKKKSALKTRLISHWGMTKAKAIELCLLEFEPGHGSLSLKAIKKLLPFLEQGLIYSRNDRATGELGALQAAGYLDVEEEKPDFDKLGAPVKTSNPIVNKGLHELRRVVNAIIKQYGKPDIIRIEMARDLEMNTKRYKENEAQQLKNRKENEKAVDAYKNLNLGKYPSHDDKIKYRLWDEQGHSCAYSNKTIMLSQVFTAQVEIDHILPFKKSLDDSYMNKVLCFVSENRAKGDRTPKDVWGGDENKWLQITQAISRWKGLDSKVKRFYQTEADLQKRDFISSQLNDTRYIAKLALDYVQQLGCDVSVTKGFVVSQMRHQWGFNDLIGETNQKERSDHRHHAIDAVVIAATSRQLYKKAVSQIERNKLNIERPYESIKDELAVQLQKTIISHTSQKKLSGGLHEETGAGFIEKHGGLVYRKNLTPDFTVKNANSIVDETVKELVLAHLLKHENEPKKAFAEGTIVYHKDNKTPVKRVRVLQSKTTREKLEQSKFGIQDKSGKIFKYMAYGNMHHVEVLKHNETGKYKGVFVTMMEASHRAKGIRSKLNPDGKTQMLIKRDHGSEWSFKMALHRNDIVSISNGKDQIYYRVQKLDSGTNRFVLRAHQASTLNNKKDELGVSISQESFDLLSLKLHKINAIGIITDD

SEQ ID NO: 470 - protein, 1028 aa, unidentified
  REGION 1..1028: note = Description of Unknown: Cas Enzyme sequence
MSKKILGLDLGSNSVGWALLEQNGSEITRIIDLGSRIFIKAVEEKVPTPKNVKRRDMRLGRRVLQRRSRRKQRMLNYLVSLNLLPKELQDHTQPEIILNGLGDPYELRTKGLEKQLLPHEFGRVLLHFVARRGFLSTKKQVAGDLVDDPDTVAFLTELDDKPTSDKEEGAFKADISEVRNAINEAGARSLGEYLYKQVQGQCKRNRSHEGGHLRTDRKMYQDELELIWQQQSPYYSHLPGDFMEKDKGIKQIIFYQRPLKLKKDRIGKCSLELKNNRASMARLEAQRFRYLQDVNNLQYFHRHTEQWLSINEEDKRKLTGYFEQHPKITIPVLRKLLGLDSKYKINLEAKNLKGNITACEIREVIGEQWDHYSNDSQLKLVEDLLSIKKKSALKTRLINHWGFGLSKAIGLCLLELPPNHSNLSLKAINKLLPFLQQGLIYSRNNKETGELGALQAAGYDDEIKEQEEQNKLGQPIETSNPIVNKGMHELKRVINAIIKQYGKPDIVRIEMARDLEMNTKRYKENEARQNKNKKENEKAVDAYKTLNLGKYPSHDDKIKYRLWLEQNKFCAYSCEAIPLNAVFTSTVEIDHILPFKKSLDDSYMNKVLCYTAENRNKGDRTPKDAWGTNETKWNQITQAISCWKGLDSKVNRFSQTEADLQKRDFISSQLNDTRYISKLAIDYVKQLGCDVSVTKGFVVSQMRHQWGFNDLIGEANKKDRTDHRHHAIDAVVIAATSRSLYSQAVKQIERNKLKIQPPYPELRNDLREKLEHIVISHASQRKLSGGLHEETGAGYIERHGGLVYRKNLSPEFTTKNAKNIVDETVQQLVLSHLTDYGDDPKRAFADGVTIYHKDGKTPIKRVRVLQSKTTKKKLEQNKFGIKDKSGNIFKYMAYGNMHHIEIIKNINTGKVKGEFVTMMQASHRAKGIQSKLNLEGRKQTIIKTKYGSDWQLLMVLHINDLVSVDGENRERVFYRVQKLEYPSGLTLRLNTASTLDNKNEAMRTSISSLVNKSVIVHRINAIGIITDD

SEQ ID NO: 471 - protein, 1096 aa, unidentified
  REGION 1..1096: note = Description of Unknown: Cas Enzyme sequence
LPSYGIIIGERMNTEQSYGLGLDQGVSSIGWALLRLDAEGEAVGIERLGTHLFEAGTDGTPDKIARGGDTSLAEPRRLARALRRQYFRKCLRKRRLLRWLQSLDLLPPGDVNTAEGRDALIRSVDAVLREKWNPDPATITDPKERHRLAQLLPYRLRAQGLTARLEPYEFGRALYHLAQRRGYLSNRKADGESARDEQGTQDSRPEAAAPEAADSSRGAEDLGTVRAAIVELTRQMQGAGVRTLAEYFCRLDPSGTLGDRLRGRWTARDMFLEEFNRLWDQQRAHHTQLTDEARKNVFKAIFFQRPLKSASSLIGRCELVPGQKRAPIAHRLAQRFRLLCAVNNLLIELPDFSSRKLSPEERAKVLDGLCTQGDITFAKLKQRTWLGLPRGTIFNLERGGTGGEKRLIGHRTDARCRGIFGDERWTGMSDTEKDAVVSDMMLFQKPTALAKRGRLRYGLDADAAAKLGDTTLEAGYAAYSLGAIERLLPRLEAGKPLATAKKEEFPELVSDESEPLDLLPPAIKALGNLRNPTVLRALSELRKLVNAVVRQYGKPRWIRLELARDLKRARKERERVSTEMREREGERERARARILKETGIDRPSRGDIERVLLWEECNGVCPYTGRSIAMTDLIGRTPRFDVEHIWPLSRSLDDSFLNKTLCEVNENRNVKQKRTPFEAYSHDAERWELILDRIRRFKGDARRIKLERFMAEHLPEGFAQRHLAETRKIGSTSAEYLGLLYGRGLAEGVDPSGTRRVFVSPGGLTAHLRREWQLSAVLNGEDVKSRDDHRHHAIDALVVALTTPAAVSMLQRAAERASAVGRRLFAPVEEPWAGFLDEAARAADAINVSYRANRRFSGALHAATNYSRLHPGDPEGTRRLRRELSKLKPSEVENIVDPKIRAIVRAHIDRIGAKPKNGTFDAFADRAKRPFIQHDDGTRTYIHKVRLFVKERPRPIGGKQGKGGVSAARHVGSTSGSNHHTLIEKNSDGKWTDSPVPLLDACRKSGSTRRRPHGSDSLTLASTDFLLLKNDEGVTGLYRVLSISKSDIRCIFHTEGRPVSEDGVRIIRIKSMKALWERAAKKVSVTYLGEIRRAGG

SEQ ID NO: 472 - protein, 1057 aa, unidentified
  REGION 1..1057: note = Description of Unknown: Cas Enzyme sequence
MMQPSQTYLLGLDLGIASIGWAVLTVDRAGSPASIVQSGVHLFESGTEGDVKSGRDESRAAPRRMARAMRRGYWRRTRRKRKLLRILQRLALFPGSQLDTRTAEGVDRLVKSLDAELRTKWEAGADHRQRQLLPYRLRAHGIENKLEPFELGRALYHLAQRRGFLSNRRDTGTVDTEEEAGKVRAGIIELNTLIDAAGTNRTLGAFFASLDPTDADGRRIRGRWTARDMYATEFDHLWSRQAQDDSALTDKARSEVHDAIFFQRPLKSADHLIGKCKLMPGRKRAKLALRIAQRFRLLQRLNDLEIEHADHTRRRLTDRERSAVLAGLEQRGDLTFVELRRKTYLGLPKGCTFNLEEGGEKKIAGHRTDAKLRGVFGDRFGALSDSEKDAIVDDLVTFEKPSALARRGRNTWGLDAETAAAFGDLGLEQGHAAHCTEALQLLVEKMETGMQYSTAREQLFPGSLRSSDPVELLPPVPIAIGDIRNPGVTRSLSELRKLVNAVVRKFGKPEAIRIELTRDLKRGRKMRERTSRENREQQVRRDKAKDRISREAGIQEPRRSAIEKMLLADECEWICPYTGRSFGMDDLFGKHPKLDIEHIWPLPRSLDDSYLNKTLCWHEENRARKRSRTPHEAYAADPERWEQIIDRVKRFGGDAARIKLERFRAEAIPEGFTERHLAETRYTSALAAEYLGALYGGRVDARHRQRIFVTTGGLTFHLRREWQLDSILSPKYEKNRTDHRHHAIDAVIVALTDTRTVHSLQRAAEQASEMGRRLFAPVELPWNGFLEDVRTSVEAINVSYRQNRRVSGKLHAETLYSKEMQGADGSKERRVRKELHKLTAGDTERIADSTIRAIIKSKLDSLKLDPAKAFIDPNNHPHIVTKAGAKVPIHKVRVVVQEKPWTIGEGSRQRFVASTAGSNHHTSIIEAREFSAASKAKLPKTIWMDQPVTLIEAHRRKGAGTRIVDRSPQVPGGGAFVFSLAVNEFVIMKDADGQERLYRVQNISKGDIGLVVHTDGRTADERKKANERVRASGARLLAQGARKVAVTYLGEVRNAGG

SEQ ID NO: 473 - protein, 1069 aa, unidentified
  REGION 1..1069: note = Description of Unknown: Cas Enzyme sequence
MKAYILGLDLGPNSVGWAMLEANPNSFEPVGFADTDSAGHPPLGVRVFEAGLHNFGTAKEMSLNQSRRTARCMRRNHARRNARRNRLKAQLREGGLLPVDDKLLEDLFRSDPYELRARALTEDLEPYEIGRAVFHLGQRRGFQSNRKSGKAKEDEGILEEIGVLERAIKDSGCRSLGEYLHTLARGTGPVDQPRLRNRHTRRDMYLAEFEAIVARQQTCHPDLLSAPLVSRLRHTIFFQHPFEVTEERRLAAPSRANLHRAPSVRLCPLEPGQYCCPRGLWEAQQFRIHKETANLRVSEHLGRERVLTAGERQVVLDLLMSKDRVKFDDIRKALAKTGVDPDAQFNLERGGRSALLGNSVEHKLATTVGRPAWRKVAEQTRQRLRDHLVQADDPTDLIAVLQGLGVEPESIEKLVRWTPADGYLGYSLEAIRKLMPLLADGLDEFEAIQKAYPQRPGSSRFATLPPLSSSDLPTDLENLTNPVVRRALVEVRKVVNALIREHGCPARIVVELARDMKDGAERRREEAKTLRDRERVREEAASRVAEFGGNPRSRDDVNRWLIWEEQGRHCLYTGQPIPVSELFAGGEWEIDHILPRWRSLDDSQANKVLVHRLANKEKGDRTPMEWLGESSEAFRQLLRRAAGLQHSGALSRGKFERLKRAELDTEDFAARQLNDTRYLTRAVVEYLSLLFPPELRTGEKAIQSCRGGLTAELRRQWGLNNILPDLYDAKGEPLLSDRVDDDGKPYKSRDDHRHHAIDALVIALSSRALLKRYQDYWKSRDHHPEPGRPPFPVPWDTLRDTARDLASRITVSHRALRKISGAFHEETFYGPARNRDGEIAADRYVTRKRLDTLTGSNIATIRDDTCRRLIEDRLRIHGWDGQSNTLPKNWHAEPILMANGIPIRKVRIEVAIKNARQLKHRFAILGNNHHLEIVASAETDDQGAPRAMWATAVSTMAAADRVRRQGLPAVNRDHGGGKVFVMSLARKESVWIVNPVTGERIIGVVQKLTGEPTPSSRFDITIRDCRDSRPATHGNKQPFRRISSFVDWRKHSITKVQVDPIGRIRQARD

SEQ ID NO: 474 - protein, 1069 aa, unidentified
  REGION 1..1069: note = Description of Unknown: Cas Enzyme sequence
MPRCTLGLDLGPNSIGWALLDEENHRIIDLGVRVFPEGVDNFDTSKEVSRNEGRRTARSMRRGTKRRQRRRRRLRQGLIEAGLFPSNPQDQKMLLARDPYDLRARALEEKLDAYELGRVFYHLAQRRGFRSNAKKDRGDKEVQGMLAEINELEAEMRSTESPTLGTLLHEKAGQFNHASRRDGDKIRNRHTRREMYEEEFEAVCQAQRRLGHADLLTDELKYGQSGKQRYPLRPRRRPTRVSLLRAFGLHGLMFFQRRMYWPRSVVGACELEPKQPRCARADRRAQRFRVLQEVNNLRYVDPDAVGEHRLDQQQRTLLLDKLASREKMTFDQIRHALGFVEGIKFNLEKGKRPYLWGLVVDFRMAKALGKSWHERNEDEKDAIVAMLLDNEREEDSAVQCLTERFGMTTEQARAALEVDFPAGYGQLSLKAINRLLPHLERGLVYQSVSDPEQSALHAAGYLRRDELRRRLFDKLPDPRRVRDCPIGDIPNPVVKRTLVELRKVVNAIVREHGKPAAIHVEMGRDVKTRPKDRRSDAYRKYQERIDEMRHREERREAAAQKLREHGITVNRENITRYLLWEDQELQCIYSSPPRPISFTQLFGGEVHVDHILPYSRCLDDSQNNKAVCFRDANAEKGDRTPYEWLAQARPRQYEEVCQRAGKLMRDGRIAYAKYRRFLQKELELDDFIERQLNDTRYIAKVTAEYLRCLFDAPHQVLGLKGQLTAELRHHWGIENLLADLPDSPAWQEQDDLRPGEKNRADHRHHAIDAVVIALTDRRRLQQRSGIRIGGRAGVTREVDLEPWPHFRRDLTDAARKIYVSHRAERKVSGRLHEDTLYGGTERPGFWVARKPIEALSPNEIENIRDPGIQRIIIARLREHGVEFGRGTKKKGDPKVWKEALANLTMPSGVPIKKVRVVKPELTIQPVRQGTPNVAYVKPGATHHLCIFEFEEAGKTKYEPVFVTLLEAVARLKAGEPVIQRTHPERPDANFLMSLSQGEMVLVDWDGQEKLLVFRTGASTTWQLIFTEHTDARKSDTCRKYSATPNTLISQRKARKVTVDRLGRVRWASD

SEQ ID NO: 475 - protein, 994 aa, unidentified
  REGION 1..994: note = Description of Unknown: Cas Enzyme sequence
MADYVLGLDIGSNSIGWALIPNGADESAGPRDILTGVRVFPEGLDNLNQKKEQPRGQQRRQARGARRTHQRRSGRKRRLRTILRDKGLLPSFPGPGKPLPELWRTDPYALRKRGLDEALTLPELGRVLYHLCQRRGFKSNRKSKKRKEDGQIAKEAGELQKRIDEAGCRTLGEYLARLEEVERIRDRYTLRAMYEREFDALWAAQQPHHPQVLTEELKEQVHGAIFYQRPITWRAESIGECELEPGEKRAPQAHWLAQQFRVLQEVNNLRVIAEGGEERPLAPNERAKLVAALTVKRNLAFDKIRGLLGFGEWQTFNLESQGKRSALRGNLAGAALNTRKLRKWYEAAGPELRERVHDALAEVEDENELARLAREQWDLDDEQVAVLLGIKLPTGRSRLSLKAIRRVLPFLKAGLVFSEAKEKAGYALRVEPKLARLLPPVDEALPNLTNPLVRRGLTELRKVVNALVREHGTPREVVIELARDLKNSKQRRREIEFDNRRHRDENEAVRNRLVEEFNIPHPSRDDVIRYKLWEECGRICPYTGRCIGQTALFSGEFQVEHILPYSRTLDDSYMNKTLCEANENRTRKHDRTPYEAYHDDAERYEAILKRVQDLPYPKRRRFTQKEVEIDKFVQRQLNDTRYMSRAARDYLRTLGCAARCVKGQTTAELRHQWGLDLVEGLEGPVAKAERTDHRHHAIDAAVIAMTTRSALQRLSTVKYAPDRPQLAPPWESFREDVARAVTRISVSYRPRRKIAGKLHEETFYAPTDEPDAYAVRVPVADLTANMVDNIRDDPIRSIVKGAMLDASREKGFELRGQDTLRKVLGDRILTMPSGVPIRRVRVRRTERTLLPLGFDAEGRPIKAVKPGGNHHVEIYEAPDGTWSGRAVSRFEAHQRLQRGEPVVCREPEEALSFVMSLCVYDMVMLDTGAGVRLYRVQKQSVVDGRPYLVFRLHTASRIEDDATMARATSWTTLKAWGPRKAAVDPLGRILPCND

SEQ ID NO: 476 - protein, 1060 aa, unidentified
  REGION 1..1060: note = Description of Unknown: Cas Enzyme sequence
MSNLTLGLDLGPNSIGWALVDESQGAIVDLGVRVFPEGVDNFDSSKEVSRNEARRTARAMRRQIQRRSRRKRLLRGALVEAGLLPADPAEQQALLARNPYQLRAEALTRKLTPHELGRVMLHLGARRGFLSNRKKDRGDKEVKGMLAEINKLAAEMNADDAETLGWFLADKLDGLDHKNRNEQDRIRKRHTRRAMYEDEFQRIWQAQCELGHAELLTEKLKYGALGRQTYPCHPRRRRGQLSPLEAFGLHGIIFFQRRMYWPKSAVGLCELEPKQPRCLRADRRAQRFRLIQEVNNLRYVDLADGRHDEQPLNTEQRALLLSKLAETDKMTFDQIRTALGFLESVRFNLEKGKRPYLLGMVVDARMAKAVGIDWHNRPEQEKDAIVRALIDDEREDDAILHRAQQQWGMTSARAEAALNVDFPPGYVHLSLKAINRLLPHMEMGLVYQSLSDPRQSALHAAGYLRRDELQRRIFDRLPDPKRARDCPIGDIPNPVVKRTLVELRKLVNAILREYGKPAAIHVEMGRDVKTRPQKGTEAYRRYQDQLARMRDNEQRHGEAAEKLRERGIKPTRDARIRHLLWEDQQHACAYSDDPISFEQLFGGAVDVDHILPYSRCLDDSQNNKVVCFRRENEDKADRTPYEWLAAAQPERYERICQRASRWMKDGRISYPKYRRFLQKELKLDDFIERQLNDTRYIARATSEYLRCLFDADHAVLGLKGQLTAELRWRWGLETLLAELPDSPAWHHQSKLAPGEKNRADHRHHAIDAVVIALTNRRRLQQLARGRRPTDRSDELLGPPWNSFRADLKQAISELYVSHRARRKVRGRLHEDTFYGPTPQEGVWGARKMVVDLSPNEIEHVRDLGIRRIIMERLRQEGLEFGRGKKIDSKKFKQLMSDLRMPSGVPIKKVRLLKKEETIRPIRASSPDQAHVKPGSTHHLCIFEFEENGKTKRDAVFVTMLEAADRLQRRRPIIRRQHPDRPDARFVMSLSGGEMVLADWKGEEKLLVFRTAASTQGQLYFSEHTDARRSSEQAKHVATANSLQARKVTIDPLGRPRWAND

SEQ ID NO: 477 - protein, 986 aa, unidentified
  REGION 1..986: note = Description of Unknown: Cas Enzyme sequence
MWDDSGKIAQSDPYELRARALDEELQPSKFGRALYQIAQRRGFKSNRKSGQAKEDGKVKSSIGELRRKMASCEARTLGEYLHLQTLPDPDFPVDKLAFGMERLRNQYTGRDMYEEEFELIWKKQAEIKPDLYSPELKESVHEAIFFQRTYELTEERRATLPSRANAHRAPQLGECPLIPGEKRCSIGKWVAQRFRLLKEVNNLKVADENHRFDPLTPDQREIILHELSRKKELTFDQMRKLFGWGEDYVFNLEQGKRKKLKGNAIEYVLIKAFKEKQWNALDEDIKTEIRHALVEEEDEDIFRAKAKKWGLDEKSLEDLLAFEPPEGHLSYSEKALDIIVPYMEMGMPEFGSPNGDQIGAVDQALQDGKLIRKESDEEQEYLPMPDQEEIRNPIVQRTLSETRKVVNALIREYGKPARIHVELAREMKNPGKRREEMTKKNRENEARNDDARKWFEDHDFYNPKRNDLIKYKLWKEQEYKCAYTGKSITQEMLLSSHDQVEIDHILPISRTLDDSYMNKVLCLTSANRDKGNNTPYEWKGGPDNHEFDAMMVHLKNMPKMPYPKKNRFSRKEIDTGKCIERQLNDTKYVSKLAAKFLTLLYPPDMRVGQKAVFTVVGQVTAKLRHEWGLNKVLSADGKKNRADHRHHAIDAAVVACTNRKHLQALARSMRREGERVGPPLPDPWARFREDVQYVLKEREKIWDIDGQEIKTHGVLISHRVNRKILGGFHEETNYGPTNEKGKFVYRMPVERLTGASVEKIRDPKIRDIVRNHFIENGFDPERNRLKTPPKAVFNNGYPLLPISEKKRRKEPHLPEGVPIKKVRLLKTLSNPFEIKGEDGKTQRAAILGNNHHVEIVEFTKENGKKELRASVVPVLEAAKRARTDGKSMVRRDHGDSARFIMSLSRGESILLKNNDSYSFCYMQKLSGVYEFSSQMDLLFRSHNDARPASEGNKEPFARVQSVRAWAKHHPIKISISPVGKLTKAND

SEQ ID NO: 478 - protein, 1121 aa, unidentified
  REGION 1..1121: note = Description of Unknown: Cas Enzyme sequence
MEKKVNEKAPYILGLDLGPNSIGWALVRTKICDGEFETQGLLDTSHAGHPPLGVRVFEAGLQNFDTSKEASLNQARRAARSARRTISRRRARKGAVRKALQAGGLLPTNQDELQSVLAWNPYELRAAALNRQLEPYELGRAVVHMAQRRGFQSNRLTANPKEEKGLLAEISKLQDSIDAASARTLGEYLYMQTQATNGVLPVRLRARMAKMDLYEDAPRRTRRSMYEQEFDTIIKKQLHFWDSKLPSSHNRDAMERALSRAREAIFFQHGFAVTPERKAKAPSRANLHRAPGVHPCPYEPGEVGCPRSEWIAQRFRIVKDVQNLRISEAYEPERPLSDAERRLVVDKLSLSKKVTFSSLTKALTKQLELREPIEFNLERGGRSYLLGNETEATLGKAFGKSVWAKKPEADRGTIRTAFLSVTDSDALRKTLIDAGLSDPTRIDELLDFQPKDDGYLSFSKVAITKLLPLMEDEGLTEHEAIERLYPETHASDGLKVLPSLIAMQSDLEIRPKIPPRIQNQLTNLTNPIIRRSLTEVRKVVNAILRAHGKPEEIVIELAREMKQNKEARDQYSRDNHKRSLLRDQAREALRPLLGGTNPRKADVDRWMLWQEQRMQCPYCGKSIGQTAVCSAETEVDHILPRWQSLDDSLNNKVLCCANCNAAKGDRHPVAWLGKDSERFSTVLKRVRLCAKTASNPGGMSNAKIGRFEIEELDADDFVDSQLNDTRYISRLVSSYVSLLYPSEERVGQRRVRTSRGSLTAMLRRQWGLNDILPPLVQAHGEVIPGFEDHEGWTEKLRIDHRHHAVDALVIALSTRGHLKRLQDNWRRGQALNGQGNAFPEPWPSLRVDAQQALEQVNVSHRPMRRLRGALHEETYYGKLPRHDGTYVTRKRLSDLSPKMIGQIRDLGIRRIVEDRLKSMGWAEGKELPKNWHEKELVVPAGYRRRMRGGSTSPTPIRRVRITTNLGGAIALGDREHRFAKPGGNHCFQIAFPEECDGPKVRVLSRFRASQSFTNTQEQDSCSVQLTLHRKDSVLVLVPGLKTPVLAIVQKFSGPDSFDTQNLDLTLRHACDARKATIGNGSPLLRIKSIGKLFGTEMQLATVDPIGRVQPGPKLSQQAKND

SEQ ID NO: 479 - protein, 1196 aa, unidentified
  REGION 1..1196: note = Description of Unknown: Cas Enzyme sequence
MKLLGLDLGTNSVGSAWIDTDKKIIKMGVGVFPAGVEESEDKRGAPKNQDRRKNRQQRKSICRRSMLKRNLRQYLIKKKWIPTEKTELQEWYNLNPWILRKNAIEKELTEYEFGRVLLHFAQKRGAWWFDEEPEETGDTKKKKKDLSEVPGTVEYTKRKMKEKDAETFGKLIAIEYEARKTDTANNKKRNNRVKNRNNALGDKEMEFVADRHMILDEFLKIWAKQKSFNGELARQLNLPDAQKEIYNKQKTDIWRCQGVLFSQRKAYWNLGTLGRCELEPTDEKCPKADMYAQEFLVLTSVNNIRITPPGQETRKLDTPEREKVITAARKQKTVSESTVRTALGINKGENKALYTLNTDGDKFTVNGDWFYSQIVHDSFGENVWKSFNQNVKDSVNNAILKFEPNEEEDEQKLVAGCKKWWNLDDAQTGKFINVWKKRPKKDTRVNLSRKAIKNLLPYLRDGWSVTEARNMYAEDATNDANNLKRKRYSTKEIAVDKKIRHFLKKHPDMLPPVSDGISNPVVRKSIHEVRKHLMAHIKQFDKPDRVIIELSRKTRQSEKVIAKKMQINKAIDALTKEIIEKHNLNDGTITSTQKEAAIKRIRLCRQQRYVCAYSGVIEDKPYSCAYSGKSITEEQAKTGEGLEMDHIIPRSKGGNNGMSNLVLCYSTTNQGKKDRTPIDWLTEEEFGRLEQRFKHLKDEQDNYITKDNVDMSDKAKWTNLHRRTPKEGFTEEQLSSSAYAATQTTDWINKVLYGSQDRNKRYVFASNGDYTGILRRDWGLFFDEEGNRSEKGKKFRGDHRHHAVDAVVIALAPLFFQKIKESFIDFEKQKENKNIKPQWKTIAEPWEGFSQQVADEYKKLNVSHRAYNRKITGYLHKDSIYGPAIIYDRYQKDNEKKGIKKGELKRDENGNLVLKDGMYIKSIPVIKIEQGHLRMPNDWHSLKEEYKSAMANKKEIKKKMLALEEVPPAKSGIIRDIDLRDKICDWLKDNNFSEMKEAKKYIQENGLVINGTPIRKVRVLWKLNEVVEIPRKSFDYETGEFVKCEDRKSLRVYQTQNNHHIEIRESIKGQWNGDVITNFDAAKRARVDKKTIVDRNDTESGRFIMSLAKGEVVSMRHPATQNANYFVVFKIDSTGTIHFTKHTDANPASTKKKNVPIREDIDLTPQKLQKLGVAPGSVPYKVKISPLGEVRELIRD

SEQ ID NO: 480 - protein, 994 aa, unidentified
  REGION 1..994: note = Description of Unknown: Cas Enzyme sequence
MAHTLGLDIGSNSIGWAILDKEKQRLIDMGVRVFPEGVDKDKGLEKSKNATRREARGARRTRQRRNQRKQDLVKTLQTAGLLPQTESEIITLFQKKPNPYEIRKKGLDSKLELYEFGRVLYHLSQRRGFKSNRKSGESKDDGKVKKEAGELQKKIDAANCRTIGEYFAGLNPDEQRIRGRYTFRSMYEKEFGLLWAKQSEFYPQILTENLLKKICDEIIFFQRPMKPADELIGNCELEPGEKRCPKSDWFARRFRMLQDVNNLKIQNPDGTENKLNDEQRQELLKELSQKKELPFDKLREKLGLLDSQKFNLEQRGKIKNLKGDGFATAMRSKNVFGAKAWDAMNEQEKIILNNAFIELEDDELIKFLIAEYNLSQEQIETAMKAPLPQKYMSFSRKAILKLLLFMEQGCLTSEAIEKAGYRRDEGGSLAMIDKLPLPPDLRNPIVQKAMFEVRKLVNAVIGRYGKPKSIVIEMARDVHGSLSQREELHWQILENEKRNEDVKAKLRNDIDIVKPSRDDVIKYKLWEECGRKCPYTGKSISQNALFGQNPEFQIEHILPYDRSLDDSYMNKTLCDVHENIQIKQSQTPYEAYNHQPEKYEQILQRVTGSDMPYPKKKKFWQKELDLDKHIERELNDTRYICKETINYLKQLGVYVRGTRGKITSELRHQWGLDGIFDELGVWRNDDHRRHAVDAAVVAVTENEHLRRLAKSKYAVSGVVFEPPWPNFREETRENVKQINVSHRVRRKVSGQLHEETAYGPTGKKDENDQFVFVYRKKLEDLTLPMIEKIVDPVVRQIVKDRLEEQRKKNDKAVVGNKIFKNVWAEPLYMKNTKSDKKVPIKKVRIENIASNVIEMKDKFGKVYRAVEPGKNHHIEIFEYTDKKGETNRDSRVITMFDAVQRSRQGKPVVCKDYGDGRKFICSLVINDLVMMKNKTGEMDIYRVQKMDINKMVRFRHHTASTIDKKETYIDKTAHLFEGRKITVDLLGRICPAND

SEQ ID NO: 481 - protein, 1193 aa, unidentified
  REGION 1..1193: note = Description of Unknown: Cas Enzyme sequence
MRLLGLDIGTNSVGSAGVDTDERIIKMGVGVFPAGVEESEDKRGAPKNQARRTYRGQRRSIDRRAERKWQMRKFLAELSWTPTDTEMKLNPWSLRKKGLDGELTSREFGRVLLHLVQRRGAYGFNEEPEQPENTEKEEQENSKNTETKDKEAKKIKGAIDHAKEEMKNRNARTFGELMAVLYEERKIPLQKKDANGNTIKVGQAIRNRTNAAKEPAYEFCADRDLLRNEFDALWKKQKSLDSELANQLTDPVRKKLDDDLSDATWRYKGILFGQRKTYWDMGTMGRCDLEPTDLKCPKADMYAQEYLVLETLNNIKITPPGEVSRLLNKKEERPKVFELLKNPEKVFKNQKTVTAATVRKALGLHKGENKTLYTLSLDADPKRKLNTWWFYREIISSAISESNWEKLTLAQKDSVNKAILKFDPTSEKDKKYLAEGCKKWWGFDEKQAEKFIEAWTKRPKAEDRLEYSRRAIRNLLPYMRDGFTVNEARNLFAEDATNGATNEQRRRYSFKGGSGNHAMRRFQQKHPDLLPPAPAMLSNPVVRKAIHEVKRHVQEHIRKFGCKPDRVIVELVREARQSAVVRNKKLSENREREEEKRKIMKEFGLEQKTKNQQEKAVKRVLLCREQKEQCAYCGNGINAISEKTAAEGNGVEIDHIIPESRGGNSFLSNLLLCHTGCNRGKGNKTPKEWFTEERFQKFEQRLRHLKEKNLVKWDNLHKDTPDLDEFVASQLTDAAYAAKQVVNWLRDVLYNGERDRIKRVFTTSGRYTALLRRDWQLFPDSKKGEPFEKNRSDHRHHALDAVAIALSGPDRVQQISLLFQELEKAEEEDKKLAERPLISPPWGNVESFRAQVMNEWRNLVVSHRPAARKIVGAFHNDTQYGPILDKDGNLTEQFTLRKFAIELTPNHLRVPEGWDELREKLKNCSSKRERKSIRLEMLKLPDVKPGKSGVIRDRWFREEIRECLRTEGLDPDNFSEKEIKKLVKEKGLFLKSGVPIRQFTLLRSPTVITIPRKQWNSSTGKMEYDPHQKAIRAYEPQNNHHIEIREIRENEKGKWTGEVVRNFDAAKRVNPPKSSGLKPLPAVNRDDSQNGKFVMSLSIGEMVYMRHPETKVPGYFVVFKIDGTGTIHFTLHYDAGRDKETEKAKAREEVKKTGSKTGGLKPSDIQHLGIEEGQPPVKVWISPLGEVKELIRD

SEQ ID NO: 482 - protein, 1008 aa, unidentified
  REGION 1..1008: note = Description of Unknown: Cas Enzyme sequence
MATETVLGLDLGTNSIGWALIENRVGDSGGKTPCNLVNAGVRIFQEGVEANKNESRNVQRRMARAMRRQHRRRNLRRENLREALAGAGLLPADDAALGELLREDPYALRARGLDEALRPFEFGRALYHLAQRRGFKSNRKTDRKTDKKDSQTVRNAISDLGAEMNRTGARTLGEYLSRVGGDGARVRGRYTAREMYAQEFDALWTAQQPHQPALLTDHLRKILHDIIFFQLPLRIQKDLVGDCELETDKKRSPRGTWYAQQFRMLQDISHLAFPDLATGEVRPLTDQERAKLVAALQPRREMTFDQIRKELGLLDTQRFNFEEANHREKLKGNTTEWRLRQVFKKDYDRLGTATRDEIVYDLLFVEDHNVIRRHATERWALNAESAEKLESIELESGYLHLSQKAVQKLLPHLARGRSYMDAVQDAGYERPDQRKIEVRDQLEAGDLPELRNPIVMAALHQTLRVVNAIVREHGKPARIRVEMARDLKVSLRKRSEILSENAKNRRENDATRALLESDFGLSNPARENLIRYRIWKEGGMTCPYTGQAIPASAVFSADFEVDHILPLPRSGDDSYMNKVLCATSANREKGNRTPHEAWGADERRWGEITLRINSLPFPKRRRFLMEEIAEDFIARQLTDTRYIAREARSWLETVVGKNQVQVGKGGVTAALRRRWGLNSLLSDSGEKTRADHRHHAVDAVVIALTTPAVVQRMSRLSASGASTDDSGFAPPWEHFRDDVKRRIDAILVSHRVLREIRGALHEETNYGILGIKDAKGNDLYAVRKPLVRLTRAELDRVADPRVQEIVTARLRSCGVDLSNRNADKTQQWKQAMAAQPGPTMPNRKGAPVPIRKVRLHKPSSAMIPLKNPAGAVYRAVESGSNHHIVIYEITEGRAAGKWGGEVVSMFEAARRARHGESVVRRDMAAGRKFVMSLSINEAIRACVDGASGLWRVQKIDAGNTRITFRPHTDARQSDDKTLEKTISPGPLKSCGPLKVTIDPLGREHPAHD

SEQ ID NO: 483 - protein, 1010 aa, unidentified
  REGION 1..1010: note = Description of Unknown: Cas Enzyme sequence
VETELVLGLDLGTNSAGWALIEHSVGADGLAKPTRLVDAGVRIFPEGIEAKSSESRNVARRAARGMRRQHDRRNRRRDALRHRLQRAGLLPCEKTELAAVLSANPYALRARGLDEKLEPFELGRALYHLGNRRGFKSNRKTERKTNKKDKDTVQTAITDLQKKIEDAKARTLGEYLSRIDPFKERTRCRYTSRAMYEHEFDALWDAQRPNHPAILTDDLRRQIHETIFNQRPLKVQKNLVGKCELEPTRKRAPKGLWYAQQFRLLQDVSHLEVLDIKTGEIRKLNDGERKELIAELQKKQTMTFDQIRKTLGMLDGQKFNFETANHRDKLKGNSTEARLRKALAKSYDQLTAQTRDEIVRDLLYLDDADVIRSHAISRWKLNEEAAEKLAGIDLESGYLHLSERALRKLIPHLEQGLSYMEAVVAAGYERPDQRKIEVRKELTREDMPDLRNPIVTVAMNQTRRLVNAIVREHGKPARIRVEMARDLKVSLKKRSEILSENKKNRLENETTDKILEQDFGISNPSRDDRVRYRLWKEAGYACPYSGQTIPKQSLFSPDWEVDHILPLPLSGDDSYLNKVLCATAANRDKGDRTPWQAWHGEETRWDEIVHRIKVLPWPKRKRFEVKEIDTDVFIARQLNDTRYIAREARSYLETLTGKNGVQVGKGGVTAALRRRWGLNGILSDSGEKTRADHRHHAIDAVVIALTTVGVVKRMSRLSALGRRPEDAGFPPPWEHFRDDVKRRVETMLVSHQAQRGLRGPLHEETNYGILGLKDEKGNELFAVRKSLAAMTQSELERVADNNVREIVKAHLRAHGADPEARNAEKTEQWKKAMTPPNYPTLPNGNGAPVPIKKVRLHKPSGGMIRMKNRDGVEYRAVESGSNHHIVIFEHTAEGKKKGGWDGEVVSMFEAAQRIRRHEPIIRRDLGEGKKFVMSLSINEIVKVTENGESAYWRVQKIDAGNMRVTFRPQNDARKSEDKSFEKTIGVGPLKKLAPAKVTIDPVGREHPAHD

SEQ ID NO: 484 - protein, 1071 aa, unidentified
  REGION 1..1071: note = Description of Unknown: Cas Enzyme sequence
MASYVLGLDLGPTSVGWAAVNLDEKGNYTGLASLPDGSGGIPALGARIFPAGVDNLGQGQREAPRNQGRRLARSLRRRLRRCRGRRLKLLTLLRQMGWLPGDAAALMRLYALDPYTLRAKGLTAPLSLPEFGRVLLHLAKRRGFQSNRRVTAKKEEEGKIKDGLKRLAEDLGEKTLGQHFSEHRQENRFVAIRNRRDSYRWMTHRDQYRQEFDRLWESQQRFHPDQLLGELRQRIAAVLFFQLPFELSHRRKQKVIGRCTLFPTQQRCPLAERAAQCFRVMQKLNDLRIRDSHGRDRPLTVDQWQAVRARLMTSKKVKFDSLRKLLKLVSDEQFNFEFEGNSDLTGHEIDAQLAGRKVFGTKGWGKLTDQHRDQVWQRVVDWLIKGQQSPDDLAVAIEQDFGIKAADPSILGKLHVPPGHVAYSKKALAWLLPELEKGHNLHDARQAVAAAAGFRRTWRTHKQLPPPDRAHGFETTNPTVRAVLHQVRQVVNALIRDLGKPERFVVEFARPLKANKEGRQEILRRQARNRKARLIARERICEARGWPSEAAAKVSGKDVNKYLLWQEQGEYCPYSGRRIGVEVLLNGETEIDHIIPRSLSLDNSLNNKVVCFTAANRDKGQRTPFDWLGADPKRWPIVERVIARWNPKATANDESQTPATGTAATANLDKWRRFHLAQQDIAEKYTPNYLLNDTSFLSRMVRDYLKRLYPVRTAIDQQVRTSKGGVTSELRKFWGLNALLGSDDPKAKNRADLRHHALDAAVIAVTEANMVQKVTAALHAAGPWRRASELNVPLPWRSYRDDLQAALSALNVSHRVERKAKGALHKETYYAKETNGAQAGKFITRKPVASLTRGMVERIVDKEVKKLAHDRLTQFDGDAKKAFAEPLALPNGRAGETPVYRVRVWENSNTMIPIRGPQRGKQTVWVEPGSNHHLAIFEVEQRGEVGWVRTLCSTYEAAQRLRRREPVIRRQHPDFSEARFVMSLSKGETLLFQDEQGQSRLARVRKFSAGDLARPEAVDLLVWELTLGDLNENITKDTPNVWRLRNINDLRKMQARKVTVDALGRIRWAHD

SEQ ID NO: 485 - protein, 1291 aa, unidentified
  REGION 1..1291: note = Description of Unknown: Cas Enzyme sequence
RRIVQRRAQRKRWVREVLAQGGLLPKDAEERRMVLGPYRKGEECEIEKWNPWVLRREGLRRELNPFEFGRVLVHLNQRRGALGFDTQPDEEGEVKAAIDHVRVEMLKRYGEGQERERLLALHESETEEEDRGEKSKKGKEGRFSKEFAKWMEQSNATFGRMMADAMEERRVYFLDSGGNPKKNRKGENRWYQHKPVRNRRDSFEFHADRALIHDEFEKLWARQKSYGGELACLLSADLRRQLDDPSEDGVWRHKGAIFGQRRTYWDIGSLGRCDLEPTDRCAPIADMHAQQFRVIETVNNIRIREEGQAERVLTGEEREKVINLLRGPLGKKRKGKSEAKESASVTDIRKALGLKARDKSVRLNLEEDEERKINTDWFYREIVHGAIGVQEWERMDDHRRESINRGILKFEPSMEKHQEKLRRGAVAWWGLPVQAADKLVEAWKRRGELGKRVRLSRRAIRNLLPYMNRFEESKGHWPTQVEARIAFSEDPGARDATTGAAPDEKARRRYASGTKGINAASRYYMRQGKHQIRGENGAVLAPLPPAPMVSNPVVRKAIHQVRAHIMAYLRKFGCKPDRIVIEYFRGIKGTAKQGMEQLKSNRKREGERKAIEENLKAWGIPRSNWGQAVFRVRMCKEQKGICPLSIGGPNDGRNITELMAAEGRDVEIAHIIPESITGRTMDFNNVVLCFRDANRNQGARTPVDWLGPSGLKEVLRRLEKTDVRRNKVKWKRLQMKTPDAEEYRSAQATDTAYAARQVAAYLQSALYEGEADGKRHIFATKGEYTARLRADWGLHESEIDRESGLEPAAQAQVDAEELKEDPDLLQRLRRARKDPTKDRVDHRHHALDALVNAFTPELVSILGEQAGRAREYREKHGRWPRRLPITPPWGMATEQFRAMALSALNKLVVTHVPAKRRLTGALHEDNPCGQSKKYDGLYVIHKPVTDLAPAHFTKPELPKKGPRTWRIPGKGQNQAIGSGGMRVALRACLERGRVRATSQDFAQKEDDQKKEACALLAEYGCLVPAPNLDDSWRTISQWLDTEKPALVVDLERFPKRKNRKEATKQKKAFALAVNLIHAHNGFVMRSGVPIKGLTLLLKLNDPIVIERDGVKRFYRGGNNHHIEILEHAKTGKWSGETISMYQAAQRNIERLRALKKAGVPPARELRKMQKGERGRYAVIVSGISREYPIVNRAGRDGKKFVMSLAEGEMIYGRRWDGKTKRPIGRASYHVVAKLDDKRIFFATHWDARRADAQERWAVSGAGLRACGPEDNTPPAKVWVSPLGEVRFLQGD

SEQ ID NO: 486 - protein, 1059 aa, unidentified
  REGION 1..1059: note = Description of Unknown: Cas Enzyme sequence
MIAEDLRTPFVLGLDIGVSSIGWALVALDSAGLPTGIVRTGVHLFDAGVDGGKADPETALLQGREQSRAKPRRDARAMRRQTWRRARRKRKVLRSLMRTGLLPHGDTSTPASIDQYLKELDARLRDRWERESSHRSRQLLPYRLREAAVTARIEPDELGRALYHLAQRRGFLSNRKTPDRDEESSTVKKAIGELAEKVASHEPPTLGAYLGSLHPDEQRLRGRWTSRHMYVDEFERIWSEQSKHHDLSEEDRRGVFEAIFWQRPLKDQSHLVGRCSLIQGRKRAPIAERIAQKFRVLQQVNHLRVVFDGYTERPLTPEERDTLLDTLVKHGDLTVAAARRALDLPRGATFSIEQGGEKRLIGHRTDAAMRRIFGETQWDALSEDDKDRVVHDLRSVREPDALRRIGERRWGLAKEAAEEFADTLLEEGHSRHCRDALRRLVSRMETDGLTYAEARKDEFPESFRSEKPHNLLPPLADYEPDLRNPSVARALTEVRKLVNAVIRRWGKPERIHIELARDLKASRGRREKAAKRMRDREKERTTAAEAIARELGIKQPKRWMVEKWLLAEECGWRCPYTGRDFGPRELLGTSSQFDVEHIWPFSKSLDNSFLNKTICYHEENRNRKKGRSPLDAYSTEELEQIVERVSRFRGDSFVIREKVRRFSTPLDSGFTNRHLQETRYIGRLVCEYVGLLYGGRIENVGEENARQRIVTPSGGLTAWLRRGWGLDAVLSEDDEKTREDHRHHAVDALVVACAGQAAIQRLASAAESAERLGKERPFENIEHPWAGFIDEARQSIRSLVVSHRQSRRLATREGRGGSIGIRGALHEETIYSKPHNGRVRVRKELAALSANDLAKELVVDKRALRAIKARLAQLGESNPAKAFRDDANLPEVRGADGRQVKLRRVRVETNVAPRAVGRGPSERRVKGGSNFQTAVYEVTDNKGRTVWEHRLVTLFEAAQAVARGAPVAPARTEGRLLFTLMKGDYLEMDCPDKTEGRDVFRVLAISDGEIKVVRTWDGRASAISGKDRVRITGRGDRLRQLNARKVRVTHLGEIVNAGG

SEQ ID NO: 487 - protein, 1041 aa, unidentified
  REGION 1..1041: note = Description of Unknown: Cas Enzyme sequence
MADHKHTILGLDLGTTSIGWCLIEANPTPETIIDMGVRIFPEGVDRTKGEKSLNQDRREARSLRRQGCRRARRKLKLLHALQELKLLPKNDKELETLFALNPYQLRADALHKKLNSHHLGRTLYHLGQRRGFLSNRKTGTSKEDGVVNESISTIDKAMNKGGFMTLGEYLNHLDQQQLGTRGHYTARRMYEHEFEKIWQAQEKHHPQILDVANKKNLRDILFFQRPLKIQKHLIGGCEFEKGHKRVASAMPVAQAFRFWQNLNNLKITFNDGTERFLNDKERLKLAEGLTFKKQLSWEQIRKLLDFPDRSTHFNLERVRKTGLLGNQTATTLSKTLANGVKGQKLWQALGTKKQEQLTNDLLNILDDKSLIKRLREYWQFNDEQIERLVSAPLAKGYLHISQKAARNILEHMSSVSTPDNKGLTYDQACEKAGYEHTKPLTKRNDNTLLYPGKAAVDKKNKKANHAAFLSDDRILFSELRNPMVERTLYQVRRVVNTLIKKYGKPDIIRVEMARDMKASRKNREDADKRNKKFEKLNNDAKAALINDHGIEHPSRADIIKYRLWQECNHECPYTGKTINADALLNGEFEVEHIIPYSRCLNDSYMNKTLCHTKENTDKGNRTPGEFYSGDEERYKEVLQRAGKLPHAKFKRFALDAVNDMEDFVSQQLNETRYISKQAVAYLMQLGVKVEPVKGGTTALLRRSWQLNNVLGVTGEKNRDDHRHHAIDALAVSLTNRSAVRALSTAHLIQGRLRIEEQKEPMPDLRQQATQAANNIIVSHKTNHKIAGALHKEFIYGITGESDKKGVPEVVIRKPVSELSKEKDIERIRDPQIRRLAYTHLQNSKNFKDAFNNPENPFGMETKKGLFLPIKKTRMVYHRTVQQIGHDVENNAIKRATTLKPKHSSKSTVRHVWTRNNHHIAIFEYQDKKDKRKWRGEVVSMFEAATRKRLNQDSISKSTGNDNEKFVMAIHKEDTLQLKHKGKKLICRVQKFDQSGQIILRVHTDASKDKTLAISKTPNTLLESNTTKITVNVIGNLLPAYD

SEQ ID NO: 488 - protein, 1015 aa, unidentified
  REGION 1..1015: note = Description of Unknown: Cas Enzyme sequence
MDMVMLGLDVGVSSVGWALIDEGNKRIIATGVRVFPEGVDRDQQGGEKSKNETRRTARGARRQLARRARRKRRLRKILVSAGLLPDDPDRLVECLAVNPYALRRRGLDEPLTPHEFGRAILHLAQRRGFLSNRKTDKARAKETEGMKAEIDALAVAIDASGCRTLGEYLSRLAAEHKPTEVAEVDQRVRRRHTRRDMYEQEFASLWDAQQRYHKERLCDQLRQRVHRTIFYQRAMYWPKSMIGRCELEPKGKRCARADRAAQRFRMLQEVNNLRLLDTAAHSERELTPEERQRLLGYLARAKQRTFDQIRKKLGLSEAIRFNYERAERTKLKGHETDAAFSAKKVLGKDWFGLSDQQRDAIVTIVHDEPNEAEALRGLVEDCGLTPDQARRAAGVHLGEGRMSYSRQAIDRLLPHLERGLPLMGDDETNSALHAAGYLRPDQREVQQRAKLPPAPDLPNPIVRQGLVEVRKVVNAVIGEYGMPVRVHVELAREAKRSLEGRRELLIDNAKRRRARAAAAAAIEEFGVKPTRGTINKYLLWVEQGGECAYSGQTISPQMLLSDQTDVDHILPRWRSLDDSLANKVVCLHSENAAKGDQTPREWLADSDPEKYARVLQVAKRLPYNKQRKFIQADIELDDFVARQLTDTSYISRAVTQYLRCLGVSVVCPRGQMTAELRYRWGLTTILNPDGDGKKNRADHRHHAIDAIVIAMTSPARLHALASARGKDVAGPWEGFRADVEASVSAINVSHRVRRRVAGALHEATIYGTTRKAQDNEASAGRARGWAKDWVESPEVYVRRKPVTDLTDTKHLDKIRDPAIRRILAEHLRSRGIDPDRPGKIPGEVLKGDGAPRMPSGVPIRRVRMLEKSKTFRPVSSRRPGQHVKPGKNHHIVYRVVEINGQTRWQGEVVTMWDAARRGRNGQPLVDRGDRDGAKFVMSLSINEAFLIDGDGGPQLCIVRKLDQCTGRLDYKLHTDARQAKELRPENLYFSPNQMCALNARKVTIDPLGRIRDAHD

SEQ ID NO: 489 - protein, 1015 aa, unidentified
  REGION 1..1015: note = Description of Unknown: Cas Enzyme sequence
MDMVMLGLDMGVSSVGWALIDEGNKRIIATGVRVFPEGVDRDQQGGEKSKNETRRTARGARRQLARRARRKRQLRGILSDAGLLPDDPERLAQVLAANPYELRRRGLDEPLTPHEFGRAILHLGQRRGFLSNRKTDKVRAKETGDMKAEINALAGAIDASGCRTLGEYLSKLGAEHKPTEVVEVDQRVRRRHTRRDMYEHEFASLWDAQQRYHKERLCEELRQRVHRTIFYQRAMYWPKTMIGRCELEPKAKRCASADRAAQRFRMLQEVNNVRLLDTAAHSERELTPEERQTLLGYLATAKQRTFDQIRKKLGFSEAIRFNYERAERTKLKGHETDAAFGAKKVLGKDWFGLSDQQRDAVVTIVHDEPNEAEALRGLVEDCGLTPEQARRAAGVHLGEGRMSYSREAIDKLLPHLERGLLLMGDDETNSALHAAGYLRPDQREVRQRAQLPPAPDLPNPIVRQGLVEVRKVVNAVIGEYGMPVRVHVELARDAKRSLEGRRELLIDNAKRRRAREAAAEAIEEFGVKATRATINKYLLWVEQGGDCAYSGQTISPQMLLSDQTDVDHILPRWRSLDDSMANKVVCLASENAAKGDQTPREWLADSDPEKYARVLQVAKRLRYNKQRKFIQADIQLDDFVARQLTDTSYISRAVTQYLRCLGASVVCPRGQMTAELRYRWGLTTILNPDGDGKKNRADHRHHAIYAIVIAMTSPARLHALASARGKNVAGPWEGFRADVEASVGAINVTHRVRRRVTGALHEATIYGTTCKAQDNEASAGRARGWAKDWVESPEVYVRRKPVTDLTDTKHLDKIRDPAIRRILAEHLRSRGIDPDRAGKIPGEALKGDGAPRMPSGVPIRRVRMLEESKTFRPVSTRRPGQHVKPGNNHHIVYRAVEINGQTRWQGEVVTMWDAARRGRNGQPLVDRGDRDGAKFVMSLSINEAFLIDGDGGPQLCIVRKLDQRSGRLHYKLHTDARQSGEINRDNLSLSANALRAANARKVAIDPLGRLRNASD

SEQ ID NO: 490 - protein, 1064 aa, unidentified
  REGION 1..1064: note = Description of Unknown: Cas Enzyme sequence
MGLTLGLDIGPNSIGWALVDDVEQRIVDLGVRVFPEGVDNFDTRKEKSRNEDRRIARGMRRQIARRARRKRQLREALIASGLYPASLHEQQALSLLNPYELRAKGLDEKLTPHEFGRVLLHLNQRRGFLSNRKRDRADKEVKGMLEEISQLAREIADSGSRTLGEYLFRKSASFDHARRVENDHIRNRHTRRDMLEQEFNALWDAQAKHHPKLLTATLRFGERGAGQYPCKPQSKSGTQSLVQAFGLHGMIFFQRKMYWPKSVVGLCELESGEKRCQRFDRHAQRFRLLQEVNNLRYIDPGTREECRLDDEQRTLLLDYLSRREKATFDEIRRKLGFLETVKFNLERGERSSLKGMVVDWMMAKAVGKEWHDRPEHEKDVIVRRLLDNEREDDLLTEWLVREFGFSRDQAEKAVEVDLPAGYIHLSLKAIDKLLPHLERGLVYQSASDPEQSALHAAGYLRRDELQRRLFDRLPDPRRVRLRDCAIGDIPNPIVKRAIVELRKVVNAILREYGKPDAIHVEMARSVQLGKTARDEYNRRIREREAERDRAATEIRNQGIAVNRESIQRFLLWEQQLHECIYCQRTISQQQLFGGEVDVDHILPYSRSLDDSQNNQVVAHRQCNHDKGQRTPYEWLAASEPQRYETICQHAMSLLQKARIPYSKYRKFLQKELDLDEFISRQLTDTGYIARVAAEYLRLLVEQPHHVLGLKGQHTAELRRQWGLNSILRHDELDLKNREDHRHHAVDALVVALTNRQVLQQLSRATRDRAWRDRDSGEVVHFRQYAGAPLPEPWENFRRDAENAVNKIYVSQRVRRKARGALHAEMPYGPTSNPGVFVKRKPVAELSASEIDKIRDEGIKRLVIAHLQAHGLEFGRGKSVDAKRLKTALSDVRMPSGVPVKKVRLLVPEQTVQPIRSRAAQRHNDETRIAHVRPGDNHHACLFEWEEKGKVKRDAEYVSRLEASRRLRDREPLIRRTHSEVPHARFLMSLCPGDTVLVDVDGQSRLMVVSTLVSTQKRIHLVDSRDARRSSDRLDIGLSPNSLIEKYHARKVIVDPLGRIRWAND

SEQ ID NO: 491 - protein, 1011 aa, unidentified
  REGION 1..1011: note = Description of Unknown: Cas Enzyme sequence
MSLTLGLDLGPNSIGWALIDQSCKKVLATGVRVFPEGVKRKKGHEKSKNAERRTARAARRQIARRARRKIQLRELLTQNGLLPENEEELDHLLELNPYKLRKDGLDCKLTLHEFGRTLLHLTQRRGFLSNRKTDKSQENDVKGMKAEISDLAQKIENNNCRTLGEYLAILHSNHEPTSDNNDHKVRSRHTHRDMYRHEFDTLWEIQQKHHPQLLTENLKQQMSNIIFFQRKMYWPKSVVGRCDLEPKHRRCPRADRSAQRFRMLQEVNNLRVIDSGQRMERPLTDDERAIVLDYLSTAKDRKFDQIRKKLKLSDTVRFNLQAGQRDKLDGHKTDALLAAKKALGKDYLKMPEDQKDTLIAILIEEEREDEALRRLTEEAQLTEEQAQKAITVHLPDGYAKFSRLAIEKLLPHLEKGMLLMGDDETNSALHAAGYLRPDQRQIKKYSFLPSSPDLPNPIVRQALVEVRKVVNAIIREYGKPDSIHVELAREAKMSAEQRYQHIIKNEQNRQRRDEAAEFIRSFGYKPTRDTIQKYLLWKEQDEKCIYSGQPISPEQLLSSATDIDHILPRWRSLDNSMANKVVCFRQANADKGQRTPWEWLYDSEPEQYKRILLQARDLPSNKQRKFLQTEIQTDEFVNRQLNDTAYISRCVAQYLQCLGAKILTPRGSMTAQLRRLWGLNTILDFNGRAEKNRADHRHHAVDAAVLAMIDHQRLHKLANKGEDIPEPWDDFRSDIENSVLNINVSCRVRRKISGSFHKATFYGATQKYSKNIADYDQRPWAKNWTEHHNTYVLRKLLTDLSDTKQLSKVRDVTIRNILSDHLRRLGIDPDKPNKIPKTAFKGDNIPRMPSGVPINRARMLEASETFRPVSGRRHYQYVNPNSNHHIVYRSTKQGKNEKWSAEVITTWDAALRARKGLPIVDKKEDDNHDFIMSLSIGEAFTFQDENNQTQLCVVRKIDQRIKRIYYKKHVDARTAGEMEKDNLYLSPVQMQKLNARKVTVDPLGRIRWAND

SEQ ID NO: 492 - protein, 1280 aa, unidentified
  REGION 1..1280: note = Description of Unknown: Cas Enzyme sequence
MAVLLGLDIGSNSVGSAWVDTDQKVIRLAASVFPAGVDEQEDKRGAPKNQARRQTRSQRRNIHRRAERKRLLARFLIEQGLLPPGGDALRKHYDIDPWALRRKALKESLTPHEFGRVLVHLAQRRGAVGVVSDPDDPDEGKVKDGMDRLAKEMTEAGAHTVGQFIADRIEQAQRPVERAPDEAYSRRTVERRRSQKVRWKQRGESAPAPHVHDPVRNRKYRIPEDQQLFAGRELIRKEFHGIVEAQRSFKENDLAPRLTDDLVRQLDDPHQTDTWRHRGRLFGQRRTYWDTGTLGRCVLEPTERCAPIADRHASYYRVVETVNNIKIRERGQTPCPLNADQREKIIALLRGPLGVHKKGKHAGKAKSSVSATEIRMALGFAKRKGKNDPIQLSIEADEDREINTDWFHRESVHGAFGEERWNAMPEDRRESVNRAILKFDTDQSDDAAKLHKGAMEWWGLEAAAADRLIEAWKQRPKLEKRLNLSRRAILNLLPIMENFETANNRWPTQQEARKTYAKTLEDEHARRRYETGAPGLTAADRYYMRLPKHQVADGVPELPPAPTLSNPVVRKAIHEVRRHVMAYLRQYGRKPDRVVIEMARVTKQSERQRNEALARNRARDKIRKSVVDEVLPAAFGPSEARLSLNQQRSAVDRVILARQQTQICPYCGKAGLTDKVAAKGDDLEIDHIVPYSRCGDNGLNNKVLVHRECNRGKTNNTPREWWGGEFDNRIHIAENLFKDIKPEKGDYFRKRDFDRKWQNFNREVREGEEWKNSQLTDTAYAARQVAAYLADALYEGRGLPERGDGEGRQKIYFTMGRFTAMLRKDWQLFETLKSDTGTMAADEELQLAEKNRGDHRQHAIDAVTIALTDPGIKNTLASWAAQAAEYYEKNRRWPRRAPVQPPWSDVQSFRRQVLSQVYDRFDSGEFASGQRDEQGNHKLLIVSHRPVKRRLVGAFHEATHYGPVLAPLPPHRSESAETLFTNRISADKLTPNHLHVPEGWDELSARLDDPAVCDTAKRAVRRELTAMQDPSPGKPGIVRDRALRDRLRKCLRVNGLNPDDFSKNDIKRLCDPKDWKLTQASGVPIKGVVLLRTNTDPVIIPRKLLDPATGKMVPHMDPDDPTKPHPRTKRVYIGGNNHHIEIRERVRKRKGQPISQWTGEIVSTFDAAKRVRIRKQPAVDRSDTDAGRFVMSLAEGEMIHARRSDRPEEAPSYFVVCKLDKAGNSCRIHFAPQWDARKASEQDRWAVAPNALKDCGPEPGKPPVKVRVGPLGDVLPLEKD

SEQ ID NO: 493 - protein, 1016 aa, unidentified
  REGION 1..1016: note = Description of Unknown: Cas Enzyme sequence
MAGRVLGLDVGATSVGWALVQEDDGRIIAAGVRVFPEGVDRDQQGGEQSKTAARRTARGMRRQLARRARRKRQLQETLIASGLLPRETAELARVFALNPYELRCRSLDERLEPYEVGRVLVHLNQRRGFLSNRKTDKARAADTKGMLAEISKLSEAITANGCRTLGEYLALAARSFDRVRSAPEQRLRHRHTRRDMYEHEFDAIWVAQGRYHPLLLTDPLRERVRRIIFFQRRMYWPKSVVGRCELEPKEKRCPRADRAAQRFRMLCEVNNLRVLDTASRLERPLTAEERQAVLDYLATSKERKFQDMRKHLGFTDHVRFTLEGPERDKLKGHETDAALGSPKALGKRWKGLSEEAKDAIVSVLVHEDHEEEALRCLTGQSGLSALEAEHALAVNLPDGYIRFCRRAIDRLLPHLERGLHLMADDVSNSALHAAGYLRPDEREVRQRDFLPSAPDLPNPIVRQAMVEVRKVVNAIIREYGRPDRIHVELVREAKRSFDERREIRFENAKRRRAREDAARRIEEYGDKPTGGKIEKYLLWEEQGHECVYSGQPISLAQLLSDAVNVDHILPRWRSLDDSRANKVVALHEENAAKGDRTPREWLEDGDPQKYDAVLQRANKLPGNKRRKFIQKDIVLDDFVNRQLTDTAYISRLVSQYLRCLGAPIVTPRGQMTADLRHFWGLDKILDPDGRGEKNRADHRHHAIDALVIAMTNPQRLHALANERGHNVRPPWEGFWEDARRVVGAINVSHRVQRRLHGALHEDTFYGATQKRTGARVPSENVTRPWARSWIEDTQTYVRRKDVAELTDTKQLAKVRDAALRELLREHLRQRGVDPDKPGRIPGDAFRGVDAPRMASGVPVRRVRMVEESETFRPVSAHRAFQHVKPGRNHHVVYRAIGEGDASRWQAEVVTMWEAARRARAGERLVDRADGPNGRFVMSLSINEAFEVDSADGGRLLCVVRKLDQRSKRVNYKLHTDARKAGEINKENLYLSADGMHQRHAEKVVLDALGRIRRARD

SEQ ID NO: 494 - protein, 1048 aa, unidentified
  REGION 1..1048: note = Description of Unknown: Cas Enzyme sequence
MSGVVSYGLGLDQGVASIGWAVLALDAAGRPVGVERMGAHLFEAGTEGDIEGGRDESRAGPRRMARQLRKQYRRRVLRKKRLLRWLQELGLMPAGDISTPEGRDTLIKSLDEKLRLKWETDGADHRIRQLLPYRLRAAGLTGKLEPFELGRALYHLAQRRGYLSNRKQQAAEGGGTTEGESKKKDEDGGEVRAAIIELQTQMKGAGCKSLAEYFATLDPTGEMGQRLRGRWTAREMFLEEFGRIVAEQSKHHAALTSEAIRSVHRAIFYQRPLQSMSHLIGECELAPGKKRCPLGHRMAQRFRLLQRVNDLEIRFPDFTRRNLTREERERLIEALQREGDLSFAKLKTKAWFGLPKGAAFNLEQGGEKRLVGNRTEAKCRAVFGDAAWDALSEEQRDLVVQDLIVFEKPGALAKRGAKVWGLSAEQAEMLGDCVLEPGFAAHSKEALAKLLVRLEDGTPYATAVKEEFGKGGTTSEVHGMLPPVEKVLGDLRNPTVTRALTELRKLVNAVVRKYGTPAWIRLELARDLKRARKHRERMSKEMRAQEDRREIARGHVLQKARVASASRADIERVLLAEECNWTCPYTGKMFAMADIVGRHPQVDVEHIWPLSRSLDDSYLNKTLCFVDENRNVKKNRTPFEAYARVPERWQQMLDRVRMFRGDAARIKLERFMKEEIPEGFAQRHLAETRKIGAASAEYLGLLFGGEIDGNHNRRVFVTTGGLTAHLRREWHLNGVLSDDGEKTREDHRHHAIDALVVALTDTRAVQALQTAAERASETGRRLFAPVDEPWENFVNTVREKVDQINVSHRQSRRMAGKLHAETNYSRPTGPTGERRIRKELAKLSEKEVERIIDLKVRAAVEARIKELGLKPKGTARQYTDFADPQTHPFTITKAGNKNPIHKVRLASSEKPWAVANGVRERFVTSTKGSNHHAVIAKGADGKWTDEVVPLMDLRSGTPQPRRPHDGSSFTLAAGEFVLANSKDGGDVLLRVTKLSDGQIAMIRHNDGRRVDEIKKAKDVVYKSGSSLVRDGMRKVTVSYLGEIRRAGG

SEQ ID NO: 495 - protein, 1101 aa, unidentified
  REGION 1..1101: note = Description of Unknown: Cas Enzyme sequence
VSEVVSYGLGLDQGVASIGWAVLALDASGKPIGVERLGAHLFEVGVGTGVGEFAAGKKDTSHAIPRRLARQARKQYRARVLRKKRLLRWLQELGLMPGGDISSAEGRDALLKSLDDQLRKKWETGAADHRTRQLLPYRLRAAGLTGKLEPFELGRALYHLAQRRGYLSNRKAQSASKDPCDAKKDKSSAKLKADEAQAKEDPGVVRDAIVELQRQMEGAGCKTLAEYFSTLDPAGTFNDRIRGRWTAREMFLEEFNRIWDEQSKHHPKLNEKAKPRLHREIKHPTPKELHRRSERDGPNPIPRGTMESRPYRDEVYDAIFTQRPLQSMSHLIGRCDLVPDKKRCPLGHRMAQRFRLLQGVNNLAIQLPDHSRHPLSREQRDSLIDILQRDGGITFPKLRKMFGLPKGARFNLEEGGEERLMGNRTEAKCRCIFGDERWDAMSDTEKDGVVQDLLLFAKPSALAKRGLRVWKLSKDQADALGDCVLENGYAAHSKEALAMLLPTMEDGTPYSTALKEAKRAAGHDIDDDGVFDLLPPVEDKKHGLGPLRNPTVTRALTELRKLVNAIVRKYGKPKWIRIELARDLKRARVHRERISAEMRAQEKRRDAARGYVLQKAGIANASRADIERVLLAEECGWICPYTGKQFGMADVVGRHPRVDVEHIRPFSRSLDDSYLNKTLCFVHENRNIKKSQTPFETYSRSPERWEEMLDRVRRFKGDAARIKLERFMEKEIPEGFAQRHLAETRKIGAASAEYLGLLYGGEIDANHNRRVFVTTGGLTAHLRREWHLNGVLSDDGEKTREDHRHHAVDALVVALTDTRAVQALQTAAERASEAGRRLFAPVEAPWKDFLDSVREKVGQINVSHRQSRRVAGKLHAETNYSRPTGPTGERRIRKELAKLSEKEVERIIDPKVRAAVEARIKELSLKPKGPARQYTDFADPKTHPFTITKAGARNPIHKVRLKSSEKPWAVGKGPRERFVTSTAGSNHHAVLSKLPDGKWTDRPVAIIDVRAESTQARPHGGTSMTLAAGEFVLLKDEAGRESLYRVLSVSDGDIELIAHNDARLSTERKKDRTRGGANALMKRGLRKVTVTYLGEIRRAGG

SEQ ID NO: 496 - protein, 1046 aa, unidentified
  REGION 1..1046: note = Description of Unknown: Cas Enzyme sequence
MQAMTAQQSYIIGLDIGVASIGWAILDLDGHGRISGIRRTGAHLFEAGIDAGKLDPETALTRGREQSKAKPRRDARAMRRQTWRRARRKKKVLGALIRHGLLPEGEISTPAGIDAYVKRLDLQLRDRWEPPGTSHADRQRLPYRLREAAATRPITADEFGRALYHLAQRRGFLSNRKTPERDDDVSQMKQEIGDLEQRITAHKTPTLGAYLCSLDPDDVRLRARWTSRAMYEHEFDRIWSEQTDVHGLTDAARAEIHDAIFYQRPLKDQSHLIGRCSLTGAPRCPIALRVAQRFRVLQQVNHLRIVSDDFSERSLSQEERRLLIETLCTEGDCKMARAKRAAGLPPRLVKFSIERGGEKKLVGHRTDAALRAVFGDAWNRLSEDDRDAVVEDVRCVRNAGTLARIGRRRWGLDAAQAAALADVTLEEGHSAHGRSALQRLVAHMEDGTAYATARKAEFPESFSSDAPRDFLPSLDDWDPDLRNPSITRALSELRKLVNAIVRRHGKPARMHIELARDLKSGRSRRAKVARRMRDRQTERERAAEAITRELGYVDPKRWQIEKWLLAEECGWRCPFTGRSFGAQELMGSSSQFDVEHIWPFSKSLDNSFLNKTICYHEENRHRKRGQTPVAAYGGTPDRFDEILQRVRAFGGDRFAIHEKLRRFTNEIDAGFTNRHLQETRYIGRLACDYLGLLYGGRVEAMGEEGSSLRIVTPSGGLTAWLRRGWGMNRILSDTADKTRSDHRHHAVDAIVIAVADQGAIQRLADAAERIERQGRERPFDEIDLPWEGFDEDARRAIETIVVSHRQQRRIRGKLHEDTLFSQERNGLRRVRKELWKLTKTDVQKGKIVDRRALALIRERLAELGIDDPAKAFQDRTNCPLVRGADGKMVPLHRVRVEAGGTYRRFGTGVSERYAATASNHHMAFYDRAVPGGGIYRIAEVVSLPDATDRVRAGQPVVDREDRRGRHFAFSLAKGEYVIFDEGVKHERLCRVLTISDNDIELVAHHDGRAAKDRRAERIRMTKGRIAQGNFRKVYVNYLGEVRDAGG

SEQ ID NO: 497 - protein, 1091 aa, unidentified
  REGION 1..1091: note = Description of Unknown: Cas Enzyme sequence
MDSLAPKFGRWILGLDLGANSLGWAALRIGDDGDPGGLLHAPADMPRTPTLGVRIFEEGVENYGQGDREQSRAVQRRTARLQRRQTMRRARRITKVFNILQGAGLLPEFPPSARERDASSEEARDSLLKALDRSLVVELRGRFAEPETDGLIELLPYALRAEAARAPLPLHAAGRALFHLAQRRGFQSNRKTDGKSDERSQVLKEISELQGKIDVLGAGSTLGQYLYECGLRGERIRRRWTKRSMYKHEFEAIWIAQSRQTPELMNDALKKRLGEALFHQRPLRSQQGLVGICEFENGSEYRDQHSAVQGTKRRKRAPECLLVSQRFRMWQTINNIRLKSGDGSARSLEADERERLAARLDGVSSLSISDAKRLIGVGTKTKMNLQDGGAKELRGNRTNASLLELFGERWKRLTGEDQDAIVWDIWNARDNEALVARARNRRGAWARLEPTRSEAESLDDLVISGDYMSLSPRAMERILPALRTGLPYANAARAAYGILVGKDASDLLPPVRTTFRDLRNPVVSRALTELRRVVNDLVRQYGKPDSVRIELARDMKRGKDDRRKLQKQIGKNEDDRARVRERLLQEWGMSNPRAGDILRLRLHEECGGQCPYTGSQIGMSDLFGGAVDIEHIIPFSRCLDDSFTNMTLCFAETNRNEKQNKTPFEAFCADAERWEKMCQRMRKHVADGRMSEGKLRRFQMTTEEQAEFLEGFKSSQLNDTRHASLRAREYLMTLYGGDLGRGVDNDGKTRVQVGNGTVTALLRRAHGIDRLLTTAPGKKREDHRHHAVDAVAIALTSPRFQQRLSTNAERAWKERMRWVGSLSDPWPTFMADVKGSVEQIVPSFRIDNRVRGALHAETIYSPRRTDEGAVSADGSVTHIRKPLADMSAKEVVAIVDPRVRSTVESFLNGREPKKVFVKAKPETHPFLEARDGRRIPIMRARIRKQNSTYAVGSGGRVRNVENADNHHLIVRDVVDAKGRKKVQFDLVPMFTAYQRKKEAPHEPVVRLDDSVRLWVRRNDVLAVAVDGAPERFCRVLALSGKEFEGCWATDARTFEQRKTARVRITPSKLSEGYACRKVFVTPIGVVRPCRV

SEQ ID NO: 498 - protein, 1067 aa, unidentified
  REGION 1..1067: note = Description of Unknown: Cas Enzyme sequence
MADYVLGLDLGPNSIGWAMLAVDAATDTITGLYDSSHVNHPPMGVRVFEAGLDNFDSAKEMSRNQARRTARSMRRSHARRNARRREIRELLEGAGLLPPAGPGQDELFKVDPYLLRARGLTEDLTAHELGRALVHLGQRRGFRSNRKGGESKEDEGVLLEIGLLEKAIQEAGCETLGHYLHHLARSAQDPNRPRLRARHTRRDMYSAEFQALVARQRKAHGALLTDELVEKLADAFFYQHPFEITEERREQAPPRANLHRAPSVRPCPLERGERCCPKGDWHAQQFRILKEVANLRISEYNREERPLTAGERDTVLGLLGVKDKVKFDELRKSLAKKGCDPNARFNLERGERKALLGNSVEHRLIWGFGKGRWPTLEDHEQARLRDLIVHEEDVEAVRQAILKYDLGPDKTDKLAKWNPADGYLGYSLKAILKLLPALEAGHDEYTAIQQAYPDRPEAVQVDRLPPLSAPELPPNLADLTNPIVRRALVEVRKVVNALVREHGRPARIVVELAREMKDGAKARKETSARNRDREVMRAKAAERVAELGGNRYSRSDINRWLFWEEQGGECLYTGRAIPVSELFGGEWEVDHILPRWRSLDDSMMNKALVHRSANADKRDRTPAEWLGADSDAYDMLLRRADALVRANRLPGPKFARLALREMSADAFTQRQLNDTRYLTVASVQYLNLLFPPEMRVGEKGVQSCRGGLTAELRRQWGLNSILPPLYNADGQEVMSEEKDADGNPLKSRADHRHHAIDAVVVGLSGRGLLKGYQNYWKQRDNLLPGQRPTFPTPWEALRSDVQFAASQIVVSHRAQKKIAGALHEETFYGAARDRGGAMLENRFVTRKPLSMLTGAMVEQIRDDVVRRLVIDRLAERGWDGKSATLPKDWHAGLAMASGVPVRRVRIEKVLRNTARLGHRFAELGNNHHMEIVASQERGPGGQPLEVLASVVSTLDVARRVRIERQPPVRRLHDDDRSLLMSLARKESVRALNPNTGEWTVCVVQMLSGTIELSSRFDVVIRDARDSRPASIGNKTPFKRMRSVGNLRELCLTKVQVDPVGRFQLAND

SEQ ID NO: 499 - protein, 1035 aa, unidentified
  REGION 1..1035: note = Description of Unknown: Cas Enzyme sequence
MRILGLDIGTTSIGWALIEDDEGHEQIVGAGVRIFPEGVDRDQQGGEQAKMQTRREHRGARRQIARRARRKRQLRDLLAANGLLPTDPVELENAIGENPYPLRQRALDEPLEPHQIGRVLVHLNQRRGFLSNRKTDKARRNEEKGMLGEISDLARRIEQTNSRTLGEYLARLGAGEIEPAKDEPQTLRKRHTRRDMYEAEFEAIWSAQVRHHRELLTNDLKEQVQRIIFFQRALYWPKSVVGRCDLERRLKRCPVADRLAQRFRIVQEVNNLKVLDGATGEERRLSEEERAIVIGELSTSKKRTFDQLRKKLGFTEAVRFNFEKHDGGGRDHLKGHLTDVALAARPTKRSTGVLGKGYWDLDERARDRIVNILIEEDQEDEVLRLLMARCGLDREQAERVAAVDLPDGYASYSKHAIRRLMPHMERGLIVMGNDASDSAMHAAGYLRPDERVMDRQTFLPPSPDLPNPIVRQALVEVRKVVNGIIREHCADRIETDEPPFDAIHVELGREAKLSFEQRREMRFDNAKRRKARQQAADEIAAHGDKPTRGKINAYLLWQEQGRECVYTGRPISLAQLLSDAVDVDHILPRWRSLDDSMMNKVVVFREANRDKGDHTPREWLDDDDPERYAEVLARAKRLPYPKYRRFIQKDIVLDDFVKRQLVDTRYISRLVTQYLRCLGADMVMPRGSMTAELRRKWGLNNILSHDGEKTRADHRHHAVDALTITLTNRKRLHALANARGDDVSPPWDGLRHDAERSILAINVSHRVQRRLAGALHEDTFYGPTQKPDSDLIVPPGSVGHGTSRRHAMGWIEDPETFVRRKPVVEIKNAKHLAKVRDATIRKVLGEHLRRLGVDPEGKEAYPKDAFKGANSPVMPSGVPIKRVRMLKEGKTFRHVSERRSTHFVKPGNNHHIWYREQDGKWNAQVVTMWDAARRGRSGEPVVDQRPETGDGRFVMSLALGELFEIDGDEDGQRLLCVVRKLDQRSKLLYYKPHTDARLAGEINKDNLYLSPKRMQDLNARKVTVDPIGRIRRAGD

SEQ ID NO: 500 - protein, 1106 aa, unidentified
  REGION 1..1106: note = Description of Unknown: Cas Enzyme sequence
RLLLDNEAGDSLWRHQGLLFGQRRQSWDLGTLGRCVLEPTERCAPHADMHASRFRVIETVNNLKICERLKGVRPLTPAERTKVITFLSGPLGMDAPRKKRAQTTPAEPRPKRTVSVTDLREHFGWGRRSKSSQFWFNIESDEDREINTDWFSREIIHAAITPALWDTMPTSLREGINRALLRHDPDHDGDAEKLKAGVLSWASLSEPQADALIAAWTRRPKLDAQRLNFSRKAVRNILAIMDRAEPWPDRQRPGEFRWLTEIEARKLIAEDADFKDAATGQPLDDHARRRYATGAKGLSARDRHYLRKHHGDLPPAPMLTNPVVRKAIHDVRRHVVEYLHSLGARPEFGQLEIYIELAREADMGAKASDKLLLRNRLRNRIRKDIVDHFDLNDRKPSQQRVAVDRVILAVQQGGLCPLCGKAGLTPAVASNGEGCEVAHILPRASGGHNGLNNIVLAHIKCNREMGRRTPRQYWATLPGGFEHGIQWVENIFGNIERLKPFQLRTVTGDALWLAYFDYREDSRKCDQFKKDIADIKAMTNRQEAATKHATTAVMAYLADALFDGKGLPERGGNRLIFATDGMWTSRLRREWGLFFDPHYAKSHGLSNDDEHQRKEKNRGDHRHHAIDAVVIGLCTAQVRNAWDQRERDADAQVQNPADESEMESYRRRNPLRPPSPFDWPGKTVEECIQALREAVRASVFGPPKSADPEKPICHRPVKRKLIGAFHEETLFGPVLDARGQPTGNYTGKKSVFALSPNHLRLPRTETEKEAIDRLASAVIEGQEKAGNQPDKAAARKWAKSMVAGPTYKPRIVDQPPGGSGIVRDIALRNRLRDCLAAANLDPDDFSQNEIKKLAESGQIRHASSVPIRSFVLLRTMSEPVLLTRKRPDYATGKMVADDDPASQRAYLGGNNHHIEIRVAKGKTGKEVWSGEIVSAFEASQRKLARLRALRTAEIPRPTQFRELPIAERNRLTPILRAIEAQHPIVDRSDNPDKGGTFIMSLAEGEMLYMKRKQTGELKHEKTEELGYFVVAKLDKPQQIVLVPHWDARAAGKRKDADGKLIEHSERDQFSATPTDLKTLAPPDEPHAIKIHVSPLGKITTLNAKTD

SEQ ID NO: 501 - protein, 967 aa, unidentified
  REGION 1..967: note = Description of Unknown: Cas Enzyme sequence
TDIREALGLGKAGKSSPVRLSLENDEDREINTDWFYREIIHGAITEPKWAGMDGRQRESLNRAILGFDPEQDKHATQLLAGAQKWWNCTAEQGEALVAAWKKRPPIEKRLNLSRRAVLNMLRVMDAPPTDAAYGFDRTGRWLTQIEARKLIAEDDGFLDVTTGAPLHPRTRARYATGAKGLTARDRYYIKKHPDTLPPAPMLTNPVVRKAIHEVRRHIVAHMHRHGCKPDAIVIELAREAKMSAKDADRTLLRNRLRDRIRKNLLETFDLHSVKPGQQRIATDRAVLAVQQNQVCALCFNQAVKRAITPRMAANGDGCELAHITPRGIGGGNGLNNLILAHVECNRNMGRQTPRQWWGDRFDAEMERIELMYAKIERIKLNQVNTADQDMLWACYFNKRDDQAKIANFKRTVDDIKGFSDRDLADTRYATRQVLAYLSDALYDGKGLPERGGERLIFTTDGRWTGDLRREWGLFQDAHQAREKGLSAPDEHARKEKNRGDHRHHALDAVVVALTSRSVQVQFENRAKAADKAGITAEDFDAFCRDNPVRPPAPFKDWKDLRDRAIGAIFGERPVSHRAVKRKLIGALHEETLLGPVVTTRTDKSTGATTQEFTGVYTGKKSVLALDPNHLRLPRPETQKEAIERLAALRQNEAGTDEKTARKWARAFVDSKEYAPALVDPPPGKSGIVREVSLRRALRDCLKANNLDPDNFTANQIRKLAEAGKVTHASGVPIRSVVLLRSMSDPVIVPRSEYDYATGQRCRVIDPKTGRENLAAARAYVGGNNHHIEIRVDAKGKWTGEIVSAFEAAQRKLAFFRSLRKAGVPRFKELKLLPKAQRRIWTPQIAAADKAHPVVDRSDNLGTGGKFMMSLCEGEMVYMKHKHRPDEPANYFVVAKLDKPQTVVLVPHWDARAAGERKDAAGNKVPDSAREEFAATPTDLKTLAPPGHPHAKKVHVSPLGEVEYLEND

SEQ ID NO: 502 - protein, 1080 aa, unidentified
  REGION 1..1080: note = Description of Unknown: Cas Enzyme sequence
MGETGSLAQSYVLGIDLGSASLGWAAISLDETGKPSGLLRAGVRIFDPAVTGDTEKGQDESNAVARRTARLIRRQLRRRAARQSDLFGLLQRHSLLPPYEGAEADASQQRHSILNTLDKQLAARWESSGGQTAADLPLYLLRKAALDAALEPFELGRVFYHLSQRRGYRSNRKEQASKKDTPGKAKKEDDLGVVEGDIKNLLEEMSRAHARTLGEYFASLDPHTQKVRRRWTGRKMYEDEFAAIWASQAAFHPVLLTEELHREIKHLLFYQRPIKAQAHLIGGCELEEGERRAAWATLEAQQFRVLQKVNDLEMILPGQVNGIPLTAEQRQTVLDLLEHSETASFDKIRKALKLDKNIGFNLQRGGETKLKGNLTNTHMAAVFAERWPEMPDADKMQIVEDWRTIPQDDSLIRRAIEHWKLDEPGAKWLAGKAAPSGYCMYSRKAIRKLLPLMATGMRLKAAENEIPEYRNRLTGGQAHDRIPPVRDTLKTLRNPAVERALTELRKVVNALIREHGKPAEVRIELARDLKKPRHERARATTQNRDREKERETMRKRIAAEFGEGFRPSRADVEKALLFEECGGECPYSGKRFPFSSLFGENSPWQVEHIIPFSRMPDDSFQNKTLCEVHENQYKANRTPREAYTDPQQYEAICNRVRNWKKPNLGKLKRFELRTTEEIEGFSSRQLNDTRYASKLACELVGSLYGGRDVAAADGKSRQVVFASSGMVTATLRRGWGLEGILREIAPAADADKKGKPRTDHRHHAIDAITIALSRPKLIAALSRANERDPYWPKTGRRFPRIDAPWKDFVDSIRPQIEQMLVSHRPEHRLTGAMHDETNYGRPRKEGGKDVVHIRKAVAGLPAGAIESIVDSAVREAVRAKAAEFGGSLEKWTPNEGKEDWPLLKTKAGKFVPIKRVRISKALGVETIAQGGRARNVALSSNHHVAIFALLDERGREKRWDSIALSLFDAMERKRKGQPLIQTSYPDAGNYVFKFSLMGGDTVLLHKECNHKENLCNPSVWRLRTIASNGQLCLMRVNDARLIKAVKDAGDWWSPRVDALRKLDATKVVIDSLGRIHQAGG

SEQ ID NO: 503 - protein, 1044 aa, unidentified
  REGION 1..1044: note = Description of Unknown: Cas Enzyme sequence
MYLRWSEFAMKNTGSYVLGLDLGVASVGWAAVRYDKKKQSGKILATGARIFEPGMDNNIGEGRGVSRNVKRREARQARRQGDRRKRRMRKLLHRLQAHDLLPEGDPTIIIPALDKNLLKKFRPDGEDAARFAHILPYFLRTRALDEKLEPYELGRALYHLGQRRGFKSNKLIDAAEDKKELGKVSEGITELTKKIHQAGARTLGEYFAGLAPEEDRIRSRWTSRDMFEHEFNAIMDAQSAHNPDLLTGDVRKTLQKCIFDQRPLKSVAHLVGFCELEPGQRRAPWLRLEAQRFRMLQRLLDTRVMYPDGSEQPFSHEQIQTLKDTLGRQASLTFGRARRLLGIKGGAKFNWEEGGEKGFKGNTTSAKLFQIFGERWFELSEEDRRQVVEDIYSFEKEEALEKRGRKRWGLSAEGAAIFSKVVLEPDYCRLSLKAIRKLLPLMESGIPYATAVKEEYGGFHRREEVHDLLPLAGDVFPYLLNPVVNRVLTELRKVVNSVVREFGRPAAINVELARDMRKTKKQRQEITKRNRKNETRRQSARKAVIAETKISDPRRDDVVKYLLAEECEWECPYTGKKITPRLLFGKSPQFDVEHIIPFSRSLDNSYLNKTLCCLEENRKRKRNNTPWEAYGTSDPERYGVILQRVKNFTGDAGKEKLRRFMIEEIGDIEEWATNQLNDTRYASRLAVRYLGMLYGGREDETGKQRIFATRGGATGFVRSVWQLNSILNDGPRKTRDDHRHHAVDAVAIALTTPGTIKMLSDAAKNARLDRRHLFARVAEPWGGFLQDVKKAVNAIDVSHKPERKLSGALHKDTLYSSTRNDENGKECVHQRVPLAKLKPKDIADIVDPVVRETVRRKLDQLGGDTKKFEDEKNHPVLVSKDGARSRPIHKVRVRRVISTIPVAKGERRRYVAPGYNHHMEIVECKDAKGKMKWEGSVVTTFEATRRLKEGEPVVREYDGPGKRFICSITSGDMATIEEDGQRKLIVVRVISHNRVEFVSQTDARLKKDIKAAKEWFIKTPNGLRSMKFQKVTVTPLGEVRRAND

SEQ ID NO: 504 - protein, 1047 aa, unidentified
  REGION 1..1047: note = Description of Unknown: Cas Enzyme sequence
MSEKISGEYILGLDIGASSIGWAILGAPKGKPANLIRLGARVFDAGMEEGDFAAGKENSRNAARRQARQARRLLSRRVRRQRKVFNLLVKAGLLPAGDPAEVIPALDAALRAKFIRPMPKYSPERRQAEQVLPYRLRALALTQKLEPFELGRAIYHLGQRRGFLSNRKAPPKKDEKLGEVKEHIHKLEKQMKDAGAETLGQYLAGLDSETERIRRRWTSRAMYLAEFAKIWAAQAIHHPGILNQELGKRLHRAIFHQRPLKSQAGLIGTCEFERGRKRAPWGLTLAQRFRLLQQVVNARIVAPHGADRYLTADERDALLRVLEREGDLSFSKARKLLNLPRGHGFNWESGGEERFLGNRTNAKLAGIFGDRWWAFTDAERDQIVEDVLSIHKDDALTRRGQRRWGLDAEAAANLGQTALEDGYCGLSRQALAKLVPMLQDGVPYSMAAKEVYGERHTEPLDSLPPPAPTYPHIRNPMVLRVLAELRKVVNAIVKQHGKPAAIRVELARDMRRSKKQRTESWKKMRQNERDRKKAAEKIAQETRVQEPGRADVEKVLLAEECNWQCPYTGKSISMSSLLGPSPEFDVEHIIPFSRCLEDSFVNKTLCEVKENRDHKRNRTPYEAYGASPDRWHDVLERVKRFKGSAAEGKLRRFQQQTIEGIDEFTDRQLTDTRYATRQATQYLALLYGGLYEKDGRRFIQAGKGGVTAYLRNQWQLNTILGDGGTKTRDDHRHHAVDAVAIALTDAGTVKMLSDAAVRAAQKGTRWWRERIEDPWQGFLEDMRQAVEGMVVSHRISRKVNGPMHEETNYGPSRERDPQGKPVFFSVRKTLDALTASDLENIADERVREIVKAKVDALGGDPKKAFASAENHPCIQTKHGRRIPIHAVRIRKSEAMIGVGQGPRQRYVASGSNHHVEIFEVKDKKGSTRWKGRVVSRYEAMRRLATRRPVVDRTPPEGGRFIFSLTSGEIVQLAGDQGRQELYRVRTVSLSKSARIEIDLARLTDARLKNDIIKSDDWLRITSLDKLAASSCRKVIVTPLGEIRYAND

SEQ ID NO: 505 - protein, 1084 aa, unidentified
  REGION 1..1084: note = Description of Unknown: Cas Enzyme sequence
MAYAREDVGEYMLGLDIGVGSVGWALIGLKDGKPDRLIRLGSRVFDAGMDEGSFEAGKENSRNASRRQARQARRMTERRVRRQAKLYRLLARAGLLPEGDHPELLCGPPREERARYVHEQLKALDVDLKKKHLHGKPGRHRLEQVWPYWLRARALTEKLEPYELGRALYHLGQRRGFQSNRKELAALDEAGAEAAQKKPKGKKKDHGEEKDPRKKELGEVKAGINQLEQDMKALRAETLGQYFASLDPHEKRIRQRWTSRDMYKHEFGKIWDAQAGHYLAILTDDLKKQVHRAMFHQRPLKNQAFLIGWCEFEKGRRRAPWSLLIAQRFRMLQQVNDLRIVTSGNPAGDHLTVEQRDALLARLEREGDLKFKAAKELLVPLGLPKGARFNWESGGEDRFLGNRTNAKMFTVFGDRWWQFNKADRERIVEDVWSIQKAEALARRGKKAWGLDDAAAKKFGSLALEDGYCNLSRQALAKLVPMLQDGVPYATAVEEAYGKKDCKPVACLPPAARQYPHIRNPMVLRVLSELRKVVNAIVRKYGKPGIIRVELARDMRRSKKQRTEVWKQNRQNESLRKKAIKKIFDELQRENPSRGDVEKVLLAEECDWTCPYTGNRFNMNGLLGPTPQMDVEHIIPFGRSLEDSFVNKTLCDVDENRHKKRNKTPFEAYGGTTQYKDILARVRGFKGRAADEKMRRFLMEKIDSMDEFASRQLNDTRYAATQATDYVALLYGGQYEKGGKRFIQASRGGVTAYLRNEWQLNSILGDGGTKSRDDHRHHAVDAVVTALTEPGTIKMLSDAAERAPKEGRRRFGRLEDPWPGFLQDVRAAVEAAMVSHRVSHKVNGPLHEETNYAPSQERDKQGKPNSFTVRKPIDQLTPNEVEDIFDEVVKKIVKAKLDALGGDPKKAFKDSSTHPFIATKYGRRIPIHAVRIRKSVAAFEVGRGMRGRYVTTESNHHVEVFEVGKGQWDGRVVSRYEALRRQAKGAPVVDRKAQGQGEWLFSLTCGDLVEMKGRDGKPCLYAVRTVCESSQGRIIIAYAKATDARKKKDIIAAKDWRQVGLNALAQMLCRKVLLMPLGEVRYAHD

SEQ ID NO: 506 - protein, 1046 aa, unidentified
  REGION 1..1046: note = Description of Unknown: Cas Enzyme sequence
MAEKISGDFILGLDIGASSVGWAILGTDKGKPAKLLRCGARVFDAGMEEGDFAAGKENSRNAARRQARQARKLTNRRWRRQRKLLNLLVKAGLLPPGDPAQVIPELDAKLRAKHLAPLLKYSAERRRLEHVLPYRLRAMALSEKLEPFEFGRAIYHLAQRRGFLSNRKAPPKKDEKPGEVKAQITQLETKMKEAGAETLGQYFAGLDPEQERIRRRWTSRGMYQVEFKKIWDEQARHHPAILTEELGKRVYRAIFHQRPLKNQSNLIGTCEFERGRKRAPWGLLLCQRFRLLQQVGNTLIVAPNGAQRAFAADERDRLLNVLQRDGDLTFAKARKLLDLPKGHKFNWEEGGEDRFLGNRTNAKLAGIFGERWWAFSETDRDQIVEDVLTIHKDEALARRGAKHWGLDADAAAKLGQTALEDGHCALSRQAVLKLMPMLEDGVPYSTAVKELYGDRHGDALDCLPPPAPTYPHLRNPMVLRVLAELRKVVNAVIREHGKPAAIRVELARDMRRSKKQRTEAWHKMRQNERDRRKAAEKIAKEAGTENPSRADVEKVLLAEECGWICAYTGRSISMNDLMGPTPQFDIEHIIPFSRSLDDSFLNKTLCEVKENRDHKRNRMPHEAYAGNPEKWDAILARVRRFRSSAADAKLRRFQQETSEGLDDFASRQLNDTRYATRQATDYMALLYGGLYEKDGRRFIQASKGGTTAYLRNEWQLNTILGDGGAKSRDDHRHHAVDAVAIALTDAGTVKMLSDAAERATLEGRRRFGRVEEPWPGFLDHVRQAVQGMSVSHRISRKVNGPLHEETNYGPSKRRDAHGKPESFRVRKRLDALSPADVKLIADDRVRQLVQEKLAELGGDAKKAFADSKNHPCIETKRGRRIPIHCVRLRKSEAMIEVGLGPRQRYVASGSNHHMEIFEVKDKKGKVRWQGRVVSRYEAMRRQATRRPVVDGTPPDGGRFLFSLASGEIIELSGKDGRTALYRVRTVSLSKNGSIEIDAARLTDARLKADIVKSKDWLRITSMDALASMSCRKVVVAPLGEVRYAND

SEQ ID NO: 507 - protein, 1049 aa, unidentified
  REGION 1..1049: note = Description of Unknown: Cas Enzyme sequence
MPRQERCNYILGLDIGANSVGWAAVRLENEEPAGIADSGTRVFDAGVEGNFQSGRGESRAAPRRRARLMRRQHDRRARRKKRLLHQLQEAGLLPEGEADEVLPKLDRQLAEKHVGSLPPDSDSRRRRAHTLPFYLRARALDERIEPYELGRAIYHLAQHRGFASNRRRPRRDDEDEGQVREAIGELARNIEEAGARTLGEYLAGLDPCEQRIRARWTSRQMHTDEFDAIWNAQASHDPDRLTPDLKGRLHDTIFFQRSLKSAKGLVGPCEFEPNSRRAPLALPLAQRFRLVQQVTNTSVIEPDGQHRYLTADERDALLDRLEREGDLGFKDAKKLLGISARCKFAFEEGGEKRFVGNRTNAQLADIFSERWWTFSDEDREQIIQDLRSIQKRDALERRGREVWRLDPDAAVRFAETELESDYARLSRRAMRKLLPYLEDGVPYATAVKEVYGEFHQQREPVESLPAVAQALPHLKNPAVHRALTELRKVVNAIVRKYGKPEVIRVELARDLRRSKSQRQESSRRNRRREKQRQDAARRLAEEAGIQNPRRSDIERVLLAEECGWQCPYTGRPISMGSMFGDSPQFDIEHIVPFSQCLDNSFLNKTLCEVAENRNRKRNRTPAEAYAGNAETWEAILERVKNFKGDNGLVREKLRRFQLIAEDLQDQADFVTQQMNDTRYASRQALQYLGLLYGGLWDAEGRRRVQAVRGTATGFLRGAWYLNHILGEDGKKTRSDHRHHAVDALVVALTNPATVKALADAAQRPREGGGHLFERIEDPWPGFFDQAVEAIEAINVSHRPKRQVGGPLHAEKLYSPEKQDAKGNRWVHIREPLQSLTTKQIEGDAIVDPTVRELVRDKLRALGTTPKKAFGAPKNHPAITTRDGRSIPIHSVRIRKAAETVTVGDGPSARHVMPSGNHHLEIFEVEGKKGRKKWIGRMVTRLDALQRLRRHEPVVNRTHPEGQFVFSLAPGDTIELDADDGGRQLYSIRSVSKQRNGATRVEYVDVKDARQKADIRTAGDWQSPALDTLRKRNAQKVTVTPLGEIRWAND

SEQ ID NO: 508 - protein, 1026 aa, unidentified
  REGION 1..1026: note = Description of Unknown: Cas Enzyme sequence
VSDLTLGLDLGPTSIGWALINEDGREILGCGVRVFPEGVDRDTRGTEISKNAQRRLARSTRRQVARRARRKKRLRRALVAAGLLPSCAGLPREDAERNAWERDQFRHADPYVLRSRALKERLEPHEIGRVLLHLAQRRGFHSNRKTDRARAKETSEMLAEISELEAQLNGRTLGQYLHELRGDDQANHHLVRLRGRHTRRDMYKREFDAVWQAQQAHYPDMLKDDLQLRLHGEIFYQRSLHRPSPSLIGRCEVEPRLPRCPRADRRAQRFRLFLEVNNLRLIDAATGVERPLTTEERNNLLAYLASTKERTFEQIRKKLFDRPESIFFNLERGGRTKLLGMPTDDVLAKPRLLGKSWHKLDESLKDRIVAAILDADEERLPHVLGQAGIDAARADDLLDAPLEEGYASYSLHAIKKLLPHVERGLPLTSRTGDSPCALREAGYLMPWERAIEQKPELPAPPTVTNPLVRQALHEVRKVVNAILRELVYRPGHRLARIHIELAREVRGTARQRHERSQEMRARERDRDKAAERIRELGHRPTRDAINRYLLWQEQGEQCVYSGRMISVAQLFGGEVDIDHILPAGRSLDDSLMNKVVCFRSENSQGVNRNAKGDRTPHEWLAANDPEKYEQVLQRAKKLPWHKLKRFGQQSLDLEDFFARQFVDTTYITSQVADYVHHLGADVICPKGQHTATLRRLWGLDTILCDLGDSPAWREALELARGEKNRLDHRHHAIDAIVIALSDRSRLQRLASYLDARDSRASDLRLAPWPQFRATVETVLRDIKVSHRPRRKVAGALHEATMYGPTASEGEVRVRKEVTALSCSEIESIRDPVVRSCIMARLAKYGITPGRGGDKIPAEVWREPLWLNEEEQIPIRRVRLKKKDESIVSLRRGTALVKPGSVHHVCIFEEKKQGKTRWYANYVTMLEAARRVRQHEPIIQRADAGNPDARFVMSLCKGDLLLTEYQDNERLVVVSTMVTTQKRIHVVDANDARPGAKKKDIGKTANSLKGARKANVDPLGRVRWAND

SEQ ID NO: 509 - protein, 1052 aa, unidentified
  REGION 1..1052: note = Description of Unknown: Cas Enzyme sequence
MKNQKHGRYVLGLDIGTNSIGWAILEVEVSGKDGRLKPLGVKRTGARVFEAGVEGDIESGKEESRNVKRREARLHRRQLYRRARRMRKLFSILQGEGFLPEEKRDSPEALHKFFEDFDKNTRSRYVNGNTGDTKRTKAHVVPYLLRACALDEKLPPHELGRALYHLAQRRGFLSNRKAPQKKDEDKSKVKEGIFKLENEMEEANARTLGEYFSKLDPEDNRIRGRWTARQMYEDEFELIWKAQKNYHPDLLTDELKSKIHNAIFHQRPLKSQKHLVGKCAHEPDRPRAPWAILDAQRFRMIQMLNNAEIYTPDGRRRLLELDERNKLIETLQIKGDRTFKQAKKIIGVSEDHKFNFETGGEKRFIGNHTAAKLIKIFGEKRWRDFSEQQRNQIIDDALSIHKEEALERRGIKAWGLDEEKARDFGELKLEEGHCHLSRTALAKLLPIMEGGIPYRTAVSDVYGDQPLPEPVDTLPPVNEAISELRNPVVNRTLSELRKVVNAIVHEYGKPEMIRIEMIRDIKKSRKQREQTWKKNRRNQKEREEAAKEIAKEIGIEYPSRDNILKYQLAVECDWKCPYTGTGISMTNLYRSSQFDIEHIIPFSRCLDNTFVNKTLCYHEENRNVKRNRTPFEAYGNSPKWDEILQRVKDFRSSPAHEKLRRFKLTPDEVEKEFEEFTERQIRDTSYAARLAVGYLGLLYGGDIDESGRRRIQPGRGRVTSFLRNEWRLNGILGDGGEKSRDDHRHHAVDAVAIALTDPGTTKMLSDAARRAPKERRRLFGKVPPPWEGFLEDVRESINNIVVSHRVSRKVSGPLHEETHYSPPKKDENGKIYHVVRKRLEMLSKSDINDIVDTAVRDIVIAKFEELGGEDPKKAFADTSNHPYLQAKNGRKIPIHKVRIKRKISAKEIGKGPTERHVLTGSNHHVEILEVKDKKGGIKWEGEVVTRYEAMRRLRAGEPIIKRDHGEGKEFKFSLGHGESIRMKDENGKLEFYTVSKFSKSASGRVTLHFTKHTDARPKGKGVYVQKDPEPLRKAGCEKIVITPLGEVRRAND

SEQ ID NO: 510 - protein, 1055 aa, unidentified
  REGION 1..1055: note = Description of Unknown: Cas Enzyme sequence
MPEQPAADHILGIDLGSNSLGWAMIGLEEAKPAKVLRAGVRVFEAATEGDRESGQEESRNKARREARLHRRQLWRRGRRLRKIFKLLQTYGLLPPGNGADPEERQKLLNELDKQIVASPWFAAKKASGLYPESEQTMPYILRAAALDERLEPHFLGRPLYHLAQRRGFLSNRLRPAKKGDDVGEVKKGISELRKAMEEAKARSLGEYFSRLAPSETRIRGRWTHRDMYRAEFNQVWEAQAKHHPGLLTDERRKELSSAIFYQRPLRFDPDVIGMCQLEPGERRAPAHLLISQRFRLLQTVNNLHILPPGGTEMELNPEGRQKLIDRLEQEGDLTFAKARKLFGWSKAYAFNLESGGEKSIKGNRTFADFYAVFGPRWLGMSAQERDQVVEYVHAFEKPDKLKGAARKRWALDDTAAENLADISLEPDHMNLSRRAMEKVLPLLEQGLTYAKARQELYPEKSEAKEPEPYLPPAEKALLEIRNPAVLRSLTELRKVVNAIVRQYGKPVEVHIELARDLKKPKKARKNISDDIAENRKARVQAAKKIIAEVDISEPSGRDILKAQLWQECGGHCPYTGKPIAFRDLFSGEPQFDIEHIIPRHLSFDNTFRNVTLCEVHENREKKAGRTPFQAYSGNPGEYRDVLDRVRKFQGKGARGKLRRFLMNDEELEEFLNKFTERQLRDTAYASRTAANYLGVLYGGVNDQAGNQRIVSTSGEATFELRKAWQLNSVLGDGPTSKGGTVEKKRTDHRHHAVDAVAIALTSQSAMKQLSDAARRGRERGSRALSMEGPWPDFVDTVREAIDRIVVSHRVSKKVSGALHEETLYSAKGDAEGERRVRKLLSQLTKSEAGDIADEEVKRRVLEKLADGDPKRVFSNPENTPFFETEEGRRIPIKRVRIKKAVPTFALGDGKTARHVTSESNHHLEVFAELDENGNEVEWDGVVVPMAEAYRRKKLRLAVVQRDHGPQRRFRFSLGQGEVVECDDKQGDRSLFVFRKVTQFSVGGIQIGFAPLNDARKAREMQVSRAWLWTTPNTLGERHARKVVVSPLGEVSEAHD

SEQ ID NO: 511 - protein, 1081 aa, unidentified
  REGION 1..1081: note = Description of Unknown: Cas Enzyme sequence
MTENPPQDFILGIDLGSNSLGWALIERTNGEPSGLLRAGARVFEAGTEGDRGSGQEESRNRARREARLQRRQLWRRARRQRKVFHLLQGCGLLPPGGATDEARQNLLNELDRTILASGWFRAKAASGAFPAPAQAMPYVLRAAALDEKLEPHFLGRALYHLAQRRGFLSNRLKPAKKDDDEGVVKEGINKLRQEMGEARARTLGEYLAHLPTSEQRLRGRWTHRDMYNEEFDALWDAQARHHPDLLSEESRKELFQTMFFQRPLRFDPAVIGHCELEPDQARAARYLLISQRFRLLQVVNNLKLYPPLEGERDLTPQERQKLVEALEVQGDQTVAAVRKLLALKRAVAFNLERGGEKSLKGNRTAAEFFAVFGERWLSMSAEERDDAVQYVYSFEKADKLKEAAKRRWGLDEQSAEKLSEVTFEPDHMNLSRRAMEKLLPLLERGVTYAAARHQLYPEQFRAAEPLPELPPIECATDADPLRKWAEQRKIAPKAGRLPDPVGAIRSPGVMRSLTELRKVVNAIIRQHGKPAEIHIELARDLKKPKTQRQSLSERMRRNEAERKQAAKRIFDEVGIKEPKADDIRKVQLAEECGWKCPYSGRAISMRRLVGPESEFQIEHIIPFSRSLDSSFVNLTLCHVEENKNKSNRTPYEACSGDSDRYEQILERVRQFKGDRALVAVKLRRFQMTPEQVAEFLGDFTSRQLTDTAYASKLAKRYLSLLYGGLADEAHEQRVFASPGKATAYLRNEWKLNSILEDGPTAAGGRFPKERTDHRHHAVDAVAIALTSPATVNALSDAAQRAPLERRRRFASLEAPWDGFVDSVRNVVDSIVVSHRVSKKASGALHEETIYSAKGDGEGRRRTRKHLSQLTRSEVEQIADERVKRKVMEKLGDGDPKKVFSNPENLPRFETSDGRRIPIKRVRLSKAVPTFGLGEGRTERHVTSESNHHMEVFAELDENGNEVEWDGAVVSMAEAYRRVRLREPVVRRDFGPHRKFIFSLAPTETIECQDKSGGRSLFVVRKMSRLSSGQLQVGLAPVSDARKAKEMQTSRAWLWVTPDTLRERSPRKVLVSPLGEVEEAHD

SEQ ID NO: 512 - protein, 1073 aa, unidentified
  REGION 1..1073: note = Description of Unknown: Cas Enzyme sequence
MMADSTPIEFVLGIDLGTNSVGWAVVGLIDGEPANLIRAGVRVFDAGMEGDIESGQEQSKNLKRREARLHRRQLWRRARRLTKTFNLLRQFGLLRSSDASTPEKRQDLINNLDQNIRSSDWFKAKASSGAYPEPDQTLPYILRTAALDEPLEPHFLGRALYHLSQRRGFLSGRLKPAKPDEEEGRVKGTIKTLRELMKRQGRRTLGELFSHLSPAERCIRGPEAWTARDMYEKEFDAICDAQAPYHPDALSSDRRSRLREAIFHQRPLKFDPNAIGNCELEPGEKRAPKYLLVSQQFRMLQTVNNLRVLPPGETERPLTAGEREKLVGALALKSELKFPKIRKLLGLPKDHLFKGEPEGEKRVIGNRTNAHFWEVLPERWSTMSSQERDRLVDCVEKLQRPEELLPILKKEWTLDGKAAEELVEISLEPDYMNLSRKAIERLLPRLENGETFMEARKAEYRESFKASEPLALLPPVTTEDVQSRVGVVRNPAVIRSLSELRRVVNAIVRRYGKPTRIQIELARQIKKSKKQRQAISKRNRENEAIRDRAADRIREMTGDQFPSRDDIRRVQLFDDCHGQCPYCRESIPARNLLGKESQVDIDHIIPFSRSLDDSYMNLVICHSQCNRAKGDHTPFEAFSGDAERYEGILSHVKSFGGDRRTVAEKLRRFMMGKEGLDTFLDEFRSRQLNDTAYASRLATRFLSLLYGGFADAGHEQRVFAPSGQTTAYFRNLWKLNSILNDGPSTDGARLAKSRADHRHHAVDAVVIGLTDPRMVKRLSDAAEHAHLVGRRRFAPLEGPWPNFADTVRQEIGRILASHRVSKKVSGALHEETIYSRFDAKASKDSPLREPRLRKWINELSAKDVENIADEGVRSRVREKVTEVGGDPRKLPDPKDPANLQHLPYMIAKDGRHVPIKRVRVKVRVQPVPIGTGHKQRYVKLGSNHHIEVYAGTDNRGREQWKGEVVTMFDAYERLKKRHAVVNPEGKRSLLFSLAPGELVRFEEGPFKGQLFVMRGVTQEVGGRIFLVPINDARKKEEIVASKLYRREFVNTLRQWKTHKVIVSPLGEVSEAHD

SEQ ID NO: 513 - protein, 1064 aa, unidentified
  REGION 1..1064: note = Description of Unknown: Cas Enzyme sequence
MSKETVACEYTLGLDLGSASIGWALIRLDSNHSPCNLLDAGVRIFEPGVEGNIEEGKDESKALARRTARLQRRQLRRRAARQRELFRLLQAEGLLPSSDSAIDDFSLQRHEILNRLDKELLNGLKAHQGVSDYLQAEQLLPYVLRKEALERKLEAHELGRALYHLCQRRGFKSNRREGGGKEKEEELGKVKQDISTLRQEMGEKTLGAYFAGLDPHLRRVRQRWTARDMFEKEFEAIWERQSREWPELLSVPLKAEVARLLYFQRSIAKQEHLIGHCELEKTERRAPWASLDAQRFRLLQKVNDLKIIPAGSFDEVCLTGEQRHSILEHLEVHGGITFGDLKKLFGLPPRTHFNLERGGEKSMPGNRTNAHMLAVFGEQWRELAAESKNEIVEMWRREESEEKLTRYGQERWALDEYTAKLFAGKSAEDKYCNLSLTAIRKLLPIMEEGVAFMTARTALYPEQRDEPRELLPLVKEAVPELRNPAVERALTEVRKVVNAILRKYGKPYSIRIEMARELRKPRKEREAAAKRMRQNEKERIAMKARILKEAGLPNPSRDDIERARLWEECGGICPYTGRTIEFSSLFGRESQFDVEHIIPLSRCVDDSFGNKTLCYHEENRHVKRNQTPWEAYEKVEERWNDIIQRVKSWKGGNAAKLRRFELKSTEELEGFSARQMNDTRYTTRLAIDLLKTLYGGLHIANADGSIRQAIFASSGMVTATLRKVWGLEGILREVLPSANGENHGKPRTDHRHHAIDAITIALSSSSTIQRMNAYAAMASARDSGTRVFRGLQSPWPDFVDSIRPRILAMRVSHRPEHKMSGALHNDTLYGRPYVRDGKSLVHLRRSVKGIKPDQIANIADTAVRAAVEKRLAEHGGDVGKFNPEIPESLPYMESKRGRIPIKKVRVKETKKGLLELKNNRFVELGDIHHFELFVQRDENRRESWTHVSVSLMEASQRNAANRRDGEKRSVVSHQMKDDTEAEFLFSLMKGDIVEMDYQGGRELFRVKKFYAAGRTWFAHVNNAQKDADQKRDGTCWAKPPNGLMQLNARKVTIDLLGHVHPVHD

SEQ ID NO: 514 - protein, 1100 aa, unidentified
  REGION 1..1100: note = Description of Unknown: Cas Enzyme sequence
MDTMDSTEESVPYILGIDLGSASIGWAVLTRPAAGENALLTSGVRVFDPGVTGEIGDIEAGKDEARGKARRQARQSRRQTWRRAWRMKKLFRELQSTGLLPPTAPGEHQDEAAARYATIEALDGELRARWLTPGRPLAVPASASGAGAAPALQPAPAPEHVLPYLLRARALDMRLEPFEIGRALYHLGQRRGFLSNRLTAKEDEEEGQVREGISGLEEEMRQAQARTLGEYFSRLNPMEERIRRRWTARSMYEDEFDLIWKAQAVHHPQLLTPQLRKRLHSAIFYQRPLKSASALIGECEFERGRRRAPWACLEAQRFRLLQKVNDLEVVTQGQRHLTGDERSALLAALEARPGMKFTEIRKLLGLRHDRFNLEAGGEKKLKGNLTAAVMTRCFGDRWDTFNGEERARIVEEWRTIEKPETLVRRLVDVWGAAEPLARQLSGERAPNGYCRLSRKALRTLLPLMEDGVQYVAAVDKVYGTSFSGGQVYDRLAPVRESLPQLRNPAVGRALTELRKVVNAIVHEFGKPAEIRIELGRDLRRPREERARIWRENRSRQEERERVRSILREEVGVPQPSRDDIDKYLLWQECGGSCPYTGRPISRDALFGAAPQFQIEHILPLSRFPDDSFQNKTLCYHEENARKKDRTPFEAYGAEPDDWARILDRVGKFKNREKLRRFEMRETEAEELLQQFSSRQLNDTRYSARVAAQYLGALYGGRDVADSAAPTGLRRVVFTSTGQVTATLRREWRLNGVLPAPAGLTSPAEKSRHDHRQHAIDAIVTALATPAWVKRLSDRAAGNQRHSGRASFRGLEGPWPNFADSVREAVFSINVSHRPEHKLSGQLHEETNYGRPYKRIEKGKETDRANVRKPLSAIKAGELARIVDPAVREAVERRLEELGGDLKKLQLAATPPRHRPAEAAPEPPPFLKARDGRQIPIFKVRIWQAVTPQKVGEGSRERQVALANNHHAEIFALLDEQGQERRWDAVVVSRLEAVRRKRGGQPLVQRDRGPSCLFKFSLMLGDTVQIEDEGQRTLFVVRTISESGEGRIELAFARATDARRVKDIKLGKGRDWPRPSPDGLRKLGCAKVSVDPLGRLGPAND

SEQ ID NO: 515 - protein, 1047 aa, unidentified
  REGION 1..1047: note = Description of Unknown: Cas Enzyme sequence
MSSQENFDYILGLDIGANSVGWAVIGVEQGKPARLVRTGVRVFDAGVEGNFESGHAESRSTPRRQARLIRRQHNRRARRQRRLLHQLQEAGLLPEGEARDVLPELDRQLYSKHIGNLQDGSTEKRRRAHILPYHLRARSLDEKLKPHELGRAIYHLAQRRGFASNRRRPPSDDEDEGQVRDAISKLGQDMEQAGARTLGEYLAGLDPREERIRRRWTSRQMHLDEFEAIWKAQAPHYPDLLTPELKAKLYDTIFFQRSLKSAKGLVGPCELEPNSRRAPMALPLAQRFRLVQQVTNTRIIEPDGNHRYLTSEEREALLDCLEREGDLRFKNAKKLLALSARCKFAFEEGGEKRFVGNRTNARMVEIFGDRWWVFGDEDREQIVQDLRSIQKRDVLARRGREAWNLDPQAAGRFADIELEPGYANLSRRAMGKLLPLLEDGVPYATAIKEVYGEFHQHSDFLELLPAVDQALPHLRNPAVHRALTELRKVVNAVIRKHGKPEIIRVELAREMRRSKKQRQESSRRNRRRERQRQDAAKRLAKEAGIQNPRRSDIEKVLLGEECGWQCPYTGRPISMAGLFGDSPEFDIEHIVPFGRCLDNSFLNKTLCEVAENRNRKRNRTPAEAYAGDDERWEAILERVKHFKGDKRLVQEKLRRFRLTAEDLQDQDEFVSQQMNDTRYASRQALQYLGFLYGGLWDAKGKRRVQAVRGIVTGFLRGVWHLNHVLGEDGKKSRSDHRHHAVDAVVVALTSPGTIKMLADAAQRPREGGGYLFDRVEELWPNFFDDVCGAIEAVNVSHRPKRQVGGPLHAETLYSPEKTDEKGKRWVHFRKPLEDLAATEVDAIVDDTVRDLVKAKLSEVGGPPEQAFGDPKNHPCLTSRDGRSVPVHRVRIKKAAATTTVGEGPRARHVMPSGNHHVEIFETSNRKGGKKWVGRMTTRLQALERLTNHQPVVNSSDPAGPFVFSLASGDTVQLDTEDGGRGLFCIRSVSQQKNRAIRVEYVDVKDSRKKADIRKAGAWQSSAIDTLRKLNAHKVTVTPLGEIRRAND

SEQ ID NO: 516 - protein, 1095 aa, unidentified
  REGION 1..1095: note = Description of Unknown: Cas Enzyme sequence
MDTMDSTEESVPCILGIDLGSASIGWAVLTRPAPGENALLASGVRVFDPGVTGEIGDIEAGKDEARGKARRQARQSRRQTWRRAWRMKKLFRELQSGGLLPPTAPGEHRDEATARYATIDALDGELRARWLALERPPTVSASASGTGASPALQPAKAPEHVLPYLLRAHALDMCLEPFEIGRALYHLAQRRGFLSNRLTAPKEDEEEGQVRESISSLEEEMRQAQARTLGEYFSRLDPREERIRRRWTARSMYQDEFDLIWKAQALHHPQLLTASLRKRMHSVIFYQRPLKSASALIGECEFEKGRRRAPWACLEAQRFRLLQKVNDLEVVTQGQRRLSGDERSALLAALEARPDMKFTEIRKLLGLRHDRFNLEAGGEKRLKGNLTAAVMTRCFGDRWDKFSGEERARIVEEWRTIEKPETLVRRLVDAWGAAEPLARELSGERAPNGYCHLSRKALRKLLPLMEEGVQYMAAVDKVYGTSFSGGQVSDRLPPVRELLPQLRNPAVGRALTELRKVVNAIVHEYGKPAEMRVELGRDLRRPREERKRIWRDNRSRQDERERVRSILREEVGVPQPSRDDIDKYLLWQECGNFCPYTGRPISREALFGAAPQFQIEHILPLSRFPDDSFQNKTLCYHEENARKKDRTPFEAYSADPDDWARILERVGKFKNREKLKRFEMRETEAEELLQQFSSRQLNDTRYSAKVAAQYLGALYGGRDVADPAAPTGVRRVVFTSTGQVTATLRREWRLNGILPAPAGLTTPAEKARHDHRQHAIDAVVTALATPAWVKRLSDRAAGNQRQSGRASFRGLEGPWPNFADSVREAVFSINVSHRPEHKLSGQLHKETNYGRPYRHIENGKETDRANERKPLSAMKLGEIARIVDPAVREAVERRLGELGGDVKKLQLAATPPRHRPAGAAPEPPPFLAARDGRQIPIFKVRIWQAVTPQKVGEGSRERQVALANNHHAEVFALLDEQGREQRWDAVVVSRLEAVRRKRSGQPLVQRDHGPSCLFKFSLMKGDTVEVDDSGKRALFVVRSISEGDMLMVRIHDARKISDIKKERAWLRIRSIDQLRQLNCVKVCVDALGRVRPAND

SEQ ID NO: 517 - protein, 1074 aa, unidentified
  REGION 1..1074: note = Description of Unknown: Cas Enzyme sequence
MSATDQHQRVECEYRLGIDLGSGSIGWAAIAETDGQPAGILAMGVRCFEAGVLGDVEQGKDESRGTARREARGPRRLTWRRQYRLRKVFRLLQRMDLLPASTDDSHDERNRVLAELDAKLRRGLPAGDARAGHQKLPYLLRARALKRKLSRHELGRALYHLAQRRGFLSNLKAAKEDEDLGKVKKGISELQALMDQAGAETLGQYLASLDPEESRIRGRYTARAMYEREFERIWSAQAAHHADLTDERKEQLHHAIFHQRKLKSQRGLVGRCELEPEKRRAPAACLEFQQFRILQKVNDLEVIEPGGECRPLSAEERSKLLEEMAENGEVTFGRMRTLLKMRKSKEYGRNYTFNFEASGEKRLVGNRTAAKLVAILGDWWRELTPQQQKQLVDEKLSFESEDPLVTRLTNGWGLDEPTARRVAETPLEQGYGSHSRRALRRLTEEMQKPDPDPDLPGRYTQYAKARDRAYPDSRKAVGEEELLPAQHNCAVLRDLRNPAVARALSEMRKVVNALIRRCGKPREIHVELARDLKHARKLRQAMADQNKANQKARNDARAEILKEMGDERFCTERNALKVRLAEECDWTCPYTGKRFGMRELVGDHPQVDIEHIIPFSRCLDNSYMNKTLCFVDENRKRKGGQTPYEAYHGTDRWEEILARVRMFKADAKVRRRKLQLFTTEKLPDQEDFDARQLNDTRYMSRLAADYLGLLYGGRVDGQGKLRVQVSPGRVTKYLRERWNLNSILGHPDNKNRADHRHHAIDAVVIALSGAGEVHRLSRAAEEAEHMNLPGLFPRGECFDSPWEGFLDDTRRGVEAINVSWRVSRKLSGKLHKETNFSKPVVTTDGRGKRSESHHVRKRLESLTADQVGKIVDGRIRAIVQEHLERHGGDLKKAFADPNNHPYSTSRDGRLIPIHKVRIRDSVSTIKVGRGSRRRYVAPGANHHMEIVAVLDKDGREKRWEGHVVSLFEAVARRRRGEPVIQRDHGQGKRFKFSLAGGEHVVMQHVAEEYQLFRVAVISGNNLEFRLHTDARPTTLLRKKEHSSGRVHKAADTLRKANARKVAVDPLGNVLPAHD

SEQ ID NO: 518 - protein, 1050 aa, unidentified
  REGION 1..1050: note = Description of Unknown: Cas Enzyme sequence
MNPPTFSPYILGLDIGANSIGWALVKTEKDKPVCLLRAGVRVFPAGVEGDFESGRAESRAVPRRQARLMRRQLDRRARRRQRLLHQLQQAGLLPPGEARDVIPKLDRKLDAKHRGALPKKSKGNLRLAHTLPYHLRALALKERLEPYEIGRAIYHLAQRRGYETNRRRPPEEGEEKGQVEPAIAQLKRDMAQAGARTLGEYLAGLDPTQQRIRGRWTSRQMHKDEFEVIWSAQAQYHPNLLTPSLKKRLYDTIFFQRPLRSAKGLVGPCEFERNCRRAPMALPLAQRFRLVQQLVNTRIVEPDGKQRPLTRQEWGVLLERLERGGDLTFTEAKKLLGLSRRHKFGFEEGGERRFVGNRTNACLGEIFGNRWWTFSDQEREQIIQDLRSIQNRDVLARRGRNVWGLDPEAAERFADLQLDSGYANLSRRAMVKLLPYLEDGVPYATAVKEVYGEFHRRQGPFDRLPPVDQVLPHLRNPAVHRALTELRKVVNNILREFGKPEAVRVELARDMRRSKEERQRISRRNRQRERLRQEAAEKLLKEMGIQVPRPRDIEKVLLAEECNWTCPYTGRSISMRALFGDSPEFDVEHIIPFSRCLDNSFFNKTLCEVAENRNRKGNRTPAEAYAGDPERWQAILDRVRRFKGDKVLVQAKLRRFQMTAEDLQAVDFVAQQLSDTRYASRQALQYLGLLYGGLWDEGGKRRVQAVRGTVTGYLRAAWFLNAILGENGRKARTDHRHHAIDAVVVALADPATIKALADAAQRPREGGGYLFGRIEEPWPNFTAEVRRVVEEIRVSHRPRRQVSGPLHRDTLYSPEKIDADGRRWVHYRKPLDDLSQNEVEAIVDPAVRALVKKRLQECGLPPDKAFSDPKNHPCLYSKKKGAPIPIHRVRIRKAVATVPVGEGPRLRHVETSGNYHIEVFEVTDRKNRKKWVGRLVTRLEALRRLRRHQPLTDKTCPEHPGARFVFTLAPGDTIELDTEDGGRALFVVRSVSQEARGSIRVEYVDVKDARQKADIKKAGDWHSPALDTLRKRNARKVVVTPLGRVRRAND

SEQ ID NO: 519 - protein, 1040 aa, unidentified
  REGION 1..1040: note = Description of Unknown: Cas Enzyme sequence
MSYILGLDVGSKSIGWAVVASSNGTPSRVEAVGVRVFQAGVQGDPETGAGEPPGAKRRQTRQQRRLTDRHARRMKKLCHLLQRQGLLPAGEADQVLRQLDSSLYSRYVRKRATPSEETGRVAHLLPYLLRARALDQPLEPHELGRALYHLAQRRGFLSNRRAPIRGDDRGKVRPAITELEQKMNSAGARTLGEYFATLDPEQERIRRRYTSRAMYVEEFEKIWDAQAPFYPHILTDDFKKAVRRAIFYQRPLRKQKNLIGACEFEPRRKRAPWALLGAQRFRMLQMVNNTRVLTLDGRERELIPEERAALIQKLETDGDLTFAKAKKLLSLKRDESFNWETGEESRFVGNRTNAKLAKIFGQRWWKLTEDERERVVEDVRSIERPATLAARGQRAWGLRPEEAEAVSRVELEPGYCRLSRQALAKLLPLLQQGLPYMKAVEKAYPDYRMARDPVDLLPPVSEAVPELRNPAVARALTELRKVANSIVRTYGKPEAVRIELARELRKTRQQRQTATKRNRQVERQRKEAAQKITAEAGIQNPKRADIEKVMLAEECNWQCPYTGNCISMASLFGPNPQFDVDHIIPFRRSLDNSFFNKTLSDVAENRNVKGDRTPYEAYAGRPEKYKEIIERVSRFQGRAASEKLARFQLEQVQDIEQYADQELNDTKYASRMAADYVGLLYGGQVDATGKRRVQPTRGRVTAFLRNLWGLNGILGPGPEKSRDDHRHHAVDAVVIALTDAAAIKALSDAAARGRKLGRRWAALAEPPWPGLFNETSTAVDMVVVSHRPSRKLSGALHEETLYSPPRDDAGRPAADGKWVHVRKPLAKLTKPELEKIVDPAVRDAVRAKLAALGATDPKRAFKPVENHPCLKTRTGRLVPIHKVRIRRAESPVTIGSGARERHVKPGDNHHIEIVELRDKKGRSKWEGHLVTRLEAARRFRARQPVVRRDHGPDKRFLFSLAGGDTIELDWEGSRQLFVVRTMTRDASGARIWFVHLNEARPEKQIVAAKQWHSMRMQPLRKANCRKVSVGTLGEVHPANH

SEQ ID NO: 520 - protein, 1071 aa, unidentified
  REGION 1..1071: note = Description of Unknown: Cas Enzyme sequence
MKKSEGGCYILGLDIGANSVGWALLSATRQGKGGRLTPTGIAACGVRIFEAGVQGNLEAGRDESRGVSRRQARAARRRLDRRARRCDKLFRILQGAGLLPPGGPAPGDGPRTAAERRERRRARSKARNELLTALDVQLLADLTEKLRDEAADEQTLALLPHTLPYALRARALDRPLDPFELGRALYHLGQRRGFLSNRKAPPKEKKEEGAVKEGIARVRQGMADTGARTLGEYFASLDPEDQRIRNRWTARDMYEAEFEAIWAAQAPHHPGVLSAELKKRVHRAIFFQRPLRIRKEFIGACPHEPDHKRAPMALLDAQRFRLLQQVNHTRVQMADGTVRELSDAERTTLVNALDADGDLTFTKAKKLLGVPRNAVFNFEEGDEKRFVGNRTAARLGKVFGHGWSELSPEQQRQVVEDVRSIQKPETLARRAKSAWGLSDQQAADLAQLALEDGYCRLSRQALAKLLPYMEQSLTYQGAVGEVYGHELDTPAVDLLPPVAHAVPDLRNPAVARALTELRKVVNGIVRTYGRPAAIRIELARDLRRSRRQRQRATAKMRDIERDREVARELIRTEAGIQEPRRSDIQKVLLAQECAWTCPYTGKAISMAGLLGPHPQFDVEHIIPFSRSLDNSFLNKTLCEIEENRARKQDRTPHEAYAEADPDRWDQILARVRRFHGSAAREKLRRFQIVDPSFDDFVSQQLNDTRYASRLAIRYLGLLYGPEARSRVQASRGGVTGFLRDEWDLNTILGDGPGKSRDDHRHHAVDAIAIALTERATVKMLSDAAEHARRAGRSRFAPVPLPWSTFLDDVRAAVAAICVSNRVSRRVSGPMHEETFYSPGHSDPDGRPCVHVRKPVEALSRNEIPLIVDDKVREAVEAKLAELGGDLKAFAEPANHPVLAHRNGKSTAIHRVRIRKPIAPFPVGAGHRERHVVTKLNHHVEIVEVHDHKGNPKWEGRLVSQFEAMRRHRAGEPIVRRDHGLDAVFLFSLSPSESVLIAEDGQEFLLRVIGVSQRASGGVEFEFRRNTDARPMTDLRKIKGARVRKSADALRQLAARKIVIDPVGRIRRVGRD

SEQ ID NO: 521 - protein, 1059 aa, unidentified
  REGION 1..1059: note = Description of Unknown: Cas Enzyme sequence
MDQTAEAAEYTLGLDLGSASTGWALIAFDSSHNPHALLRAGVRIFEPGVEGSMSEIERGKDQSKAIDRRNARLHRRQLRRRAARQRDLFLLLQQKSLLPPAAEPSANLSDQRHQVLNDLDRALTSDLRQTVEAGSLRAVEQSLPYHLRKSALDRKLTAFELGRVFYHLIQRRGFKSNRREGKKTKDDDVGEVKKGISELEALMASAGTRTLGEYFAGLNSHERRIRARWTARAMYEREFELIWQSQRAYSPDVLDDDLKARINRLLFFQRPIAAQENLIGFCELEKEERRWPWAFLEAQRFRALQKVNDLRVIEHGQLVERPLTDDEKTTVFAKLEDEGDQSFAALKKLLGLKKAEFNLERGGEKKLRGNRTNSFMRSVFGEFWDEMPEEEKHQAVTLWYRTESEEKLAQKARERWALDENAASKFANEQPEDGYCSLSLKAIRRLLPEMEKGVSYGEIRPQLYPEERHDPKELLPLVREAVPSLRNPAVERALTEVRKLVNAIVRQYGKPYEIRIEMARELRKSRKEREETTTRNLKQRREREKAKVKIFDECKIQNPSRFDIEKALLFEECGGVCPYTGRTIEFSSLFGDSQFDVEHIIPTSRCPEDSFLNKTLCYHEENRSVKGGHTPWEVYGADEERWAQILTRVGKFGNPAKLRRFELRSEEELGEFTERQMNDTRYTTRLAVDLLSTLYGGRDIPRGDGSNRRVIHATTGMVTATLRKSWGLEAILREALPSYNGESKGKPRTDHRHHAIDAIVIALTSQSTVQSMSVAAANAPSWQRDRRAFRGLQAPWPNFVDSIRPHIESMVVSHRPEHKMSGALHKDTNYGRPYQFEGRCVVNLRRSVQGIKPTQVAGIVDPVVRHAVETKLAEHGGDLAKFNPEDPTTLPRLAAKDGGHIPIRKVRIRETQNALLELPGNRFVQSDEVHHFELFVQREGRKEIWTHYPVTLMEAYSRRRRGLPVVSRKLEDDPGAEFLFSLMKGDLVEMDYNGQRGVFRVKKFYSAGSIWFAHANNAQPDKDQQRDDTRWSKTPDKLRRLQPRKVAVDLLGRVHPAND

SEQ ID NO: 522 - protein, 1055 aa, unidentified
  REGION 1..1055: note = Description of Unknown: Cas Enzyme sequence
MILGLDLGETSVGWALLRASDGTPDGLVDAGVRVFESAMEGDYDSGRAEPRNAERRLARSRRRLTERRARRMRKLRHILTRAGLLPEMDESDLAAAFASLDKSLMSALPQACDVRDLNREACDRLRHVFHYRLRANALDRKIEPFELGRAIYHLAQRRGFLSNRKSLPKEGEKPGLVKEEIETLKAKMAAVNSRTLGEYFSTKAKPYERRIRNWHTSRKMHEEEFEKIWTAQAAYYTDILSDDLKAAIHGAIFYQRPLKSVRGLIGKCRFERGRRRAARANPEFQRFRILQTLANTDVDPEGIIRPLTDDERATLLSILNLETPEALKILTKKGELNLKKAIKLLGLDKTTEFQEQRTGEKHFIANTTYFRLATVFGACWWKLTEDDRNGVVQDVMSIQKPEVLEKRGREVWGLDKEKARELASVRLEQGYASLSTKAIRKLAPLLERGIRYGTAVKEVYPDTFEAGKAVDHLPPVAKVLSDLRNPVVTRVLTETRKVVNAIIAKYGKPDIIRIELARSLKNPAKRRAEITQRNRRNRKARKAAAERIAKEAGIQEPTRHDALKVVLAEECNWTCPYSGRRITMSALLGEHSQFDVEHIIPFSRSLNNSYVNKTLCHREENAFKGNRTPFEAYGSDNERWREILERVKRFKGEARAAKLRIFQTESFADLQDEEGFGEFARRQLNDTAYASRLAREYLALLYGGYADADGRLRVTTSSGHATAYLRNEWGLNAILGDGGEKERGDHRHHAIDAAVVALADAGKIKRLSAAAARAQEAKRYRRFAPMEPPWEDFFDDLKEKVDDIVVSHRVSRRVNGPLHADTFYSRATVDDEGRECVRVRKPLAALSANDVESIVDDAVREAVKLKLWEVGGDPKEVFSNPANLPVAKNGTTVKSVRIWQHVNPFTIGEGPRERRVLTKSNHHIEILEVDDGKGGVKWDAEMVTRFEAMRRLKAGEPIVKKDHGDGKRFVCSLSPGECFKLKTNGDVWCINIVRTISRERGGYVTVEYVTISDARLKKDIKNSKDWKKISPNSMRESGFEKITITPLGEVRRAND

SEQ ID NO: 523 - protein, 969 aa, unidentified
  REGION 1..969: note = Description of Unknown: Cas Enzyme sequence
HAILNALDLELASKWAKSGNREQSAIELPLYLLRKTALDAALEPYELGRVFYHLSQRRGYRSNRKEQASGKESSGKAKKTDDLGAVEGGIKELEDAMRSFRTLGEYFASLDPHTQKVRRRWTGRKMYEDEFAAIWAKQAAFHPDLLPEELHQQIKRLLFYQRPIKAQSHLIGGCELEPGERRAGWATLEAQQFRVLQKVNDLEIILPGNVTGIPLMPEQRKIVLDLLENSVEATFKKIRKALGLAENIGFNLQRGGETRLKGNLTNTLMAEVFAERWPEMSDEDKMQAVEDWRTIEQKESLVRRAIEHWKLDETGAQWLADKPAPNGYCMYSRKAIRKLLPLMAAGMRFKAAEKEIYGNRLTGGKVHDRIPPVRSALKNLRNPAVERALTELRKVVNALVREHGKPAEVRIELARDLKRPRHERAKAVSYNRDREKQRTTAKEKMLREVGPGFQHPSRADVEKALLWEECQGECPYSGKRFPFSSLFGENPPLQVEHIIPFSRIPDDSFQNKTLCYHEENQRKGNRTPFEAYTDPTQYEAILNRVRCWRTPNPGKQRRFELRTLEELEGFSERQLNDTRYASKLACELVGTLYGGRDLPLEDGKSRQIVFASSGLVTATLRKGWGLEAILREAAPSANGQNRGKPRTDHRHHAIDAITIALSRPKMIAALSRYNAQAPYWPNNGRTAPKIQSPWKDFVDSIRPHFEQMLVSHRPEHRLTGALHDETNYGRPRKEGGKEIVHIRKPVEGLSAGDIENIVDPAVRESVRAKAAQSSGDLKKWTPKEGSEDWPLLATKTGKQIPIKRVRIKKALSVETIGKGERIRHVALSSNHHVAIFALLDERGRETRWESVIVSLFDAMERKRKGLPLIQTSYPEAGDYVFKFSLMGGDTVLLHKDCDHKQNLCNPSIWRLRTIGTNGQLSMVRINDARLKTDIQKAKEWWSPTQDTLRKLDAAKVVVDSLGRIHQSGG

SEQ ID NO: 524 - protein, 1076 aa, unidentified
  REGION 1..1076: note = Description of Unknown: Cas Enzyme sequence
MSGHKYVLGIDLGSASLGWAALILDEHGEPCSLLRAGVRIFDPAVSGDIEKGRDESNAVARRSARLARRQLRRRAARQKELFRLLQERGLLPPYEGAEANGSLQRHAILNQLDREISEKWSAANGTNTQTVLDLPLYLLRKVALDEQLEPFEAGRVFYHLSQRRGYRSNRKEKAARQDRPDRAKKDDDLGLVEGDIKDLAKEIDAAGARTLGEYFASLNPHEQKVRRRWTGRKMYEDEFALIWERQASFRPEVLTDELQREIKRLLFYQRPIKEQAHLIGGCELEPGERRAAWATLEAQEFRVLQKVNDLEVVYPGQVAGVRLNVDQRRVVLGLLENSDEVTFDRIRKELGLAKGVGFNLQRGGEKRLKGNRTQWLMAAAFGESWAAMSEEEKKQVVEDWRTIEREESLIRRAMEHWKLDQAGAEWMAKHPAPSGYCMLSRKALRKLLPRMREGERFKEAEVAEYGDRFSGGKVYDRIPPVREALKTLRNPAIERALTELRKVLNALIQDLGAKPEEVRIELARDLKKPRKERAQMSRQMRDREKERGGQKKRLLEECGISNPSRADIEKALLHEECGGICPYTGRHIEFSSLFGQTPLFDVEHIIPFSRIPDDSFQNKTLCYHEENRNVKQNKTPFEAYKDPEQFETILTRLRSWPRGNPGKLRRFELRTTEELEGFSSRQLNDTRYASKLACELIGTLYGGRDVQTESGKRQVVFASSGMVTATLRRRWGLEAILREPGASANGQNKGKPRGDHRHHAIDAITIALSRPSLIAALSRVNAQDPYWPANGRTAPRIQAPWTNFVDSIRPQIEQMLVSHRPEHRLTGALHDETNYGRPRKENGKEMVHIRRPVSGLTATDVENIVDPAVREAVRAKAAACGGDLKKWAPTEGASDWPLLKTRTGASVPIKRVRISKALQVTTIAEGVRRRYVSLSSNHHVAIFGLLDDGGRERRWDSEIVSLLEAKERQRKGQPIVVVSRPRVSDAVFKFSLMWGDVLQLHKDCDHAKDLCKPSLWRVRSIWEQGTLTLVRINDARQLNEIRAAKDWLLPSADALRKLSATKVLVDSLGRLHEVGG

SEQ ID NO: 525 - protein, 1081 aa, unidentified
  REGION 1..1081: note = Description of Unknown: Cas Enzyme sequence
MSESGSLAQDYVLGIDLGSASLGWAVVGLDETGMAAGLLRAGVRLFDPAVTGDIEKGQDESNAVARRAARLIRRQLRRRAARQSELFRLLQVHGLLPGYEGAEADASQQRHAILNTLDLELAAKWARPGTAGAKAAIELPLYLLRKTALDSVLDPFKLGRVFYHLSQRRGYRSNRKEQRDGKKASGKAKKADDLGAVEGGIKELEDAMRSAGARTLGEYFASLDPHAQKVRGRWTGRKMYEEEFAAIWTKQATFHPALLTEELHHQIKHLLFYQRPIKAQAHLIGGCELEPGERRAAWATLEAQQFRILQKVNDLEVILPGNVTGVPLTREQRQTVLDLLENSAEVTFKKIRKALGLAENIGFNLQRGGETRLKGNLTNTLMVEAFAERWPDMSDADKKQVVEDWRTIEQEESLIRRTIEHWKLDEAGAEWLASRPAPSGYCSISRKAIRKLLPLMMEGKRFKEVEKEVYGNRLTGGQVYDRIPPVRQALKTLRNPAVERALTELRKVVNALVREYGKPTEVRIELARDLKKPRHERAKAIGQNRDREKQRNAAKGRMLQELGPGFEHPSRADVEKALLWEECQGECPYTGKRFPFSSLFGENPPLQVEHIIPFSRIPDDSFQNKTLCYHEENQRKGNRTPFEAYTDPLEYEAILNRVRNWRTPNPGKQRRFELRTLEELAGFSERQLNDTRYASKLACELVGTLYGGRDIQTETGSRQVVFASSGMVTATLRKGWGLEAILRDAAPSANGQNRGKPRTDHRHHAIDAITIALSRPKMIAALSRNNAQDPYWPRNGRTAPKIQSPWKDFVDSIRPNFEQMLVSHRPEHRLTGALHDETNYGRPRNEGGKDVVHIRKQVVGLSAGDIENIVDPVVREAVEAKAAQLGGDLKKWTPSEGSEDWPLLKTKTGRQVPIKRVRIKKSLGVETIGKEERTRYVALSSNHHVAIFALLDEQGREKRWESEIVSLLTAMERRRQHLPVIQTRLAAVPEAAFKFSLMWGDTLLLHKDCEHAKNICKPSFWRVRSIWEQGTLTLVRINDARQLNEIRGAKDWLLPSPDTLRKLDAVKVVIDSLGRIHQAGA

SEQ ID NO: 526 - protein, 1097 aa, unidentified
  REGION 1..1097: note = Description of Unknown: Cas Enzyme sequence
MSSQANDPTLKPYVLGLDIGANSIGWAAIAIDPGGQPLGFLNPPGEMRERPTLGVRIFDAGIENYGQGKREEGRGQKRRSARLARRQTMRRARRVSKTFRMLQELQLLPPNEARDVTERGRSLVRDSIIKKLDELLGRALAGQYPERASEYLECLPYALRVDALDRALSIHELGRALFHLAQRRGFLSNRKGGKKTEDTGPVYEGINEIEQAMAAEGCRTLGEHFLHLQRSGKRIRTRWTARRMYEAEFDAIWEAQRRHHPDILTDAARRRLHRAIFFQRALRSQSSLIGACELECGDEYVNPATGAVARTKKRRRAPECLLVSQRFRLLQRVNDLAVDPGEGLPRIPLTDEQRVRLAAKLEVSKDLTFPRIAEVLGLKRGTKFNLQAGGEKKLVGNQTNAKLFAVFGDRWVALTPTERDQVVLELWGAPDDKVLYTRARSRSGIWGSLRTTTDEAREVSEMPLPSDYMALSKHAMSAVLVEMERGVPYTTAVRTVYGERMRHEKLDRLPPVMKSLGSLRNPTVMRALTEVRRVVNHLLAAYGLPVEIRVELARDLKKSKDERNRIIKMNREHEELREKAAARILEQGGIRDVRGGDILKVRLADECNWTCPYTGKQFGMAQLLGEDIDIEHIIPYSMSLDDSYVNKTVCFANVNRSEKRNQTPYAAFGHDEERWTAMLERMEHNVGEHDMSPGKLERFRLAGGALAEALDHFKSSQLNDTRYASRAAKEYLAVLYGGNVSQGVDSENRKRVMVGNGQATSLVRRQLGLESVCRSLPGWPGGVGRDWDKRADHRHHAMDAIAIALTGPRMIQQLSRAAESGFGSSRRASFRMAAPWDAFEDDAARCLEHALISFRIDNRARGPLHAETIYSPPRGENGAVSDSGTVSHVRKPVSRLTASDFEAIVDPRVRRTVSAFFGDRDPAKVCQDDDPATFPHLDAADGRRIPIRRVRLRKRNSLLVMGSKERTRHVENEANHHLVVRRSRLAPDTVSFELVSMFEAVRRRSSGEGVWKRDEQTLVILARNDLVELTVDDRPRLCRVQSTSSKEFEGCWIADARPFDVRRRTGGRVRISPSQFMQRACRKFSVSPIGVLRPCRA

SEQ ID NO: 527 - protein, 1208 aa, unidentified
  REGION 1..1208: note = Description of Unknown: Cas Enzyme sequence
MSKRVLGLDLGCSSIGWALLKVPDSDDEEGEVTALGVRVFPDAAENEKGRVRTRNTQRRMARLARRTRWRRRLRKKHVKSLLREAGLWPAEGSPALKAILETNPIQLRAEALDRKLEPYELGRVLYHLCQRRGFKSNAKGGIEKGQAETAGKKTGTGKHEDDDPKKLEAKMAQLEGEMGDRTLGQFLYAVSKNYDHAKGLEKEKTRGFWRAKREMYRQEFERIWAAQKPYYQSILTEDEHGLKDKVAYEQNGIFHQRPYSLPPDHPNYGRQIGYCECIPNEKRCHKYHWAAQQFIMLKQIGDLQIRTPKDGCSRTLKNAQKMSLRDALLWRTSMPLKEAHSLLGLDKDEAFNFDFEAAKRKPRARPKQEALEQEGRKEKAAERKLQGNKFGSGVAHAIGRDRAQLLGEEELIALSDAWILAQEPDDFVGAVERVALRFGWSGSRAWSAQEARTLFGYSELRDGHLRLSLEAVKALLPYLGNGECPKAFLDEYGAREAAGYERRTWARQPRLPPPHTVVLKPQHPLAAGEPQPLYPRLVEGKPLGDSLISCSSNPVVQKSLWEVRKLVNALLEKYGRPDEIVVELARDARMMPKQREKYLSLLLEREGERIDARKKLAEWGRPSSESNIRRYRLWLEMGGCNARCPYTGDSLASPGTFLDPTLVEVDHILPISRSSLDSYDNLVLCAARANRARSDQLPSEMANHGDILQRVEKWHENKSLSDDQRRAVRARIEKFDQKTVDLAGFLSRQLNDTRYISRVVRKYLRVLYDPDSSSDDPNGTRAVRATRGGITSMLRKIWWGPKERSDHRHHAADAIMIALAPPDEGGFIRRLQTCTERRRDGLPRLDFPWLAFPQEARAKWEGIIVSHKPSRKLSGPLHKEMFFGLARRETEGRIAEARVPRAKRPAESVRVYVSKCTLTDFAKAFNKTKAKLQQAKLREIRYKRIRELFSARCKEQDGKLFADAAQFTRGSNNPLRLPANRAKLAANPSLQGTAVYSIRLLHESAGMVPLEARKMRSEERVPLSSLAGNTEAREVRYAEPGSNHHVSIFELPRRAAGRPRQYAADFVTMFRHAERVMWLAREAKKTKHQPEPHVSRTHPQHPGAHFRMSLSMNEMLRLPNSFLGLKNAADGFSIWRVRMLTKGKIHLLLHTYAGRAKQAENRVAARQISPADLMKVIDSYLDSTPGHKREMVGKVSVDPLGRVSEAND

SEQ ID NO: 528 - protein, 1052 aa, unidentified
  REGION 1..1052: note = Description of Unknown: Cas Enzyme sequence
MMQTTRNRILGLDLGANSLGWALLEPDGATCTVVAAGVRVFEAGHANFDTNKEASRNKERREKRLIRRVLARRVKRKTHLFHLLQDAGLLPAGPATAPAERTQILMNLDRELATMWAGGDHRVAQIVPYLLRAAALDRQLPPHALGRALYHLGQRRGFKSNRKSPPRADEKPGVVKHDIDDLYAQLKDTKSRTLGEFLAGCDPFERRIRQRWTAREMFVKEFDTIWAAQLDHHPTLLTKGLRSALRQALFFQNPLKSQRQFLGPCEFEPTRRRAPRACLAFQAFRILQKVNNLTVISEDTGEERRLHPDEREALVQHLNTKAKITFKGIARLLKLGKVQFNLELSGEKAFTGNTTVHKLRDLLGPHWDNLAATEQDRLVNEILAYASEQGLRRRLKREWGYDDATARKVAVVALEPGYANLSRVAMSKLLPGLEEGLHYAAAAEKAYPAHRRTKAILESLPPSVRVVGEVRNPTVLRSLSELRKVVNAVIRAYGKPTIIRIELARSLKRPRMVRMDMHRRNSQNQTAREDAAKRIIEETGIVAPTSADIEKHLLAQECNWTCPYTGRTITHNALFDKSQFDVEHIIPRQRSLNNSFLNKTLCWHEENRHHKRNKTPLEAYGPADSPAFNVILDRVRRFQGPKGLTRGKLRFFSMTSAQVVEEFDGFCDRHLRDTAYASRLAADYVAVLYGGRVDFRGTQRVQATSGQANGILRSAWRLNAILGDGPGKSRDDHRHHAIDAVVTALATPDQIRILSARSNYRNGRQTFTDVPLPYTNLVDEVRRVVGGIVVSHRLNRKLNGSLHEESNYSKAQYHPTGKNGFMEEWRHIRTPIQDLSTGDIERIVDARVRESVRHKLEALGRAGPKQAFAETANHPRLPTANGGEIPIHRVRIRKKVRVTQIGGSVTLRNVSLGSNHHLEILEVAATAASRSPKWVGRLVSRFEAMQRWQQGASLIGGPRSSEEKLLFTLRPSECVRMVHDGEEGIFVLKSISQALNQSPRLEFLTLTEARQQKDFRKKGEKARVIKSPDTLRTADASKVMISPLGDILPSRD

SEQ ID NO: 529 - protein, 1047 aa, unidentified
  REGION 1..1047: note = Description of Unknown: Cas Enzyme sequence
MEKTGKYVLGLDVGANSVGWAILHAQDPKKPENIEKIGSRVFDMSIDADLDGFRAGRYSTANTERREARQRRRQTYRRARRMRKLFNLLQRENLLPPGEAGSPEDRDKILAELDREIFSKRFASVENPESRRKTAHVLPYLLRARALDEKLDPLELGRAIYHLAQRRGFQSNKKNISKKDEEEGNVKKGIHQLEEEMESAGARTLGEYFSGLDPEKERIRQRWTARSMYEAEFEKIWWAQKKHHPKILTDDFKAEVRRAIFYQRPLKSQKHLLGKCSLEPKKNRAHMAALDAQRFRMLNMVNNVEIISDKGEVLEFTAEQRRALIDALETEGNLNFRKVKKIIGIPQSYRINYEEGGEKRLMGNNTAAALIKIFGKKRWDGFTKEQKDKIVEDIISINDRGALKRRGMNAWGLDEGKADEFAEIIPEDGYSNHSLKAISKLLPLLEEGQKYATAKKEVYGDRVVTEALDQLPPVTEALPEVRNPVVIRVLTELRKVVNALIREYGKPEVIRLEMVRDLKSSRKDKAGIIKRIKENEKARYEARSAIMKEDVGIKKPSPGDILKWRLAEECNWQCPYTGKTITPGNLFTQFDIEHIIPFHRCLDNTFVNKTLCYNEENRLHKRNRTPLEAYGHTTKWDEILQRVERFKGGDMARKKLARFKMTQEQVEEEFSNFTERQLRDTSYAARLAVKYLGLLYGGDIDPDGKLRIQPGRGRATQYLRDVWRLNRILNDGGEKSRDDHRHHAVDAVAIALTTPGVTRMLSDAAKRAPKRGREKFAEIPPPWEGFLEDVRAAVDEIVVSHRVSRKVRGRLHEDTIYGPPKTDEDGKVYHPVRKRLENFGKRDAENIIDPVIRELVKKKLEEVGNDLKKLESDPPYLVAKNGRKIPIKKARVKVYQAAFPVGPDARHVHTDTNHHVEILEVTDKKGKTKWEGEIVSLYEAKQRHKRGEPIIKRDHGEGKKFVFSLAGGEIIRLAENDENEEFFRIRSISGSKQGFISVEFVKINDARKKKKIKEAKEWRKAGIEPLRKFNCRKVLVTPLGEVREAND

SEQ ID NO: 530 - protein, 1085 aa, unidentified
  REGION 1..1085: note = Description of Unknown: Cas Enzyme sequence
MDFSSYILGLDIGTNSIGWALMKTEDQGGRLVPVGIERTGVRIFEAGVAGSIEQGRTESHAKARREARMLRRGVFRDSQRLRRAFRLLQEAGLLPGDPHQPAGRDRIIKKLDAELRTTWERKLMAEGIDTAAVKVAVHHNLPYFLRARGLDEKLEPYEIGRAFYQLAQRRGFKSARKNIKGKDDADNDPNMIEKAAKGLQEEMAKVSARTMGEYFAKYNPFESADQKIRGIYTLRAMYEQEFALLWDAQAQLYPEILTPAFRQALLYDVHGVFWQRPLKSQEHLVGECTLEPGEKRAPWALLDAQRFRYRQKLNDTRIIPPDGGESYRMSSEQYDILAGMLDQEAALTMTKAKELLGLSNRYRFNMGEGGETRFVGNRTAAKFIEILGDRWQQLSPEQQNHLVADYLKSKDKPIPMQRSIGELGLDDKLAKKLAAIKLEPGYCNFSRKALAKLLPYLQEGFDLHDSIEHACYEAPQRVPLEFLPPLMDNEKIAYPPLLRAYGALRQDIRNPVVQRSLTELRKVVNAIIREYGKPAVVRIELARDMKKNDGQRREIWKRNRDLESRRTKAAAELLKECNIANPTRNDIEKVLLWQECGGPTALCPYTGKPMALSDLFGLHPRFDIEHIIPFSISLDDSFLNKTLSDADFNRRIKQNKIPGQLPGVEEMIERIERWPKSDTRDVKLERFKMADTTDIDGFLNSQLNDTRYASRLAMEYVGMLYGGKVDAAGRTRVQVGKGQVTHHIRNVWRLNTILNDGGQKSRDDHRHHAVDAVAIALTDPKTLKNLTDIAKRAKERGERWFGREKPLFPWQSFMHDVAASIRGLTVSHRVSHKVNTAFHEQTIYSREKEHDGKKCVHIRRTLGGNLRKSDLPNIVDTRVKEAVFARLQQHGFDPEKINDQQLQKIFGLPENLPMLTTRTGRSIPIKKVRVRKMETVITVGNNVRERNVSPGSNSHIEIFEVTDNKGKVKWDGWTVNSFEALQRLKNKQPVVNRVGKDESWEFKMSLAGGDVIELQTSENKRELFVIKVISVARVNGREYPRIMYTPINAAKPEKQESSLLDPLRKQLKCRKSAISPLGDIHDAHD

SEQ ID NO: 531 - protein, 1068 aa, unidentified
  REGION 1..1068: note = Description of Unknown: Cas Enzyme sequence
MAQRLNAYTLGLDLGSASVGWALLDRGGKTLVDCGVRVFDPGVDPNKFMKGEEGSSKNVERRMARLQRRQIRRRAARARDLFRALQEAGLLPGTACDSAGRHASLEQLDQELRARWRTKLVAISADHRFEQVLPYLMRGRALDERLELDELGRVLYQLGQRRGFKSNRKEGRSLKAKAEEEGKKATKKDAGEKSQVKAEIANLAREIETSRARTLGEYFAGRDPTEARRIRDRWTGRKMYEEEFEKIWAKQSEFHASVLTPEFGERVRRLLFFQRPIAMNAGAIGECELERGEKRAPVAALEAQRFRLLQKVNDLKYVTADFAEHDLTAEQRQKLAQELENKGDLTFAAIRKLLGLAKEVRLNLERGGEKKLRGNRTAATMLKAFGDRWAAIEERERQRVVEKWMRTESEEEMRQVAELEFELTPEQAMVLADTEPEDGYSRLSLKALRKILPRMEEGVPFKTAETDVYGNRFSGGEAKDFLPPVEDVLPQIPNPAVKRALTELKKVVNAIVRKHGKPQEIRIELARDLKSNAEQRYLAWKGMREQEKRREDAADKITKETGMPEPKGKDKEMALLHIECGGVCVYCGRSLGTFQDLFNGSGGVQVEHILPRSRFPDDSFPNKTLACRECNVQKHNRTPFEAFGGDEEGWKAMLERVRKLKNRAKLERFELKNAEEMEAFSERRLQDTRYVSKLAARYVGELYGGRDVPGNGETRRAVYSSSGMVTATLRRAWGLEAILREGGAPAPDGGKGKPRTDHRHHAVDAVVIALSSPGIIQELSRAAAQGPTGNARISSKSLQPPWVDFVEKVRPQILGIHVSHRLEHKLHGPLHEETNYSKVRSDGTAHVRKPVHLLSSKGTVSQAQLAAIVDPKVRAAVAAKLAEVGNNAKKLENDLPYLVTKQGTRIPIRRVRLRVKEKPQPIGSGIRERQVVTGGNHHIALFATEKRGKDRWEGMVVSRLDAVERLRRKKPVIEKFLPDSPDWKFQFSLMGGDMVEMWDEKRKERNLLVVHGISEGDLVFARHTDARPITDLKKTNEWVRLRTEDQLRIWGCRKVEVGPLGEVNSVGD

SEQ ID NO: 532 - protein, 1141 aa, unidentified
  REGION 1..1141: note = Description of Unknown: Cas Enzyme sequence
MAGDDYVLGLDLGTRSLGWAVVTADKKQLKRIGVRVFDAGANPARFAEGRPDSSNTAERRRARLQRRQIRRRAARHAELFALLQFKGLLPGPITGKRTGAALRHEILHGPPHGGERGLDQQLQARVSSWYPGESTPQVDHLMPYLLRARALDHRLEREELGRALYSLGQRRGYWSNRKAARLAEMDAAQESPVPEKKTKPKTQTRPDAEEKKREVLEGIANLERRMKEKDARTLAEYFAKWDPRERPRIRTEYTARDMFQQEFEKIWAKQAEFHEILRDERFKQRVYRLLFYQRSVATNKHLIGHCRLEPSERRAPMSCLEAQRFRLLQKVNDTTVIEGLTERELTHEEKQKLAEELEQRTEMSCRQVRHHLNIISDAAHLNLERAAGKLNPDRKVKGNRTAAHMWNVLGDTWKALSPAQQDEIVRQWMDEQDGAKLSAWAQQHLCISEEQARRFASKEPEDGYSKLSLKALRKILPIMEQGIPFKTAEERVYGNKLSGGQVFELLPPLDEVLPHVPNPAVKRALTELRKTVNAIIRERKKKPLEIRIELARDLKRNMEQRRHDTDRMEREATERKKLKKLIAIKLGIDEEKVSPQDIEKVRLWKECGAEVEKLKLWEECRGTCPYTGQSISFSDLFGSHPRFDVEHILPKRRFADDSFQNKTLCEAEFNRRYKAGNTPSEACGKSEQWEEILTRVRKMGNAEKLRRFQITSEEELAAFSSRALNDTRYASVLAAEYLGALYGGRDEEVTDPALGQKGKVRRVYASTGIATAALRRAWQLEAIVRNLFPRPKLNQPAKRTDHRHHAVDALIIALTSQAVVQRMSAAAAAYGSARGVERVTSRYVEAPWQDFVPDVQGKIAAVIVSHRVKHRLFGNLHDANAYGVTTGPKGQEIHKRRPVWELTKEQIDSEKAIVDPAIARFVKEKLAEVGDPKKFKDAPPQLRTKTGKTVPIYKVRVKVRAKVVSIGNEIRERNVSLGENHHISIFIVRNSKRQETWDSPGIVSRKDAMDLWSALKKRGRIENLVRREWPHSTAEDRPLESEFLFSLMPGDMVEMSDPLHPPKNLFLVRTISQETSGEVEIDLVRHTEARQIEDLKRISFKDFRAGKPGEWIRIRSVDQLRLADCRKVLIDVLGGVRYVHD

SEQ ID NO: 533 - protein, 1050 aa, unidentified
  REGION 1..1050: note = Description of Unknown: Cas Enzyme sequence
MLPGFFVLGLDVGVSSIGWAVMSCDRNGTATGLLAAGSHLFEAGTEGTNSDIKRGKDTPRGQQRRMARSMRRQKWRRTRRKRQLLRLLQSHGLLPASPTALQRPLDIDAFLKSIDRDLAASWLKNASHADLQRMPYSMRAAATQRRVELFELGRALYHLAQRRGFQSNRRAEAGRREDEDASEVKAAIGDLAERIAAHTPPTLGAYLASLDPDQQRLRSRWTGRAMYEHEFDAIWTEQSRHHPLSDSARAALRRVLFHQRPLKNQKHLIGKCSLIDSEHRVPIASRLYQRFRVLQTVNNIAVAPPGERPRPLSDEERISLIARLMKDGDATFAQARKAAGLPAKTRFNLETGGEKKIIGHRTDAALREALADRFDSLSETEKDRAVEDLRSFRLPEALERRGRRRWGLDAEHARLFSGAALEEGYASLSLAAIRRLLPRLEQGVTFAEARRELFPESYRAQSPLPLLPPVLDSVEDLRNPSVLRALTEVRKLVNEIVRRHGKPAKIRVELARDLKNPRLVRERLTRQNREREESRSEIRARIAREAGVANPSRDDIDKAMLWEECSGICPYTGRSIDFAALFGRTPQFDVEHIWPRSRTLDDSLRNKTLCYHEENRSRKRNRTPFEAYASDRERFEAILERVSRFKGDLFLRREKLRRFQAEQFDADFENRHLSDTRFIARAVADYLAILFGGRADESGSLRVETPTGGLTAWLRTGWGIDRLLGDSPEKNRSDHRHHAIDAIVIALSDPRAVQILARAAEQADRLGKRRAFETIESPFPEFRDQVQQTIDRVIVSHRQSRKVTGALHDQSIYSQRHVDGHRISKELHKLSPAEIRDGRIVDTRALALIREKLESLGKSNPTPQDIAKIFTDPGNAPLVNGHGGSRVRLRRVRVRASVNPETIGRHESQRLVETSSNHHTVIYATMDKRGREVWVDEPVTLLEAYRRQAAKEPIVNRSLGQGKTFVFSLAPNDFVEIDSPNAERAAPREVWRVASVSHGDNELKLHRDARTPDELKRTRSRLRVSGEKLHSLNARKVRVTHLGELRRCGD

SEQ ID NO: 534 - protein, 1165 aa, unidentified
  REGION 1..1165: note = Description of Unknown: Cas Enzyme sequence
LKLARAKAPCVRRGRPDERYIGPSNFGGPPWTAHCGKKKRPQEGVQGGVRQAGPLPVASSFTVITREGPLKYTALCIRENGDAVKPGATGGSMNAETGNRQPYILGLDIGVASLGWARVACDPEDRFRPLGLLAAGSHLFEPGTEGTVADFEKGKDAARNVQRRTARLMRRQTWRRARRKQKLLAALIRHGLLPEPRAIGLRPSANLKRPLDIDAYMKELDARLGSTWLREASHSDHQRMPYLFRAAAASGPVDDWAFGRAVYHLAQRRGFLSNRRADAGKKDENQGQVKAAIGDLAAKIEAFARAGGVPTLGAYLASLDPDEQRLRGRWTSRAMYRSEFALIWEKQSQSRALTDSARDEICSAVFDQRPLKSQTDLIGRCSLIPGERRCPTAHRLYQRFRMLQALNHLQIAAPGRAPTIPSLEQRSTLLAALEREGDLTFTRVRSLLNLKRGVAFNLERDDEKRLVGHRTDAKLLAVFGERFGTFSDADRDRMVEDLRSFRLPEALVRRGERRWGLCPDRASEFAMIDLEEGYAPLSIEAIRRLLPLMEQGLPYSNARKDAFPESCRASEPLAELPPVLKAMDELRNPAVARALTEVRKLVNECVRRHGKPAIIRVELAREVKNPRKVRERMTRNMREREKTRSDIAARIQREAGLARVTRDDIEKALLAEECGWVCPYTGRQICWDTLLGKHPQFDVEHIWPRARSLDDSLFNKTLCYHEENRSRKRGQTPSEAYGADPDRLAEIIGRVRLFKADPFVRAAKIARFEEPIPEGFTNRHLSDTRYIARAAADYLGLLYGGRVEAAVTEAEPGTRRVDVCTGALTSWLRTGWGIDRLLGDSPEKNRADHRHHAVDAVVVALSDARAVQTLARAATEADRLGKSRAFESIDEPWDGFREDTEKLIGAVVVSHRQSRKVSGPLHDQTIYSRPIAPEGQHRVRKELHKLTPSEIRDGKIVDQRALAAIRARLGELGKPDPTAQELIKIFSNPENAPLVAGHDGKLVRLRKVRVRADAGRRIGRDEKATARWVQPSNNHHTVIVEVKDAKGRIRWEDRPVQLIDVYARQAAKRPVVDRDLPDGEVFICSLAPGEFLEMDSHREPSRRAIYRVASVSRGDNELRLHADGRTADQLRKSQERVRASGEKLRQLRARKVRVTYLGGVLNAGG

SEQ ID NO: 535 - protein, 1076 aa, unidentified
  REGION 1..1076: note = Description of Unknown: Cas Enzyme sequence
MSSAMESPQKYVLGLDLGSASLGWALIALDDADDPTSLIRAGVRIFEPGVDGTSMEIEQGKDQSKAVERRTARLHRRQLRRRAARQRDLFRLLQRHSLLPAPGVLSGSPEEQRHSILNELDQHLTHKWQSAFPDNRFAQLPLYYLRKRALDESLEAPEIGRILFHLIQRRGFLSNRKENKQNPEQKKELGQVKAEIHSLEQDILSAGARTLGEFFAGLDPHAQRVRRRWTARKMFQDEFEKIWEAQAIHRLELLTPELHDKIAHLLFFQRPIAAQTHLVGKCELESGKQRAPWAAMEAQRFRILQKVNDLKLINPGSLISDPLTEDERQRLYDLLDWEGDQTFKAIKKYLSFPAEAQFNLEKGDEKRLRGNRTQAVMRKVFGDRWDGFSAGKQHQIIENWRNSESDEALIREAVEQWLLDAAAASSLSEQIPEPGYCAVSLTAIAKLLPLMQCGKSFKEAETEVYGARFSGGVVFDTLPEVRKQLESLRNPAVERALTELRKVVNAIVREYGKPYEIRVELARELKKPRQERIDATKKNRNRQREREDIAVKILRECGLSNPSRKDIEKALLHEECGGYCPYTGRHIPFSTLFDNSEFDVEHIIPRSRYPDDSFQNKTLCYLPENRDIKKGQTPWEAYGKDEQRWAEIMTRVSSWKNRGKMVRFSIQTEDALGDFSARQLNDTRYVSVLSARFLGALYGGRDVMDGEKVRQVIFASSGSVTATLRSSWGLEAILHELVPTEPGESRGKPRTDHRHHAIDAITIALTRPKVIQSMARAASMEPWQKDARAWRKIELPWKNFVPSIRPRIEEMLVSHRPEHKMSGELHKGTNYSAPSNYKGKPTVHTRCSLSALSASDIADDEVIVDIAVRDAVRMKLVELGGNPKLFDRPENAPCLSARDGRLIPIRKVRIRETKNPLRVGHGARERFVAPGGIHHVALFVVRDERRREKWDSDVAQVTEVYRLCPKNDHRKGRPRSAVKEPPISRQLKADPEAQFLFSLMKDDTIKVTDANGTHILRVKKFSDNKQMWFVPVNDAHDDAQQKKLCITWSRTPNSLKELHPRKVVIDLLGKVHPAND

SEQ ID NO: 536 - protein, 1061 aa, unidentified
  REGION 1..1061: note = Description of Unknown: Cas Enzyme sequence
MNRIADTPEYTLGLDLGSASIGWALVALDSRHIPQGLLKGGVRIFEPGVEGSTLDIERGKDQSKAVARREARLHRRQLRRRAARQRDLFLLLQQKSLLPPAADTSASLSDQRHQVLNDLDRALTSDLRRTVEAASSRAVEQSLPYYLRKSALDRKLSAVELGRVFYHLIQRRGFKSNRKEGKKAKDDDLGAVKAGISELEAQMASAGARTLGEYFAGLNSHERRIRKRWTARSMYEREFQLIWQSQRGYWPDALDDEFEAKVSRLLFFQRPIAAQEHLIGFCELEPEERRAPWAFLEAQRFRVLQKVNDLRVIEHGHLEERPLIEDEKEAVFTKLENEDDQSFAGLRKLLGLKKATFNLERGGEKRLRGNRTNSFMRSVFGVFWDEMPEEEKHKAVTLWYRTESEEKLAQKARERWALDENAAKKFADTRPEDGYCSLSLKALRRLLPEMEKGISYGKIRPELYPEERKEPKGLLPLVRDAVPSLRNPAVERALTEVRKVVNAIVRQYGKPYEIRIEMARELRKSRKEREEATRQNRTREREKEIAKTKILKECGIQNPSRSDVEKARLFEECGGICPYTGRTIEFSSLFGDSQFDIEHIIPLSRCPDDSFLNKTLCYHEENRSVKGGRTPWEAYGADEERWAQILVRVMKFDNQAKVRRFELRSEEELGEFTERQMNDTRYTTRLAVDLLSTLYGGRDIPRGDGTNRRVIHATTGMVTATLRKSWGLEAILREAVPSYNGESKGKPRTDHRHHAIDAITIALTSQAMMQRMSVAAANAPSWQSGRRSFRSMEAPWPNFVDSIRPYVESMIVSHRPEHKMSGPLHKDTIYGRPYLFEGRSVVNLRRSVQGITPAQILEIPDLAVRQAVEAKLVEHSGDSSKFNPDEPSTLPRLTTNRGEHIPIRKVRVRETKNASALLELPGNRFVQSDEIHHVELFVRRESHKEIWVHSPVTLMEAYFRHRQNTPIVARKLEDDPDAEFLFSLMKGDMVEMNYKGQRGNFRVKKFYSSGQIWFADGNNAQQDKDQQRDGTRWSKRPDALRELRPRKILVDLLGKTHPAND

SEQ ID NO: 537 - protein, 1099 aa, unidentified
  REGION 1..1099: note = Description of Unknown: Cas Enzyme sequence
MSESGISTQPYVLGLDLGSASLGWALVGIDAMERPSSLIRAGVRIFEPGVDGAKPGTPASAQEIQFGKDQSTAVARREARLRRRQLRRRVARQRELFGVLQGAGLLPTDDTQGTGIGSEQRHRILNNLDVTLVNRYRNGADQEAFAQMPLYVLRKKALYEPLVLDELGRVFFHLSQRRGFQSNRKDVKKKTKDSEDQGQVINAIGDLERAIKAAGAQTLGEYLAGLDPHEQKDGQKVRRQWTGRKMFEKEFQMIWDKQREYHTDLLTPELHDRIWNLLFFQRPVAAQKHLVGKCELEPDKRRAPWAALLAQQFRLLQKVNDLRLIEDDGNELPLNEDGRAAVFDLLENHGTQSFTAIKKHLGLPKEAQFNLERGKAKELKGNVTAQSMRKVFGERWKEFSEGKQNQIIENWRNSEKDEELKREAMEHWGLDEAGANALVNEKAPGDYCSLSLVALGKILPLMRAGKSFKEAETEIYGNRFSGAAVHSLIPVLRPNRKHFRNGTPPPQDPLMASIANGLRNPAVERSITEMRKVVNAIVREYGKPCEIRIELARELKKPRSKRLDETARNRKREAENKALAERMHNECGTPQNPSRNDLEKAKLWVEQQGECPYTGRSLPFSRLFDDNNGFDVDHILPRSRHPDDSYQNKVLCWGDTNRMVKRNQTPYEAFAEQDPENWHQILARVARWKNPGKLRKFEIRSTDDLAEFSSRQLNDTRYTSLLAARLLGTLYGGRDLTENGRKRQIIFASTGAVTATLRRNWGFEQILRNIIPPEPSESTGKPRTDHRHHAIDAIVIALTRNDVIQAMARASALEPWQPGTRSWRHVPQPWRTPDFFRSVEEQVREMLTSHRPEHKVSGELHKGSNYGRPYPYKGKSTVHSRVLISALTVKDIEEDDVIVDHAIRDILRAKLTEIGGNPKAFEKPENTPYILTSTGKRTPIRKVRIRETRNPLRVGEGSNERYVASGGIHHVELFVTRDEKRRELWDSRVIQITEAYKRQREKKPVVARVLEDALEAEFLFSISNDDTIEIKDGDLRKIVRIKKSAENKQIFYVPVNDAHTDADQMKLAIVKSKTPSTLKPLEARKVVVDLLGRVHPSND

SEQ ID NO: 538 - protein, 1238 aa, unidentified
  REGION 1..1238: note = Description of Unknown: Cas Enzyme sequence
MSPALDSSQKYILGLDLGSASIGWAAIRLNDQLEPTEVFDAGVRIFDPGVEVTAKIPTEEAIMRGIDRSKAVGRRLARQARRQSGRKRARQNKLFKLLQANDWLPTYEEFRDEPLFAQKHLTFNRLDKELADALSGSRRRRGADAVMLDIDQALPYVLRKEALERELKPCELGKITYHLSQRRGYRPSAVDENDREESAEEEETASSSKKRKKKRETEDDGDEQSTGKVEKGISDLNTKMQAAYQTGTIKAPLIGPYFGTFIAHNPHDERIRHRWTAREMFENEFDLIWAKQDEFYRTSHPGLTPEELEKREKLRQEIRKLLFFQRPLASTAHLIGFCDLEQEERRAPWASLEAQQFRLLQKVNNLRYFDRTDMLEKQLSEEKSARLVKKLQEEGDQTFPAIRKLLDMPDAEFNLQKKGKPDDDPKKKINEGKIEGNRVNAVMLRVFGAERWDSFTWDEKVAIVESWRTTEGLKERERVAADQWSLDKFHAHIWAENRPPADYCKLSRKAILNLLDPAKGGMWNGVPFMTARLKVYPNPLAGKKPLDYVPEVTGPNGSIRSLTNPAVIRALTELRKVVNAVIRKHDKPYEIRIELARELRKNRKQRKDTEEANEKNHERRLEAARRILQECKNYDPQGLDAEGLVRAKRDDVTKMLLLMECHCTCPYTGQSIGYSQLFGGEVEIEHIIPQSMMVDNSFDNLTLTFRGTNHEKLDRTPWQHFGGNQDDWENILKRVEKFGNKRKLALFQLLTPEQARKFGARRLNDTRHTSKLAGRLLMTLYGGRDVLPDAGVEVDEQDEFKDSAGRRAIFVSSGMVTALLRDAWMLNLHELIGDSATKTAETAQEKREKNKESKKKDRSDHRHHALDAVVIGLTTESLIRKINTLSASYYVQHQNDRYTSLGYRELLKLVRREARPECLNGERLERLRDTFKGIVTSHRVNHRLRGELHKAGYFGKERGRTPKNDTPIRHKRISIRDLSKMEKPEDIESTIAHIVEGKNKDGSPNTTIQQIVREFGETIRGKNKKGEEVRGYRMWKEAEHRYPTLPGKRLGKPVPIKKFTTWFTKHTTSLGMEKRGKGHPERNVETGEIAYVSFFNVQNRRGTKWKWDVVKLFDAAQSIQSVPKRERVRTNIFALPSEEFKKSLRDDDEVTYRFSLMKGDLVEMENGEIVIVRRFESDGRIWISAVNAAGTDKMLNETNSLHRIGLSDFLKKRPKDSDSPQPIRIDPIGNKSRIELGA

SEQ ID NO: 539 - protein, 1040 aa, unidentified
  REGION 1..1040: note = Description of Unknown: Cas Enzyme sequence
MVALDSANEPTALIRAGVRIFEPGVDGTSLDIEQGKDQSKAVDRRTARLHRRQLRRRVARQRELFQLLQRSDLLPVPESGCGASSEQRHKLLNELDQVIARRFKELGESASFGQMPLYLLRKRALDHPLEATELGRILFHLSQRRGFKSNRKEVKKSAKENEDLGQVKADIHALEKEMCDAGARTLGEYFAGLDPHIQKVRRRWTARKMFEEEFAAIWTAQQPHHISLLTDELREKIARLLFYQRPIAAQEHLIGKCELEPGKQRAPWATMAAQRFRILQKVNDLRLIESGNSISKPLDEEQRARLYRLLDREGTQTFAAIRKHLGIAKGIQLNLERGDEKDLRGNRTQKSMLKVFGDRWDTFSEGKQNQIIDNWRNSESDEALIREAVEHLGLDNDAATRLVAENPQSDYCSLSLTAIGKVIPLMQTGKSFKEAETEVYGSRFSGLKVHDTLPTVRQHLVSLRNPAVERALTEMRKVVNAIIREHGKPYEIRIELARELKKPRQERVQATKSNRKREVENKRVATMMVTECGLPPDPPRKDLEKAKLFLECGGICPYTGRSIPFSQLFQNSEFDVEHIIPRSRYPDDSFQNKTLCYLPENRENKRNRTPFEAYGGDEDRWAQILARVAKWSNPGKRDRFLLQDTQQLVAFSARQMNDTRYTSVLAGRLLETLYGGRDVIESGGTRQVIFASSGAVTATLRRSWGLEGILQELIPAESGQSRGKPRTDHRHHAIDAITIALTRSSVIQAMAQAASLEPWQEDSRAWRRITSPWKDFVGSIRPHIEQMVVSHRPEHKISGELHKGSNYARPYIYQGKATVHTRCSIASLKVADIEADDTIVDPAVRNAIRSKLEELGGNPKLFEKPEDAPCLQSVDGRTIPIRKVRIRETRNPVKVGQGMRERFVASGGIHHVAFFVVRGPNRKEKWDSRVVQITDAYERRRRKLPVVSRELATIPDAEFLFSVMKDDTVEVSDPKGTRVLRVKKFNDQKQMWFVPVNDAHDDGQQMKLGIAWSKKPSGLKDLCPRKVVVDLLGKVHAAND

SEQ ID NO: 540 - protein, 1137 aa, unidentified
  REGION 1..1137: note = Description of Unknown: Cas Enzyme sequence
MSGALRRKLTKNSRAIAAQVHCYPSTRFHILRQGGIGMSAAMDSSQKYVLGLDLGSASLGWAMIALDDADKPTSLLHAGVRIFEPGVEGTSADIQEGKDQSKAVDRRTARLHRRQLRRRAARQRELFHTLQATGLLPVGESGAKAGALERQALLNELDQSLVLKFSPSTDNAADATLFAQMPLYLLRKRALDHALEPFELGRILFHLIQRRGFKSNRKETKKSPKENEDQGAVKAEIHSLEQEMRAADVRTLGEYLAGLDPHTQKVRRRWTARWMFEKEFKEIWVKQAPHHPSILTPELHDRVAYLLFFQRPIAAQKHLIGECELECGDATHPPQRRAPWASMAAQRFRILQKVNDLKVIHPDSDIATPLSPEDRMKLYHLLDTEGTQTFKAIRKHLGISKECFFNFEKSDQNKDGEKTLLGNRTQHSMLKVFGRFWYEFTEGKQNQIIENWRNSESDEILMQEAVQHLGLTPEEAQLLVNEKAASDYCALSLKAINQLMPLMLEGASFKTAETTIYGDRFSGLTVHETVPEMRKILPTLRNPAVERAMTELRKVVNALVREYGKPHEIRIELARELKKPRGERLKETDKIRKREKERADIVKKILTECGNSNPSRADIEKGLLHRECGGICPYTKKVINFSSLYNDSEFDIEHIIPRSRFPDNSFQNKTLCHQSMNQLKGGRTPYEMYKGTPEEYEKLLDRVRSWPIKNRGKLDRFRVGEPGVKEDNTLEGFSERQLNDTRYTSVAAAKLLATLYGGRERINPDGSKEQAVYATSGSITAALRSTWGLEEILRELVPPQPGDTRGKPRIDHRHHAIDAITIAATRPAVIAAMARDSSRAIDPRTRPKIEQPWKNFIPSIRPHIEQLLVSHRPEHKLSGELHDETNYGRPYQENQKTLVHIRKRVAGLSTKDVANIVDLEVKKAVERKAAELGGNLAACELKNDWPVLSTRNGSTIPIKKVRLKKVLDATPVGNETRRRYVAESSNHHVAVYAQLDAAGKEKRWDGVIVSLLEAYQRISEAKRSEAYKKHRRSIPVIQRSITGAEDLQFKFSLMGGDTVELHRNCDHISEVCNPEIYRVRTIAANGQLSLVKITDARMKKDIQAAKEWWSPTADTLRKLGCRKVIVDLQGRRRYAND

SEQ ID NO: 541 - protein, 1156 aa, unidentified
  REGION 1..1156: note = Description of Unknown: Cas Enzyme sequence
MCGALRRKLTKNSRAIAAQIHCYLHTLLHILRQGGIEMSAALETPQKYVLGLDLGVTSIGWALADIEAQEIVSTGVRIFEAPMDVAKFEAGEPGGSHAAARRKSRLQRRQTNRRQARHRDLYLALQSAGMLPFAGKKAEDRHKELTTLDVRLMNKWRPRIHSEAPEIGDPDQVLCYYLRSKAASEKMELEDLGRALYHLGQRRGFKSNRREGRSGLGSSEAKKEEAERSQIKSSIKSLQSELDANELTLGQRLAFVNPHRVAIRNRKRADIAPIWTARRMYEEEFERIWTTQAFHYPALLTQNFKNRIERLMFKQRDVSAGKPGTCELERKPALPRAPRSSLLAQHFRVVQTVNNLRVDYASEKPMDIETWRTKQKELITTLSTLIFERKGKRSNQPLFGIPFAQLKALLGLSKRAKLNLDDDETNSYLRGNRTNAIMSRAFGTDRWKNMDEQEKIRIVRRWITESSPEKLSRIAKTQWELPHDAAEQLASLEPEEGYAALSHVAMLKLLPHMEKGLTYSEAIKEVYGNVLSNKEEHKYLPPVDDEDSALPRIPNPVVKRALSELRKVVNAVIRKHGRPDRIRIELARDLKRNAEQRERLHENIKLRTRERAAAKKWIEERGERPTDRAMEKVLLYRRCKDCVYCTKPLGPCEALFSDSSGIEVEHVLPRRCNDNSFSNKVLAHRACNSTKGDQTPRQRWDPSPEWDEMLKLVRSLKDKALLDRFTISTEEELQAFTNRHLSDTRYISKLATEYVELLYGGRDAAIPWEDRNRRCVYASSGALTAEIRKRWGLQAVLNPSTERTSSVVKSRDDHRHHAVDAIVIALTTESVIQRAAFEAQRHDRASGHLLPRYFSPPWPAQGDIEERISQFRSEIKRVVNSMNVSHRPKHKMSGELHDATNYGKPYKVGKKDVVHIRKGVAGLSENDIENIVDSNVREAVKAKALEPGGLADCEKKKEWPVLHAPNGTKIPIRKVRLKKVLDVTPVGDEIRRRYVAESSNHHMVIYAQLDAHGKDKRWDSIVVSLQEAYDRVAAYKRTDAWKQHHRITPIILHSPSGSEGLHFRFSLMGGDTIETQKDYNERGKLYRAGIYRVRTIATNGQVSLVRIEDSRMKKTIKDAKEWWSPGVDALRKLGCHKVVVDLLGGIHYAKESAFTQ

SEQ ID NO: 542 - protein, 1127 aa, unidentified
  REGION 1..1127: note = Description of Unknown: Cas Enzyme sequence
VPGMDFRKYTLGLDLGSASLGWALVELDDSDNPVRLMDAGVRIFDPGVVGGEAEIQKGRDKSKASERRSARQTRKQTYRRSLRQKKLFRLLQEHGLLPSEENSAQQKFSAQRHEILNTLDQKLTAAWRGKATLPGSSMDMADQSLVYLLRQNAVDRQLEPFELGRILYHFSQRRGYRSNRLDADNADDLGNADAVDATEPEETKKKAKAAKEPTEKTLGEVAKGISTLRSEMEAKGTRYLGSYFAMVNPHEKRIRHRWTERAMFEEEFTAIWNKQREFYSELLTDQLEKEVRYWLFFQRPLASSNHLIGFCELEKGERRAPWATLEAQRFRLLQKVNDLRVIERGMQNERRLKKEERERVLDHLETKGDLTFKALKELLAPVVIDGSNMVRGVKDKIESNRVNVHMLRVFGDRWNVLSREERQKAVEQWRTIESAETLKRVGIEQWQLDENAAARWGDTKLARPPKDYCNLSRLAISKVLPMMETGCPFKTVEREIYGNRFSGAEPMRLVPRVADYLPSITNPAVMRALTELRKVTNAIIREYGKPYQIRIELARELRRNRKDREKQFLDNKARQERREKGARWILAQQSKPTPSAQDVRDVPGHMVDKWLLAEECRWLCPYTGKSINYTSLFSYPEFEVEHIIPLSRCTDNSLTNKTLCHRDENQRKGNKTPWVAYHEDEDRWAQILKRVSQFTNGPRIGDHQKLRRFKLSSTEDIEGFTRRQLTDTRYTSKLASRLLMALYGGRDTTVSADDDTAEFFDKTGRRIFASTGGVTHLLRDAWVLHPDVVLNMPSMNDGEKRKGKDRSDHRHHAVDALVIALTTEQQVKAVSLHAASKQEKKWPLDYRDLVRGLKTPWNNRDQFLGDVFHRMLVSHKPEHKLGGKLHIDTIYPEPLRDPNDGKHYVSLRRSIVGITDKQIKAIQGDNIRMAVEQKLREHGGNSKKFDPDNLATLPVVKSRDGRLIPIKKVRVRESKSPESLMSFPGSRQVESESIHHFEFFARRDRKNREEWTHIPVSIIEAHVRYGRKNPVIAHAHPEDQNAEFVFSLMKGDTVEMDYNGSRDVFKVKKFYSSGQIWFTQINNAQKDEEQKKDKTAWSVNPNPLRLLNPQKVTIDPLGRKYGVNRAT

SEQ ID NO: 543 - protein, 1070 aa, unidentified
  REGION 1..1070: note = Description of Unknown: Cas Enzyme sequence
METPQALAPKYIGNYVLGLDVGSASLGWALIQLSNADQPVSLIRAGVRIFEPGVDGTSLDIEQGKDQSKAVDRRTARLHRRQLRRRAARQRDLFALLQRVGLLPAPKGAAEATSEQRHAVLNALDNELALRFTSSVDAAFAQMPLYQLRKRALYEPLDPFELGRVFVHLSQRRGFLSNRKDTKKSVKDNEDLGQVKADIHALEKLMQEAGAQTLGEYLAGLDPHKENVRRRWTARSMFKDEFEKIWASQQPHRVDILTPELHDQIAELLYFQRPISSQSHLIGKCELEPDKQRAPWATMAAQRFRILQKVNDLRLIVPGHLDGIPLTPEQRTSLFTLLDREGDQSFANLRNKHLGVAKGVQFNLEREDEKSMRGNRTQKSMLKVFGERWDTLTEGKQNQIIENWRNSESDDLLKREAIEHLGLDEAGAQRLLDEKAQPDYCALSLKAIEKLLPLMQAGKSFKEAETEVYGSRFTGENVYDFLPPVRDHLTSLRNPAVERALTEMRKVVNAIVREFGKPYEIRIELARELKKPRQERVKATKDNIKRRKEREDVARRIVAECGLQNPSRPDIEKALLHMECGGICPYTGRSVPFSDLFHNSEFDVEHIIPRSRFPDDSFQNKTLCYSLENRQNKRHRTPFEAYSPNEELWAQILQRVRSWPIPNDGKLKRFLLSDPKELEGFSARQMNDTRYTSVLTGCLLETLYGGRDVVEDGGTRQVIFASSGKVTATLRRSWGLEGILQELVPVEPGESRGKPRVDHRHHAIDAITIALTRQGIIQAMAEAASLEPWQEGARAWRKIVSPWKNFVDSIRPHVEQMVVSHRPEHKLSGELHKGTNYSRPYIHCGKQTVHTRCALATLSTVDIDAEDVIVDAAVREAVRAKLEEIGGNPKLFEKPENTPYLVSPNGRAIAIRKVRIRETKNPLTIGSGARQRFVASGGIHHVVFFVTRDQNRREKWDSTVVQITEAYERRSRKQPVIARTLSTDTEARFLFSVMKDDIVQVTENGVTRLLRVKKFGENKQIWFVPINDAHDDANQKKLGITWSKKPNTLKDLKPQKVAVDLLGRVHPAND

SEQ ID NO: 544 - protein, 1078 aa, unidentified
  REGION 1..1078: note = Description of Unknown: Cas Enzyme sequence
VPSERSSPFVLGLDLGVSSLGWALLDPRNQSFAAAGVRIFNSGMDENKFERGEQGASNNVERRKARLHRRQLRRRAARQRDLFLALQEAGLLPAEPRGDSPENRHCVLENLDRRLTYTWAERIQAENPLIVAPQHVMPYFLRARALDYPLELHELGRALYHLGQRRGYRSNRREVRSLQDEEAGKSKKPKLPADDDDKQVLAEIAGLEVELASSGTRTIGEFLSRKDPALARIRTLHTARKMFEEEFEKIWAAQLPHHPGCLSTELKRVLHKLLFDQRAISAGKRGMCELERNCQRADMYTLAAQRFRLLQKLNDLAVIHLDDEKRPLSSDERLLLMQRLEEDGDITFEQARLMLRLPKRTRFNLAVEGDKRIPGNRTNAVMLQAFGDRWKTFGDSERKHMVRVWAEAEQAETLANIATQEWGLDAIAARKLANAEPEYGYCALSIHAISKLLPAMEQGEHFKTAETNVYGNRFSGNDAKDFLPPVEDVLPQIPNPAVMRALTELRKVVNAIVREHGKPAQVRVELARDLKRSARDRQRLADIAEDNRKRRARMVARIQAETGLRREPSGRDIEKGLLFEDLQECAYCGKPINFQTLFSDTPQFDVDHILPLSRFPDNSYANKILACNTCNATKTNKTPVEAFGPDAEMWDKIVMRVSRTRKTGKQERFALGEDKRRRFLLQNDDEVAEFSARHLADTRYISKLAARYLEELYGGRDRQVPWEDQRRRCVFASSGMVTYTLRKAWGLNSLLADAGSNHNEAEKNRGDHRHHAIDAMVIALSNQAVIQRLSSAAAMGDGRIVGRISSRTAPPPWGAFVDSLRPLFQGINISHRPDHKLNGALHDDTNYGWRKEGGKDCARLREAVSKAAGHANRIADPKVREAVMQKLEELGGKAEKLATNLPMLITRTGKQVPIKKVRVTVKNKPQVIAEGARQRYVALNANHHVCIFETKNSKGGVVWDSPGVVSRYEAMQRWKRQPIVQRNLSKGEEGRFLFSLMNGDVVEMDDVRAARSLYVVRGISDGEIDFVRHNDARKKDGLKKASDLSGDFVRARSIDRLREWNCRKVIIDVLGRIRNAND

SEQ ID NO: 545 - protein, 1432 aa, unidentified
  REGION 1..1432: note = Description of Unknown: Cas Enzyme sequence
MAKNHRSSTLGAEADCVLVPLGMAKNHRSSTLQRMCLWHIKTLCYHEENRSVKRGRTPWETYGADEESWAQILERVKKFGNQAKFRRFELRGEEELREFTERQMNDTRYTTRLGVDLLSTLYGGRDIPRADGTNRRVIHATTGMVTATLRRAWGVEAILREAVPSHNGESKGKPRTDHRHHAVDAIVIALTSQAMVQRMSAAAASAPSWQTGRRSFQSMESPWPDFVDSIRPHVTGMIVSHRPEHKMSGALHKETIYGRPYRFEGRSVVNLRRSVQGITPAQVMDIPDPAVRQAVEAKLSEYGGDSTKFNPEDARTLPSLVTNRGEHIPIRKVRVRETKNADALLELPGKRFVQSDEIHHVELFVQREGRKEVWTHRPVTLMEAYSRHRRNLSVVSRELEDDPSAEFLFSLMKGDMVELDYNGQRGVYRVKKFYTAGHIWFAHANNAQPDPSVPDAFVLKRGGGEWRTSHNHYEFIQRIPQNDEQFFRRWQGRCKDRLSDGADARTVGQLASEGLIHGAPEIIGGRIASGNTVGAARAFRDFMLRNSRTYSAIEMESAGFLKACVEDGGERDRIVLKAITDFGDERKERLDKLPRNAVRAWAMSNVFDLVSVLSPRLVHAVDPHGRAIVPMHDRQPLLAQSFELAQRHFKKQHQARAERLRNVLPAYGALFRCVLSSPRMSFGEDKDLFETLAAHIAVSDHPHPVRIDGKPGTGKTTFLTLLFHALHRLASTDDSVPIPIYINLKRYATPDRGGEEECDAGCLMEHDLRLLEEMPDKPVVILIDGIDEYVRYNESVEYRLMELIDRCPRARKIVGVGLNHFSDKDLYTRNTPILLEPQVTITLGDVQRTSAESQTFLRAFLDANRFDGHMSVDDLMLQAKRFRLHSIDLQTASMLFDSFDVQKYAKASSLSEFFYMFCQRFLRGHETLDDAAKLAFDYVVKGERVDVRGLAKKRAWKLLHIHITIVDYLIAYYVCSVVREAGRNPNTELSDLNWVYPYRINRFSKDIVNLSLKSQIDVRRGAQLIFEKGDQKAKPHACYLVGRLENANEKEKAKEWLTKSCKSYIEKLRQEKKEHLDRDELLLARTVYISLAYLGDTNASDTYISLLVSRKDWNDVNRGFHLEYYDDIPFDPEQQLSHRDPLAAFPRTFETLRERLEQHISDFDYGLFNIEVVTLYSLAQHRHAHRNLNPEVWMNLRDFIPKLMESEFLSEPVREYLMMLLRVFRKPYFAQGQVAMNLYRLKRVKRQGWVERKLGLARVESVADHTFGACLLAMLYLPDEGPTDWAGYDKSEIITTLLAHDLPEAFTGDITWKKQSEQTQRREQVVFGCLSMASTYANIADVTEYHRLYMNFENGTTLNGRIAKEIDRIENLFQMYLYGQKVQIHDFEVWRRSLVDSVRTDAGKCVLKIIQDMFPQRNVNPFRPPTGTKRKR

SEQ ID NO: 546 - protein, 1044 aa, unidentified
  REGION 1..1044: note = Description of Unknown: Cas Enzyme sequence
MKPENRKNAFVLGLDLGTNSIGWSLIDPLEKRIIALGSRIFSPAATGDIDSGIEESNAAARREARQIRRQLWRRRRRKKKLFLLLQKKGLLPVGESRTPEQRHRIISELDENLKKSLKEAGEVRVDHLLPYLLRKKGVEEKISLFEFGRALYHLGQRRGFESNRKQQADDEQSGVVKKHIAELYNEMGKVDCNTLGQYFATLDPELIRIRERYTHRSMYKEEFSTLWDKQAAFYPEILTNSLRQELYQVIFFQRKLKNQKYLVGTCELEPDQRRIPKAELLFQRFRYLQKVNDLRGVNEETGEIYILSGEQKKILADYLENKGDLTFKKIVRLLGLPPETHFNLEAVEKKLPGNRTAKQLRKIFSKQWDELGEKQKDQVVADLLSFEKNEPLRKRARVHWGLNNEQAEAFIALTLEQGYGNFSRKALEKLLPFLEAGISLQAAIKKLYPERLRMTRLEMLPPVLDVFPEINNPVVVRGLSQLRLIINQLMGKYGTPDIIRIELARSLKVGKKLRRERDKKNKRNRKRREEARAKIILEQELGFGLHPPAWAIEKYLLAQECNWVCPYTGKAVGGLISLLGPESPFQVEHIIPRSRSMDNTYLNKTLCHHEFNMHIKKNMTPWELFHEDTDIYENVLQRVRKFKGDARRAKLMRFTMTPEQVEEEYDRFCERQLRDTAYVSRIAAQYLGILYGGQSDDRNRLRVQVSAGQLTAILRAAWNLNLILGAPYKSRDNHRHHAVDALVTACADPGLIRKIGQAFRKNDNGRGDLSAIEQPWDGFFEDAREKILSFHPSHHVTAPVNGAFHKETVYGRPRTLVIEGKEKKVTFYRKPVTKLSKSEVNRIVDPVVRKQVHKKLEEVGTLTKLDRTSEFPAMPVQNGNSGPAIRKVRLWKAGTPVPIGKRDRQRFVNLGGNHHIEIFAILDKQGKIKKWKGKVVSLFEAMERKRQGAPIINREHGLGTRFLFSFVKGDCFRAVVDGKEKIYQVRMFTTDGGGRIRMIEYSDARQSKALEEKDHPRKSVDQLRKMQCRKITISPIGEVYTCNA

SEQ ID NO: 547 - protein, 1069 aa, unidentified
  REGION 1..1069: note = Description of Unknown: Cas Enzyme sequence
MTRIFGFDIGTTSIGFAVVDANLATGTGEVKWLGVRIFPEARDPDGTPLNQTRRQKRMARRQLRRRRERRRALNECLTDAGLLPRFGTAAWDEAMKMDPVDLRARALDKALTPHELGRALYHMAKRRHFAERAPGEGADDLTGDGKQDAEEKKAQSARETFLQELRQTGETIGQRLATRKPPLRQRGLHANRAAVADEYERLWRAQTPYHAALQEPTLRARVETLIFDQRPVFWRTATLGTCRLMPGEPPCPRGSWLSQQRRLLEKLNNLSIVGGNGRPLDEAERAAILGRLEAQNSVSWAGVRAALKPLYAARGEPGGERRLRFNLEEVDKNGLPGNLIEARLAAIFGPAWANHPHKQAIRDGVPARLRQADYQEVGQRVVILPEVERRQRRAAAGSFFMNEFGVTEAQAAALRDMHLPSGWEAFSAAALRKCLPQLQAGVRFGALLAGQEWELWRAENFPGRDQPTGEVLARLPSPGQGTPAQREEQIRIASLRNPTVVRTQNELRKVVNNLIGAFGKPDLIRIELARDVGRSKKDREEKRAADRNLAKRRKDAEKDLQENRIEPSRSDIEKWLLWQECNKFDPYSGRAICFDDLFRHGEFEVEHIWPRSASFDDSFGNKTLCLKALNNRKANRTPFAAFGNDGPAWDEIKKRVWGLVHDGKMSRGKAKRFCSELAMDDDFKKRQLNDTGYAARQAVTFLRRLWPDIGSAAPVTVQTVSGRVTAQLRRLWGLNNILSEDGEKTRADHRHHAIDALVVACAHPGMTQDLSRYWQAKDDPVAPKPPPLDPPWHDIRADAAAWKEKILVSHRVRKKVSGPLHKEQPRGYTDDDITKDLTTFGIFVRRVGVEDISADTLAIRSVDKTTRSAKLVVRDNAVRSTLIAHLKISGKPAAKSYPPYPRVSASGPEIRKVRVLTVQQKELMVAAANGYFDSSTNHHIAIYQLANGKADFEVVSLFEAARRLARHEPIVRRRRADSARFVMSLAQGDVVEFPDGDHKGYWVLHGVASKGQLTLARINDARPTSQKEARRLHLDGVREDFEPRVGGLLAARARKVSIDPIGRVRPAGD

SEQ ID NO: 548 - protein, 1047 aa, unidentified
  REGION 1..1047: note = Description of Unknown: Cas Enzyme sequence
MNLIFGLDVGTTSIGFAVISHDHGSEPAKGRIERLGVRIFPEARDPKANTPLNQDRRAARLRRRHLRRRRQRRQDLNKVLSEAGLLPLPDSQQWSVVMKADPYALRKRAFQGEELTPHEVGRAIYHLAQRRHFKGRDLDEISGSDQESKPDKKDPAAAEEAAGKEAALQTSEELKKEGKTLGSWLAEKGPHERKRGKRATRQDVEDEFNGVWRPLLAGDVGEKVHDVIFHQRPTFWRLNTLGQCRLVPGAPPCPKGSWLSQQRRMLEKLNNLELGGRLGERPLTSEERNAILKKLQTQASMTWAGVRKALAPVYRSQGEAGLEKGLKFNLEEGGEKKLLGNPLEARLAAILGATWENHPHKQAIRDAVPDAIWRANYREEGQRVLIVPAKERQQRRGEAVGQLKERFGLSEEEAGKLIQEKLPVGWDAYSKEALQKILPLLEAGIRFGAILNSTDSHMESWREENFPNGVPQAENSEGLARLPSPANQEERKHLATLRNPTVARARNELRKVVNNLIHMFGKPDLIRIELARDVGHSKREREEKAKAMKAQEKRREEARKDLKEKHIAEPSREDIEKWLLWKECGHYCPYTGNPICFDALFHRGKFEVEHIWPRSRSLDDSFRNKTLCHSDVNQRKGNQTPYECFQKDPEKWKAICERLNKMKSSKEGQGRMSPGKVKRFLAEEIPEDFTSRQLNDTAYGARDAVAYLKKLYPDLGPQGPVKVSAVSGRVTAQLRRLWGLNNILADTGEKNRGDHRHHAIDALTVACTHPGMTQKLSRYWQAKDEGRVKDLQLEKPWETIRADAETAVKDIIVSHRVRKKVSGPLHKETVYGDTGNEVEEKGVTYQYFVTRKNVEALTKSELDKIRDQHVRAIIKRHVEEHGGDPKKAFPSYPKHSPKGQEIRKVRLLIKQQQKLMAKVSTGYADESSKHHIAIYRLPNGKVVYHTVSLLEASRRLSRQEPVVQRERGDGAQFVMSLSKGDSLRFVKDDECKIGIIESVWSSGQVVIVDHNDAVGVTRSQPSATKLIKSGAKKISVDPIGRVRPAND

SEQ ID NO: 549 - protein, 1050 aa, unidentified
  REGION 1..1050: note = Description of Unknown: Cas Enzyme sequence
MTLIFGLDVGTTSIGFAVISHGHGSEPAKGRIERLGVRIFPEARDPKANTPLNQDRRAARLRRRHLRRRRQRRQDLNKVLSEAGLLPLPDSQQWSVVMKADPYALRKRAFQGEELTPHEVGRAIYHLAQRRHFKGRDLDEISGSDQESKPDKKDPAAAEEAAGKEAALQTSEEIKKEGKTLGSWLAGKGPHERKRGKRATRQDVEDEFNGVWRPLLAGDVGEKVHDVIFHQRPTFWRLNTLGQCRLVPGAPPCPKGSWLSQQRRMLEKLNNLELGDRLGERPLTEEERNAILKKLQTQASMTWAGVRKALAPVYRPQGEPDLEKGLKFNLEEGGEKKLLGNPLEARLAAILGAAWENHPHKQAIRDAVPDAIWRANYREEGQRVLIVPAKERQQRIGEAVGQLKERFGLSEEEAGKLIQEKLPVGWDAYSKEALRKILPLLEAGIRFGAILNSTDSHMESWREENFPNGVPQAENSEGLARLPSPANQEERKHLATLRNPTVARARNELRKVVNNLIHMFGKPDLIRIELARDVGHSKREREEKAKAMKAQEKRREEARKALKEHHIAEPSRKDIEKWLLWKECDHRCPYTGDHICFDALFHRGKFEVEHIWPRSRSLDDSFRNKTLCRSDVNQRKGNQTPYECFQRDPEKWEAICGLLNEMKSSKKGQGGMSPGKVKRFLAEEIPKDFTSRQLNDTAYGARDAVAYLKKLYPDLGPQGPVKVSAVSGRVTAQLRRLWGLNNILADTGEKNRSDHRHHAIDALTVACTHPGMTQKLSRYWQAKDEGRVKDLQLEKPWETIRADAETAVKDIIVSHRVRKKVSGPLHKETVYGDTGNEVEEKGVTYQYFVTRKNVEALTKSELDKIRDQHVRAIIKRHVEEHGGDPKKAFPSYPKHSPKGQEIRKVRLLIKQQQKLMAKVSTGYADESSNHHIAIYRLPNGNVVHHTVSLLEASRRLSRQEPVVQRERGDGAQFVMSLSKGDSLMLTKDNQDRIMIVNSVSSKGQVVLADHDDAKKDKKDLFSPRARPLVEVYHAKKISVDPIGRVRPAND

SEQ ID NO: 550 - protein, 1032 aa, unidentified
  REGION 1..1032: note = Description of Unknown: Cas Enzyme sequence
MARVFSFDIGTTSIGSAVVDYDPPNQTGEILHLGVRVFPEARDPDGTPLNQTRRQKRMMRRQLRRRRQRRRVLNEALFAAGLLPAYGSAEWQTVMGIEPFALRSRGLSERLEPHELGRALYHLSKRRHFKGRDLVAGEETTEEKETQRDAESVIAQIKSSGQTLGQFLATKGPHERRRGVHAKRSVVAAEFDRLWQAQAAFHGVLRDPAFRSLTEGAIFSQRPVFWRKNTLGECRYMPGEPLCPKGSWLSQQRRMLEKINNLALVGGNARPLDDEERTAILEKAQYQASVSWPGVRAALRPIFKSRGEPGREKSLRFNLEEGGDSKLLGNAVEAELADIFGTAWPNHPHRQEIRDAVHERLWAADYGEIGEQRVVILPESERKNRRAAAERSFVADFSLTVDQAAALRDLKLPTGWEAFSTVALKKFLPHLEAGARFGTMTNGSEWEGWRAETFPDREQPTGEILDRLPSPADKEEQKRITALRNPTVIRCQNELRKVLNNLIRVHGKPHLIRVELAREVGKSKREREEMHAGSRKQERRRREAVADLRSKGIAEPSPADIEKWLLWQECGEFDPYSAKPISFDGLFGTNEFDVEHIWPRWISFDNSFSNKTLCLKSLNHKKANRTPFEAFGSDPEWPQMKERVWALVRDGKMRPGKAKRFCREEPIAEDFKSRQLNDTGFAARQAVAFLKRLWPDVGVEAPVKVQVVSGRVTAQLRRLWGLNKILSDDGEKTRADHRHHAIDALVVACTHPGMTQRLSNYWQARDAGEASRPQIDPPWRTIREDAERKLDQIIVSHRVRKKVSGPLHKETVYGDTGRELKNGRIAYRQFVYRKAVTALTKNELDAIRDEKVRALLKERVDEHGDIKRAFATYPRLGGNGPEIRKVRITTKQQMNLMAQVSTGYSDLGANHHVAIYLLPSGKFDFQVVSLFEAATRLAKHEQVVSRKRDDGGTFIMSLSQGDTVRFPKEKGQPSTLWRVQKIASKGQISLLDVNDASPEQPSLFEPMVGGIMSRNAIKVSIDPIGRLRPAND

SEQ ID NO: 551 - protein, 1005 aa, unidentified
  REGION 1..1005: note = Description of Unknown: Cas Enzyme sequence
MTRAFGFDVGTTSVGFAVIDFDEDRGDGTIQHTGVRIFPEGVTEKLQEPRNKQRRDMRLMRRQTRRRRLRRNLLRTAFAEAGLLPAWGTDEWKKLMDETDPYALRARGLSEPLAPQEVGRALYHLVKRRGFASPRLEDESDEEKRKEEGKVRTAIGELASDMGDRPLGAHLAKLDKKRGRYIGRDMVMREFEELWAAQACHHPKLLTPEARKNLHDIAFYQRPIFWRLGTLGTCRLEPDSPLCLKGSWLGQQFLMLQRLNSLRLAGGNERRLTDDEREKAFAFLQCHDKATFAKLRTLLGLPRTQKFNFEIGGEKSIPGDAVETHLIKIFGESWADHPAGNRLRDEIHKRLRAIDYARIGNKRVEIRRTDEAALERRAFLEAAPAEYGITSDEAEALAEITLPSGWLRHSEKAIRRLIPHLEEGKVYSDAVDAAYPGHREAEAEMLNRLPSHPRHMPDLRNPTVARALTELRKVTNNLIRAFGKPDVIRIEFARELRQSKKQRLKTQKRMRQDEKRRQEARKHLEKNDIANPSRGDIEKCLLWWEASETCPYTGQKISFDALFRRGQFQIEHILPRSRSLDNSYMNKTLCEKRENELKGNRTPFEFYSNQPEKWDAIGQRLESLVKNGFPEGKRRRFLRREFAEVGSEEFGERQLRDTAYTAREARKFLQRLGVSVEPVNGRITSQLAYRWGLYSVVGEGRGKDRTDHRHHAVDALAVACTSRAFVKRLSDAFAGERAFKEIPLPEPWPDFREDVRYSMERIVVSHRVRRKVSGALHKQTVVADTGETAVTSGVIYNLFVTRVALDSISDRQIEDIRDTEIRKLVRKHVANNGGKAKGAFPPYPELVSKKTGELRPIKRVRILVKQQKDLMVPLNARTRAYAVAGDNHHMAIYERDDGKVEFEVVSLFEATRRKAAGEPIIRRRNGPSRFIMSLAPGDMIAFPPGSGAPNYCIVQSVWSNGQIELKEHTQAERVIWSRPNPRSLLRSQGSKVSVDPIGRVRPAHD

SEQ ID NO: 552 - protein, 1055 aa, unidentified
  REGION 1..1055: note = Description of Unknown: Cas Enzyme sequence
VRVFGFDVGTTSIGFAVVDHEPEQKGKILRLGVRIFPEARDPDGMPLNQTRRQKRMVRRQLRRRRSRRRLLNETLAAAGFLPDYHSPQWAEVMAMEPYGLRQRGLAGHLSAFELGRALYHLAQRRHFSGRAIEEAIEQSKEDADEKAASSRRDSTLKLLRSEGKTLGAWLSERNPHEMRRRGEHAHRSVVRGEFERLWAEQAKYAEQAKYDVSLRDDAFKAVVEDAIFAQRPVFWRKNTLGQCRFMPGEELCPKGAWLSQQRRMLEKLNNLAVAGGNARPLDAAERAAILDKLQTQESMTWGGVRAALKPLYKEQSEPGAEKRLRFNLELGGENKLLGNPLEAKLAKIFGKTWSNHRHKQAIRDAIHERLWKADYGTIGGQRVVILSDHERQRNRERVRQSFIDDFAVAPEQAEELTKLKLPAGWEPFSIKALQAFLPQLEAGKRFGALTNGPECEQWRDETFPARDKPTGEVRDRLQSPKHKEERDRLAKIRNPTVVRVQNELRKVVNNLIGMFGKPDQIRIEVARDIGLSKREREEKQSGIRKNEKRRKDAVKDLESQGIQQPSRDAVEKWLLWKESRERCPYTGDQIGFDALFREKLFEVEHIWPRWRSFDDSFRNKTLCRRDINLAKGNRTPFEYIGHDSQKWAEIKKRLDSMIATKGGDGMSPGKVRRFLAETLPDDFASRQLNDTGYAAREAVAFLKRLWPDVGERAPVNVQAVTGRVTAQLRKLWELNNILADDGEKTRADHRHHAIDALTVACTHPGMTNKLSRYWQAKDDPRAVAPNLPPPWPTIRADATAAVEQIVVSHRVRKKVSGPLHDDTIYGDTREDIETASGTYRLFVTRKKLEALSTEQLEKIRDDRVRAIVKAWVAARGGDPKKAFPPYPRLGTDGPEIRKVRLLTKQQTKLMAEMKNGYADLGSNHHMAIYRRADGKADFEVVSLLGAARRLARREPVVRRSRDDGATFVMSLAPGDAIEFERGAERGRWLVQGISAAGRPTLSRLTDARPTTQSEAKRLGMDGKRKDFEPRFGGFMSRHPTKLSIDPVGRIRKAND

SEQ ID NO: 553 - protein, 1007 aa, unidentified
  REGION 1..1007: note = Description of Unknown: Cas Enzyme sequence
QTGHIQGLGVRIFPEARDPDGTPLNQQRRAKRMMRRQLRRRKQRRRSLNEALLSAGLLPQFDQDKASEWSRVMRVDPYDLRSRGLTEPLTAHELGRAFYHLTKRRHFNGRDLEETENKEADEKEAKTNRESTLAALKRENVTLGTWLATKPDGVKRRGVHADRQAVVAEFEALWTAQALHYPILQDESFKEVVTEAVFFQRPVFWRTSTLGHCRFMPDEPLCAKGSWLSQQRRMLEKLNNLAVAGGNLRPLDAEERAAILAKLQTQGGMTWPGVRTALKPLFAMRGEKGAEKELKFNLELGGDKGLPGNKVEADLAKVFGDDWPTHPHKQAIREVVYDRLGGADYGHTTDDKRVVILPEAERRKRRDAAAQIFIDEFGATPEQAAKLRELSFQPGWEPFSIAALRAFLPKLEEGIRVGELLSGPAYDDWRDETFPHRDRPTGEVLDLLPSPKDGEEQRRIANLRNPTVVRVQNELRKVVNNLIRVYGKPGRIRVELARQVGKSKREREEEQKRNRKNEAERKKAEADLRSQGITEPSRDDIEKWRLWQECGICDPYSGQRIGFDDLFRNNLFQVEHIFPKSKSFDDGFRNKTLCHRDWNLLKNNRTPFEAFGHTDEWADMNDRMWRNVREGRMSKGKAIRFCRDEELDNDFTNRQLNDTGYAARQAVALLKRLWPDRGPEAPVMVQAVSGRVTAQLRRLWGLNNILSDNGEKTRGDHRHHAVDALAVACAHPGMTQQLSRFWQDADNPSSQRPRLLPPWPAIRADVNKAVSEIAVSHRVRKKVSGPLHKETTYGDTGEDIKTNTGVYRQFVTRKKVETLKSGELDDIRDEEVRRIVKEWVAAHGGDPKKAFATYPRLGSNGPEIRKVRLTTRQQLKLMAPVSTGYADLGANHHIAIYRKPDGKVGFEVVSLYEATRRLARHEPVVRRDYGEGSALAMSLAPGEALEFPNGEGFWIVQGVWANGQVVLEHANDACHATTTRPAPSVLLKKAARKVSLDPIGRVRPASD

SEQ ID NO: 554 - protein, 1091 aa, unidentified
  REGION 1..1091: note = Description of Unknown: Cas Enzyme sequence
MKNKNGKFLYRLGIDVGVASLGVAILELDPDAKDEAGEQSFRIAGGVARTYPLPEGASIRREKRAMRRNINRRKRRLDRLAELLAEKGLGYRRKTVPKSVLDLSPIKLRAQASREKIDLRHLSRVFVHMARHRGSSAFQESNIKDDNESRQTAAGIASLRQEMKAKGFSTYGQYLRWREKQDLPTRINQNKMADSGGGYAFYPSREMLREEFETIWEKQAAFYPEDLTPELKKTVSDELFFQRAVTAPPPGRCPYFTDEFRLPRASRLFQIRRIYEEVNNLRFSEKLGKSIDYDIAGRDMIVDRLMAGEDLTFAEIKKTIGLGRTDKVSLENATSRTGINGYCFDVLLGDEGVLGNKWLEAGEDKQDQILNVLATIYDDDQAIATLANMLGGDTGAAKRTLDVSLPSGWGRMGPTATGKILPELKNDLIPARIAEDQAGLFHAMTPTGEVGDLLPYYGKILLGHTVDLMWVSDYRRETDRPPHSNADEQKYGRIPNPVVHLALNQIRETVNAVLKKYGPPETIHIELARELNKSAEAREKIEKQNKKNKDDNDKAAKALGELSPPVKVSRLNIQKFKLWKEQSATCIYTGEPLSLTDLFSGDVDVDHILPRSKTYSDSMANKVVCKRRANADKSNQAPYQAFADRPDYDWDGIIRRVERLSPGKQWRFEADAMKQFEEDPEAFRARYGIDNSYIARLARQYLAYLVGEPHKVVAVSSYVVSMLRGKWGLNKVLGGADAARKLRDDHRHHFIDALTAACATPGTVQKIQREAARCERERLDVFVETISPPFGTPKEFFNAVREATFKRVLLSRKPDHAKTGQLHEDTLMGIVDGPDKYGAYVCRKRKNLSDYATLKDLEKATIKDTIAPNPEINQAIIELRTIQASVNEFGVKAQQILEDERLTDISTGKKGRTVSASAIYKRAIQLHGADGGKKLFTLYEKQKLVNIRRAGGGNKPTGGYISGRNHRIDFYADQKGKENWQLVTMMDANNRDFVPEARQAGNRLIWSAHKDDTLEMIDPSTPGKHIKVVVAKLGGTKMGVVPETDARDSKERVLWEKGLSFFRKLEARRVVTNAAGDVTWRFPALSPLSAK

SEQ ID NO: 555 - protein, 1110 aa, unidentified
  REGION 1..1110: note = Description of Unknown: Cas Enzyme sequence
MMKISVMGAIMSGQKAKFRYRLGVDVGVASLGLAILDLDNTTNTGNGSASGSATGEAGFKIVGGSVVTWPLPTGAEERRLKRAMRRNIERKERRLDRLSDLLAAHEIGTVRKQMPKDILDQSPIKIRAKATHQRVELAELARAILHLAKHRGSSAFREDDIKDENEARQTALGMDNLRREMAAKGFKTYGQYLRWREKQDMPTRINPNKMADAKDGYAFYPSREMLQEEFGLIWDRQARCSPTVLTNALKKQVEDELFFQRAITTPPPGDCPYTEGEKRLARASRLFQMRRIYEDANHLRFSGRQGQVIPYGKAERDKIVARLMAGEDLGINDLKTTIGQKTSIRVSVEDVKAKKGIDGYPFDRRLGAIDVLGAHWRNADPDTQDQILDILNTEHDQNAAKAALADLMDGDVDAAQRALKTSLPSGWGHMGLTATVKVLDQLKADVIPVILAIEQAGLVHVSTATGDVRGRLPYYGEILVGYTVPPMWVSRYRLETDRPPHTDPLEQKFGRIPNPVVHQALRVIQKAVNAVIKKYGLPESIHIELARDLNKSAEAREEIERRNEKNRKASDKAAEDIRAIGETVNRLNIQKYKLWKEQAGLCLYTGEALALVDLFNGTSNVDHILPRSKTFDDALSNKVICTRAANADKGNKAPYAAFADNSNYDWAAIMRRVEKLSSAKRWRFDANAMQQFEDQDRFRARYGTDNAYIARITRQYLTCLYREPHHVVAVSSHIVGLLRGKWGLHGILGSKSNGKKARDDHRHHFVDALVTACATRAMVGRIQHEAARTERDGLETFVDTIAPPFGTAKMFFNAAREATLERVSLSRKPDHATTGQLHEDTLLGIVDGPDAKGFYVCRKRKKLTDYDTLAALEKSSLKDTLPDLAEIEEAKASLDDIRRSIRHHSVQAEEDLETQRRADIAAGKKGKKVSDRAIYSKALTLHENANGKLSFTLFEKNKLVNIRRAKDGNRPTGGYISGRNHHMDFYVDAKGKIRWQLINMIEANDKNFVPDSARPGHQLLWSAHKEDLLLIDNPDAPEQRIRVIVAKISEGKLGVVPEADARESKDRIMWEKGLLFFTTRSAQRIVTDALGDITWHFPALPKSGKQAPPS

SEQ ID NO: 556 - protein, 1097 aa, unidentified
  REGION 1..1097: note = Description of Unknown: Cas Enzyme sequence
MDNSHIPFRYRLGIDVGVASLGIAIISLDEESGLGSEGQGFYIEHGTVRIYPLPLGASDRRVKRAMRRNIERKARRLDRLSDVLAEKGIGYLRKEATKDILNLSPIKLRAQASREKIPLNHFARALLHMAQHRGSSAIRESSIKDDNEARQTAEGIKTLRSEMSKRGFTTYGQYLRWREKANLPTRINPNNDKMLTEKGNYVFYPSREILCEEFDIIWCKQAAFYPDKLTSELRMEVEDELFFQRAVTSPPPGKCPYTPSETRLAKASRLFQIRRIYEESNHLRFSGKNGEPIAYDINQRDLIVERLMSGEDLTFAEIKKALGLQRTDKISIEDSKARNGIAGYPFDRDLGTEDVLGARWHDANETTKDHILDIISTQHDDEKAIQSLAEILNGDREAAKQVLETSMPSGWGRMGQTATERILHELKKEVIPARIAEDRAGLVHVATPDGQIFNRLPYYGEILVGHTVPPMWVSDYRRDTDRPPHTDPNEEKFGRIPNPVVHLALNQIRQTINAVIDKYGLPETIHIELARDLNKSAEAREQIEKQNDRNKKDSDAAVEELRKHKISVNRANIQKYKLWKEQGGICVYTGDPISLKELYSGNIDVDHILPRSITFSDSMANKLVCFKRANAEKNNRAPYQAFANRHGYDWSAIMRKVEKLHDNKKWRFEATAMERFADESEFRARYGTDNSYIARVARQYLSALYGDPSKVIAVSSHIVALLRAKWGLQDILGSKESGKKARDDHRHHFIDALVTACATRGMVQRIMTEAARCERKGLEAFVETIAPPFGTPREFVAAVKDAVETRVSLSRKPDHSPAGQLHEDSLRGIVDGPDKKGSYVCRVRKSLRDYSTLSALQKPAILSTLPDLDEINQARSNLENIKVSIAGYCAEATQQLVAEREADIASGKKGKTVSDQAVFARAVKLHKDAGGPASFTLYENKKLVNVRRAKGGTRVTGGYISGRNHRIEIYADSNGKIKWQCISMLEANDPKFVPEASKASNSLIWAAHKEDTLEINDPDAPECADRRIRVVVVKFKDSKLGVVPVMDARAANDRKKWENGLSFFCQHGAQRIVTDPLGDIKWRFPMLPRTGKLAPGE

SEQ ID NO: 557 - protein, 1016 aa, unidentified
  REGION 1..1016: note = Description of Unknown: Cas Enzyme sequence
MLHKMRYRLALDLGSTSLGWAMIRLNADNEPCAVIKAGVRIFSNGRNPKDGSSLAVTRREARSMRRRRDRLLKRKARMMHTLIEYGFFPADEVQRKALVTMNPFALRAKGLDEALTSAEFGRALFHINQRRGFKSNRKTDKKDNDSGALKTAINKVRATIEAEGCRTVGEWLHQRDVAGLTIRARYHQDKVIKDDGKSKIDKYYDLYIDRAMIEHEFDVLWAKQTELNPALFIEAARDDLKDVLLYQRPLKPVKPGRCTFMPDEERAPLALPSTQRFRMYQEVNNLRILREGLKEEPLTLNQRDDLIAALEEHNKRTFTQIKKLLGVGGAVQFNFEDPKREELKGNTTSAILGKDEHFGSSWFGFDEAKQDAIVLQLVKEENEAKLVRWLRDETGIDEKRAEAIANVGLPEGYGSLCALALARILPELRRDVVTYDKAVQAAGFDHHSNISPSATGEILLELPYYGEPLQRHVGFGSNDPKDSEEKRYGKIANPTVHIGLNQVRLVVNALLKRYGHPSEVIVELARDLKQSKDQRDVESKRQTENQKRNKRLREDVARVLGISEERVKRADIEKMILWEELSFDPADRHCPYSGVQISATMLLSDEVEIEHIMPFSQTLDDSLNNKTVALRQANRVKGNRTPWDAFGVQPVAGFDYAGILARAEQMPKAKRYRFAKDGYQRWLKDDAGFLPRALNDTRHMSKVAFEYLKLICPNTRVIPGRMTAMLRAKFGLNHVLGLNGEKNRNDHRHHAVDACVIAVTDQGLLQRFAKASASAREQQLNRLVENMPLPWVSYREHVQRAIEAIWVSHKPDHSHEGAMHNDTAYGLRGDGKVSFHKMVDGVRTHIEDNLKVIEISDAKATDRHGLLPNGEPKPYKGYKGDSNYCIEIVRNAKGKWEGEVISTFEAYQLVREHGVARLRHPTLSVSEKPLVMRLMMDDAIRLDIDGQTCTMRITTLSGNGQMFMADISEANVDERNRNKEETFAYVSKMAGSLQKSNARRVGISSIGELQDTGFKE

SEQ ID NO: 558 - protein, 1070 aa, unidentified
  REGION 1..1070: note = Description of Unknown: Cas Enzyme sequence
MLTRLALDIGTTSIGWILYELVHNQPATILDGGTRIFSDGREAKTGQSLAVGRRTARGMRRRRDRYLRRRAALMKRLAAIGLMPASPEAAAQLAALDPYELRARGLDHPLPPEHLGRALFHLNQRRGFKSNRRTDKDSNEGGLIADGSARLEQAMMAASARTYGEFLHKRRAAATDPRATFAVRTRINPHLIDGDGKEQPGYDFYADRHHLEKEFHTLWAAQVRHNPDLTPAMEDLLFQTIFHQRPLKAPAVGRCLFLEEPRLAKAHPLTQSRTLYETVNMLRIATPGQPKRRLSRDQRDQIVIALNNRKILAAPGKNVLTLAAIGKLLKLRPGEAFSLETANRDAIACDPVRMSLAYDGRFGPQWSALSVASQWELIQRLRDDQDGTALVDWIMERYGVDRDRARAIADAPLPEGFGRLGETATRAVLAVLIDGTAEQEVPTYNEAVAACGWDHSRLGTGEVLDRLPYYGQVLDRHVLPGTGRPEDDEITRFGRITNPTVHIGLGQVRRLVNKVIEVWGRPHEIVVELARDLKMSEDQKRDLAKANAQNQRAAESRSAKLIEDLKIEDNGRNRAILRVWEESAADVLHRFCPYTGAQISATMLFDGSCDIDHILPYSRTLDDSFNNRVICLKSANREKRNLTPWEAWGNTPKWQAIDAILKNLPAAKAWRFAPDAMLRFEGERDFTARALVDTQYLSRLAREYLESLYADALQAGRRPIWVVAGKLTELLRRHWGLNSLLPDAHKGTAKAKNRLDHRHHMIDAAVVGATDHATVKRIADMAKANVENGLEDLAGTIPPPWPGLRDDLKARLERTTVSHRGNHGTIDHSARKQGRDTTSGQLHNDTAYGLTEETLDKVPLVVNRKPIDTLTPAMIDKIRDPHLARWLAVVTKGKEGKEFKGAVEAFRAQPGPYRGIRRVRLIEPVEVIRIKDRNGRPYKGYKGDSNQCYEVWRLPDGTLTHHVVSTFAAHQGQRVKPHAAAKRLMRLYKDDMVRLDSRKFGPVIAVVAKFDTNGGITLVSHNEGNADQRYRKDKEDVFIRLSAKTLINSSARRVIVDEMGRIRDPGPGKH

SEQ ID NO: 559 - protein, 951 aa, unidentified
  REGION 1..951: note = Description of Unknown: Cas Enzyme sequence
MSKQKILGLDLGSNSIGWALLETNEEGVPTTLIDAGCRIFQKAVEDKTPTPKNAKRRERRLARRVLQRRARRKQKMLNYLVSNNLLPAKLKDDPRPEGILNELGDPYILRKKALDDQLTPHELGRVFLHLVQRRGFLSNRKTLLGDMADDPDVLAVLAEIGEEDPNLSANSEETGFKQDITELREKISESGSRTLGEYLATIEAPYCRRNRSREGGHLRTDRLMYKEELDLIFNKQAEFHHVLTAEVNGQLEDIIFYQRPLKLQADRVGKCSLEPSRKRARMATLEYQRFRMLQDINNLEYFDPWADAYTRVKEEDRAKLLKLFEENASVTFPKVRKTLGLDKKVEFNLESGVKKLKGNTTSCAIRSEFDGWDELKSDQQHLLVEDLLTIQKKSALKKRLEFHWGLNHKTAIRLCMTEFEPDHGNLSVKAMNKLLPHMGKGVIYSDARQLAGYSYEKEQVAPADKLGSPPELPNPIVMKGLHELRRVVNAVIAEHGKPDVVRVEMARDLESNTKRYSAYIKQQKANTVANDEAVKKYEEIMQSMGGLQSRYPSRTDKLKYRLWKEQDFRCPYSGKTISQKQIFGPEIEIDHIVPYSQSLDDSYMNKVVCFASENRFKGNRTPYDAFSGSAEKWEHVTQQIARWPFNVRSKKDRFYKRGSDIQERDFIGSQLTDTRYISREAASYIQTLGVDVTFTRGVMTSWIRHMWKLNELLSKTDEKERADHRHHAIDAVVTACIDRRLYGTLVSLARDLERSKSALSMKDLNIDPPWAALRLDLESKLGKMIVSHIPMRKLTGALHEETGVGFKQGIGTVYRKNLDPGFTERHVEAIYDDVVREQVRIHLEKYGGKPKEAFAEGVIVYHRDGKTPIKRTRVRQAKVDLKELSEQKFGVRNKQGETFRWMAYGNLHHVEILRSTKTGKYRGEFVTMMEAAHRARGLAGKKQSMVKTDHG

SEQ ID NO: 560 - protein, 1095 aa, unidentified
  REGION 1..1095: note = Description of Unknown: Cas Enzyme sequence
MVCGNDYFAEHERIPFEKRPDPMQPYRLSLDLGTNSLGWCVLDLDHNGNPRGIRRIGVRIFTDGRNPQDKSSLAVARRIARQMRRRRDRTLVRRTRLMAALIRFGLMPADRAERKALERLDPLNLRARGLTERLEPYQIGRALFHINQRRGFKAMRGTGDEEEAGKIRTAIGKLAEEMEKAGKPTLGAFFAWRRANKETVRARLMGRGAKAEYPFYPARPMLEDEFDKLWAAQASHHPKLLTEEARATLRRRIFHQRPLKPPLVGKCSLFPDDPRAPRALPSAQRFRLYTELANLKIIAPDRSERPLTLEERDAILREVRAKPTKKSITFQRIRQILKLDSGVEFSHESSRRPELQADETAALLADKKRFGPRWAKLTLAEQDEVIARLLSDTDEGALIDWLVARWGLAPEAAARVADAPLPDFHLRIGRRALAALLPVLEREAHDGRPIRYDEAVPVAIPGAHHSDRRPGDALPNLPYYGAVLERHVAFGTGEPSDAEERRLGRLANPTVHIGLNQVRTLVNALIERYGGPHEIVVELARPLKQSLEARRRTEREQTENQKKNEERKALLRSVNAPVNGRNLMKLRLWEEQGTGVNRRCPYTGETIGLQLLLSEKVDIDHILPFSRSLDDSAANKVVCLTEANREKRNRTPYDAFHADEARWARILGCVEDLPPNKRWRFAENALQRWEDEGGFLARQITDTQYLARLAREYLRHICHPDRVRVSPGRLTALLRRRWGVDSILRDHNREGGDPPIDMTFAKNRDSHLHHALDAAVIGCIDQRMIQLVQTAAARAEESGLDRLMDDLDEPWDGFRDELAARVRSLAVSHKPEHGTGGRLHEDTAYGPTSDAERAEGFNLVYRKPLDGLTEKEVARIRDSDLRQAMQAKVAAHRRGGLDAKQAVAKAAEELAGTAPWVGIRRVRLLAKEADPIWLDGPDGHPYKGLIAGEVHHIDVVALPDGRWTGRAVTLFEARRTALPDGRAAPYVPADGERFVMRLHKGDLVKLEHDGRQRIMRVARLEPANNRVRMAEHFEAGELDKRHADPDDPFRWLIVAFDVLRRRKARRVTVDPLGRVRDPGFPKWAAAPAPEPEPAA

SEQ ID NO: 561 - protein, 1075 aa, unidentified
  REGION 1..1075: note = Description of Unknown: Cas Enzyme sequence
MQPYRLSLDLGTASLGWCVLDLDHDEKPKGIRRMGVRIFTDGRNPQDKNSLAVARRIARQMRRRRDRTLVRRARLMAGLIRFGLMPGDRAARKALERLDPYELRTRGLTERLEPQEIGRALFHINQRRGFKAMRGTGDEEEAGKIRSGIDRLDMQMAEAGTPTLGAFFAWLRANGRSVRARLVGRGAKAEYPFYPARPMLEAEFDALWAAQARHHPDLLTEEARTTLRQRIFHQRPLKPPQVGKCSLIPEDERAPRALPSAQRFRLYTELANLRIIMPDRSERPLTMEERDLILRAARAKPARKAIGFKDIRKALKLGSDIGFSHESTRRPELATDETSAVLADKKRFGPRWARLTLAEQDEVVERLLSETDDGALIDWLVARWDLEPDAAARVADARLPDFHLRVGRKALAALLPVLESESREGRPIRYDEAVPVAFPGAHHSDRRPGERLDRLPYYAKVLERHVAFGTGDPGDGEEKRLGRLANPTVHIGLNQVRTVVNALIDRYGPPHEIVVELARDVKQTQEKRRRTEKEQAENQRRNEERKALLRSVNAPVNGRNLMKLRLWEEQGAGVNRRCPYTGETIGLEMLLSEKVDIDHILPFSRTLDDSAANKVVCLAAANRDKRNLTPYERWHGDEARWSRILGCVEDLPPNKRWRFAEGAMNRWGEEKEFLSRQITDTQYLARLAREYLRHVCHPDRVRVSPGRLTAMLRRRWGVDSILRDHNRGGGEVPVDATFAKNRDNHLHHSLDAAVIGCIDQGMVQKLAQAASRAEDLGLDRLMDDIDDPWDGFRDELAARARGVTVSHKPEHGTGGRLHEDTAYGPTTEAERADGFNLVYRKPLDGLTEKEVARIRAPDLRKAMQERVAFHRNGPDRLDAKQAVAKAAEDLAATEPWVGIRRVRLLAKEADPIWLAGPDGEPYKGLIAGDVHHIDIVALPDGRWAGRAATLFEARRTALPDGRAAPYVPADGERFVMRLHKGDLVRLDHDGRLRIMRVARLEPANNRLRMVEHVDAGELDKRHADPDDPFRWLIVAFDKLRTRKARRVTVDPLGTVRDPGFPKWAALPVSGEAEPA

SEQ ID NO: 562 - protein, 1037 aa, unidentified
  REGION 1..1037: note = Description of Unknown: Cas Enzyme sequence
MMQLRYRLGLDLGANSIGWCALRLDGDGTPCGLLDMGVRVYPDGRQPKDGSSLAAQRRAPRAMRRNRDRYLRRRRNLLNALTRFGLMPAEETDRRAVAALDPYALRAAALHRRLAAEELGRVLFHLNQHRGFKSNRKLDRNSNEGGLISTAAARTLAELAQAGHLTIGSWLAERHARRDGVRVRLSGSGKTAAYPFYPTREMIEAEFDTIWTAQSAWTPALTDAMRDALRGIIFFQRPLKRPKVGKCWLEPGEYRAPRALPTAQRYRIAQTLAHLRLSHPGMLERALSDSERTVLADLLYQGKDLTLDRVRRLLRLEPDTDFNTRDDKLVGCATADRLGNGKKAPIGPTWHTLDLATQDAAVTALLDAETDEQAIEVLSALGIAADAAERASGVVLAEGHAALSAHAMMRILPHLEAGHRYSDAVKLAGYARHSDRRTGEIRDRLPYYGELLFDRLGTGTGEPGDPEEQRLGRAPNPTVHVALNELRRVVNAIIEHHGTPAEVVVETLRDLGRSKEQREVYEREQKKNREANDARRAMLAEMGQPVNGRNLMRLRLWQEQASDPKNRICPYTGTLITARTALSDEIEEDHTLPFALTLDDSAANRVLVTREANRAKSRRSPFEAFGHTTDWPAILERVALLPSNKRWRFQPDALEKFGQEGDFLARHLADSATIARWAKDYLEVLAPGAVWSTPGRLTALLRRGLGLTSNAVLGKGGQRKERDDHRHHAIDAVVVALTDRGLLKRTTDAAKRAEDRGERLLVALDPPWPSFVADVAARTQATVVSHKPDTGWQGALHNDTAYGPVPGARKGEPNVVVRRPIETLATWSPEDARIRVRDPVLAAKISAALQSSSDAAGRKAALAAVTHSGGHRVLRVRATERLDGPQPIADRRTGRPYKVVKRDGNHRAELWRLPDGTLKLKVVSIFDAAREAEAARLGRNVPDLRPHPAAKLLMRLHKNDMVQFDAGDRPVVRVVKMRDGQVTLALHNEAGDLKRRDAAKDDGFKYVNASASRLAAERARKVYVTPDGRVRDGARSR

SEQ ID NO: 563 - protein, 1101 aa, unidentified
  REGION 1..1101: note = Description of Unknown: Cas Enzyme sequence
MRILGLDIGTTSIGFALIDLDKSRNAGGILRLGVRIFPEARDPDGTPLNQQRRAKRMMRRQLRRRRERRRSLNELLASSDLLPAYGGDQWREVMKLDPYVLRAKGLSEPLTPHELGRALYHLSKRRHFKERDLAEIGESKTAPDGEETVAAKPHGKTKAAPKDSEPNDEAKSTEARKHFVAELKASGQTLGQALAARSPDAKRRGEHATRGIVEEEFSRLVAAQERHHAVLRDAAFPGTVHEAIFAQRPVFWRKSTLGKCRFVPDAPLCPKGSWLSQQRRMLEKVNNLALLGGNARRLEPEERNAILATLQTQKSMSWSGVRDALKPIFKARGEGTKTLHFNLETGDEKGGLKGNVVEADLAKVFGARWKHHPRKDDLRAFVPEALWQADYGEIGTQRVVIRPEKERASRREVLARRLIEDFGANEAEAAAIVKLHFPQGWEPFSTEALRRFLPKLEERNRFGEFVRFGELVNGPDFESWRNENFPQREQPTGEILDRLPSPRGDARATPEQRDEARRIAGVRNPTVVRVQNEMRKVVNNLIGLHGKPDLIRVELARDVGKSKREREEISAGMRKKEGLRKRARADLIANGVADPKDPDIEKWLLWTESGERCPYTGDEIGFADLFSGNPRFEVEHIWPRSKSLDNSLRNKTLCRKDVNLAKGNRIPFEFFRGRPDDWQAAKDRVWKMTGKDRMTEGKAKRFCAEAMPDDFASRQLNDTGYAARQAMAFLKRLWPDVGATAPANVQAVTGKVTAQLRRRWGLNHILADDGEKTRDDHRHHAIDALVVACADGGYTMKLSRYFEAESEYQRGRGAKPSDAIVDPPWANIRADTERAVAGIVVSHRVRKKVSGPLHKDTTYGDTGINKVTNNATYRQFVTRKAVERLSQGPKKGKPPTDAPHAAVVEWLLKGEVGDIVDPHVRKTVAEWVASHGGDPKKAFPTFPRVSEGGPEIRKVRLHSKQQLALMARVSTGYADLGNNHHIAIYRLLNGKIDFEVVSLFDAAHRLIKGEPVVRRTRTDGATFLMSLSTGDTIRFSKNKSELETLWHVQKIASKGQISLLELSDASRDERTLFEPMVGGLLSRSAVKISVDPIGRIRPAND

SEQ ID NO: 564 - protein, 1026 aa, unidentified
  REGION 1..1026: note = Description of Unknown: Cas Enzyme sequence
VTTIWGLDLGTTSVGFSVVRTTAGAETILRMGVRIFPEGVEEKDKAPRNRVRREKRLVRRQLRRRRWRRRHLRTLLAETGFLPPEEGKPVERSALMASDPYALRAEGLHRALTPHELGRAILHLAKRRGFVGSRKFAPSETERAKEEGETKAKIATLKAEMGERRLGEFLAAVQEPERRRERPIGRDMVEGEFEALLAAQRPHHAALRDPDFVARLRHVVFFLRPTFFRRSTIGHCDLEPTQERALKADWRVQQFELLQLVNALRLERGNQRGLDEAERAKAVDFLSARSDASWAQLRKHLGLAGEAFTHERGAKRVKGNATEAALAKAIGPFWTDLAPEMKDRIRHEIAERLHNVEYRRTHDGARLEIRTAAEIAAERAALADHAERIWDLPRPQAEVVSQIEGLPDGHGRHALASIARLMPYLEQGQPYMTARDAAYPEHRESTAPLDRLPEPSDADCSPATASLRNPTVLRTLHELQKVVNNLLAVHGRPDFIRVELARDLKRPAAERREIESDNKLRERKRKAAAEALKEKGRPVTREAIERWMLWMDQGCRCAYTGEAIGESDLFGNTDGAQVDHIFPLSRSFDDSYANKVVCTREANRRKQNKTPAEAFDAATLKAIVDRLSDITTFPTAKIRRIQKSGLEPADSDAFTNRQLTDTQFIARAARGYLAQLYGGGDEGMRRVQVSPGRATAHLRRGWGLSVRKLVDGEVVEDGTDAAEGKKARDDHRHHAVDALVVALTGPGEVHALSRAYAESERTGRKAQIPLPWPSLHADAARALGAAVVSYRVQRKLSGRLHEETILGRHEHGGRTVYVKRKPVAALTARELKGAIRDDGVRHAIEAAIREAGDLKKAAERGIRLPRRDGTPGPLIRRVRLEMERETGIMRVHPTKNMHAELGPGTSHHIAVYKGDNGSVSYEVVTKRDAATRVRRGDAPVCRTHPALGRLFLSLCPNDMIMRTDAHGRSHFVVVRKVNAEGRIFYKPHWMTGVPEKEVSLSPRTLVADGWQKVAVDPIGRVRPAHD

SEQ ID NO: 565 - protein, 1168 aa, unidentified
  REGION 1..1168: note = Description of Unknown: Cas Enzyme sequence
MQTIWGFDLGVTSVGWAVIRWDEAAAQGEIVRMGVRVFPETREAKKPGEVGDPLNAARRSKRLARRMLRRKRWRRVHLRHTLVSAGLLPKDAEPGKHRNACPPPAGFDPYAVRVRGLTEALPPHDLGWALFHLLKRRGFQGSRKYGSAEEEGAELATAKPKPRKGGRRDGEETPALSEEQKKREKEEKEARAKREKLRAEIAAIAAREGKDRATLAAALLARRDPVCRAAAERPDEFHDPTRLRDAQQDRGMVQDEFGKLWAAQAVHHPHILTDALRAKLHHIGFSQRPTFFRARTIGKCFYAPQEDRALKGDWLTQRFETLAFVNNLRLARGKNPPLDAGQRDDALHYLEQQWTPAKDDKTKRARWDALRTAVGLPKEDRFTQERGEKDTLRGNATEYTLRAALGEAWRNMPEGSRQAIRDAIGSAVREAEYRPVRNGAILEIRDKECWRRQREALARRAESAWGLDADNAKALSEITLPDGYARHARSTMLRLMPHLEAGRPYSEAVELEFGSRRESGPHLRKLPGPNQSEVNKLPRNTEDEKFVHAQMSALLAAIRNPTVLRTLGELQKVVNALLRKYGRPDLIRLEFFRGLKQSREERAATDKRQAEREGARKNAADEIRKRGKPVTGDSIQRWLLWEEQGKRSPYSERHISCTQALDPGATEIDHIFPVSRSFDPGPGNQVLCFVDENRAKLNRTPYEWLASVDPERWKQLSEPNGLWRQMTKNAKWPGWDQEHQRPVGKYARCLKETLEDPNDPQFMNRHATDTAFIAKAARDYLGLLWGGGQEALNKVKPVQGRATSLLRRAWGLSLKRLLYGEIEAGDAPKARDDLRHHAVDALAIALCTDARIKALSEWWQQRELFPHRPKPEFRLPWPGLHAQAKERIEAIVVSHRVQARLSGRMHEEQPLGDTGLKDGDQRLFARRKPVIALSAAEIAGTKDSEIADKAVRDAILKHLAASGIVLVPTGRARRGEVQYTLSETNKQKIAKALAGEIRLPMTDQTKGHSGEPGPLVRRVRLHIKRNGVLLQLGRSKNAHAELGPGTTYRLALYRDGETVRHRQVTKREALARVRHTPALPAVPPEHPDGGRLIAAVGPGDVLMRKVPTGRELLLVRKTNAEGRIFHKPLTLAGQPDSEPSLGPADIADDDNGWRKVSVDPIGDIHTAK

SEQ ID NO: 566 - protein, 1107 aa, unidentified
  REGION 1..1107: note = Description of Unknown: Cas Enzyme sequence
MQTIWGFDLGVTSVGWALIRQGDGSGEVVAMGVRIFPETREKETNGSAGAPLNAVRRQKRLMRRTLRRKRWRRVKLREALTEAGLLPPEATSREHPARQPPPGQDPYEIRARGLIEPLTPHEIGWALLHLMKRRGYQGSRKRDVEEKAPAKETDDETKATAKRDALAKEIACIEATEPGRGTLGRALALRRDAYEKLAKANPSAFTDPPRLRDAAQGREMVAGEFDRLWQVQAGHHPALLTPALRETIEEIALAQRPTFFRSRTVGKCTLEPQHDRALKADWLTQRFEMLALVNGLRFDHGNRPPLDPDQREIAITYLDGGWVGDTEKPTWAGLRKALGLTKRSDPRFTHERGQKETIRGNATEGALRAALGPAWTGLDQATRAKVRAMIGDAVRRAEYRPVKAEGLWEIRDKQDMEKQRAQLAERAQRELGLPPSTAKALSEIELADGFGRHARVTMEKLLPHLEAGDPYTTAVEKVYGARRESIAPLAKLPGPNPSEVMQIADRFVQERMEALLAGIRNPTVLRTLGELQKVVNTLLRVHGRPDAIRLEFARDLKQSKDERTEIDAKQRKREKARKDAATEVAKLLDRSADDEMILRYLLWKEQGGISPYSGQNIGCADALNAGATEIDHIFPVSRSFDDSQANKVLCFIGENRGPKGKGRRTPFEWLSPDADRWVHLTGVVWPNMAKSGWPGLDPRHKRPVGKYARCLREKLEEAQDAEFTNRQLTDTAFIAKAARGYLGLLWGGGQDGINRVQPVSGRATGLLRRAWGIGLSRLLHGELGEDAKVRDDHRHHAVDALCVALCDAGAVNALSRWWQVRESTGVRPGFALPWEEFREQTKSAVEAIVVSHRVQAKLSGPLHEETRLGDTGDLDEGFRVYVKRKPITALSASEILGTRDASLADPGIKRAILAHLASQGITDLKAAKPKDLATALAADIRMPTTREKYAGGPGPVIRRVRVRVKRKEGVMPVHAKRNMHAELGPGSNHHIAIYCDGPTVRFLVVTRREAAARVMRKPSLPAVAPVHPLGGELVMALHPSDVVHRKVGDRNELLLIRFAYGAGPIFFKPLTMSGNPEKQVSKTPPTWVREGWRKVSVDPIGRIRPAK

SEQ ID NO: 567 - protein, 1145 aa, unidentified
  REGION 1..1145: note = Description of Unknown: Cas Enzyme sequence
MAGKQNNFGPLTFGLDIGIASVGWAVLDENRIIDLGVRCFDKAETAKEGESLNLARRMARLLRRRLRRRAWRLTKLSRQLKREGLIADANFFKKQQPFSLSLWQLRVEALDRLLSDEEWARVIYHLCKHRGFHWISRAEEKAAEGDSKGEGGAVKKGLAGTKKLMQEKNYRTAAEMVIHEFPDAQRNKRGDYSKALSRELLNEEAKKLFQRQRELGNLHAGAELETAILGNGDKKSGLFWAQKPALAGKDLLKMLGHCTFEKEEYRAPKASFTAERHVWLTRLNNLRIVMDGETRPLNEQERHAALPLPYSLASDLTYKQLRSALVKSGYLPDSFRFAGLSYPSKRQEEAEKAKDPEAERLVKLPAWQTLRKTLKDAELEAEWQQISVAALDGKPELLDQIAWVLSVYKDGEEIEAELDKLPLPNADKTRKAILDMSNTAFSKFHALSLKALRKIVPHMETGLRYDEACLRAGYHHSQLHKIGEGEHKYLPPFYSGRDKDGRLKFNEDMDIPRNPVVLRALNQARKVVNALIKTYGSPHEVHIEMARDLSRPFDERKEVKKAQDEFRERNDKDKAIFASEFSIVGTVKSKDFDKFQLYREQQGKCAYSLDAMDINRLFEQGYVEIDHALPRSRSFDYSKNNRVLVLARENRNKGNMTPYEYLGGKENSERWRQFENFVNTNKTYRQAKRNRLLKKDFGEKEARDFMERNLNDTRYICRFFKNYVEQYLQLHEDSEAKRCVVLSGQMTAFLRARWGLVKVRGDSDRHHALDAAVVAACSHGMVKRLSDYSRRKELEKVREGFVDMETGEIANPAMLDRLEQHFPSPWDNFRHELEARLKIDDLALLRTEMERLGTYPPEALEGLHPLFVSRAPQRRNSGAAHKETIYAQPESLKTQGGVTQKVAVTSLKPADVDKLIDPHRNEKLYAALRDWLQKRDEREKRAKEIEASAGRGKDKRPLTAEEQAEIGRLRALPRKPDKNGNPTGPVVRTVTMVIDKLSGIPIRGGIAKNDTMLRVDVFAKAGKFHLVPAYVHHRVTGLPNRAVVAFKDEEEWTLIDDSFDFCFSVYPNDLVCVTLKKESHRGYYASCNRSTGAINVWSHDRNQNIGKAGMIESIGVKTALNVEKFNVDVLGNVYPAPPEQRRDLA

SEQ ID NO: 568 - protein, 1130 aa, unidentified
  REGION 1..1130: note = Description of Unknown: Cas Enzyme sequence
MNQAANDTPPTLQFLTLGLDIGIASVGWAVLNEARIVDIGVRCFDKAETAKEGESLNLARRQARLLRRRLYRRSWRLTKLGRLLKQQGLIDSAAFFKQQPSTSVSTWQLRVEALDRLLSNQEWARVIYHLCKHRGFHWASKAEEMQAEGDAKGESGRVKKGLADTAAKMASKGYRTAAEMVLAEFPHAQRNKRGEYDKALSRVLLDQEFALLFEHQRRLGNPHASADFEARVRGDGDRKSGLFWNQKPALAGADLLKMLGHCTFEKAEFRAPKASFTAERHVWLTRLNNLRVVVDGASRALTQDERALALLLPYQTEQFKYKTLKTALVKAGHIPDTARFGGLAYPSEAQKEAGKTKDPEDQPLVKLPAWHDLRRALNKAGLQDAWRQISVAALDGQPQWLDSIGWVLSVYKGDAEVERELAALALPQAQAVIPVLLGLRFDKFHALSLKALRQIVPHMERGLRYDEAVAQISSYGHHSQRVVLGTGARHYLPSFYKDERSSTGSMVFRDDIDVPRNPVVLRALNQARKVVNAIIKKHGSLSAVHIEMARDLSRPLDERREVKKLQEEFRDRNDKARESFEQDHGYRPKGIVFEKWMLYREQHGKCAYSLEGLDIDRVLNDANYAQIDHALPYSRSYDDSKNNKVLVLTRENQNKGNRTAYEYLTSFAGGEDGDRWHNYAAWVNSNKSYRMAKRNRLLRKNYGGEEASGFKDRNLNDTRYICKFFKNYVEENLQLAPRADGNANKRCVVVNGQLTAFLRARWGLSKVRSDSDRHHALDAAVVAACSHAMVKALADYARKKEVAYLKEGFPDPETGEIINPEAHARGVVHFPEPWAHFRHELQARLYMDELQALREDLQRLGTYSEQDLLEVRTLFVSRAPQRRNDGAVHKETIYAQPEALRKQGGVVQKVPLASLSLKDLDNLADPHRNAKLYAAIRARLEAHGGKGDKAFGSDQPFYKPDKDGNPTGPIVRTVKLVIDKLSGIPIRGGIAKNDTMLRVDVFTKAGKFHLVPVYVHHRVTGLPDRAIVAFKDEDEWTLVDESFEFLFSVHPNDLIRIGLKAKAPITGYFASCHRGTGAFNVWSHDRSTSVGKAGSIEGIGIKTAQSLEKLNIDVLGHIYPTRPEQRLGLA

SEQ ID NO: 569 - protein, 1130 aa, unidentified
  REGION 1..1130: note = Description of Unknown: Cas Enzyme sequence
MNQVANDTPPTHSVLTLGLDIGIASVGWAVLSETRIVDIGVRCFDKAETAKEGESLNLARRQARLLRRRLYRRSWRLTKLGRLLKQEGLIDQAAFFKRQPSASVSTWKLRAEGLDRLLSAQEWARVIYHLCKHRGFHWASKAEEIQAEGDAKGEGGRVKQGLAGTTAKMATKGYRTAAEMVLAEFPHAQRNKRGEYEKALSRVLLDQEFALLFEHQRRLGNQHARAEFEARVRGNGDRKSGLFWNQKPALAGADLLKMLGYCTFEKTEFRAPKASFTAERHVWLTRLNNLRLVVDGASRPLSLAERAFALLLPYQTEQFKYKTLKAALVKAGHIPDSARFGGLAYPSEAQKEAGKAKDPEDQLLVKLPAWHDLRKALSKAGLQAAWQQISVAALDGQPQWLNSIGWVLSVYKDDAEVARELAALELPQAQAVIPVLLGLRFDKFHALSLKALRQIVPHMERGLRYDEAVAQISAYVHHSQRVVLGAGTRRYLPSFYKDERSSTGSMVFRSDIDVPRNPVVLRALNQARKVVNALIKKHGSLSAVHIEMARDLSRPLGERREVKKLQEEFRDRNDKARESFEADHGYRPKGIVFEKWMLYREQHGKCAYSLVGLDIDRVLNDANYAQIDHALPYSRSYDDSKNNKVLVLTRENQNKGNRTAYEYLISFAGGEDGDRWRNYSAWVSSNKSYRMAKRNRLLRKNYGPDEASGFKDRNLNDTRYICKFFKNFVEEYLQLAPRADGNTNKRCVVVNGQLTAFLRARWGLSKVRSDSDRHHALDAAVVAACSHGMVKALADYARNKEMAYLKEGFPDPETGEIINPESHARGVQHFPEPWAHFRHELQARLYTDDVHALREDLQRLGTYSEQDLLGVRTLFVSRASQRRNDGAVHKETIYAQPETLRKQGGVVQKVPLASLSLKDLDNLADPHRNAKLYAAIRARLEAHGGKADRAFGPDQPFYKPDKDGNPTGPIVRTVKLVIDKLSGISIRGGIAKNDTMLRVDVFTKAGKFHLVPVYVHHRVTGLPDRAIVAFKDEVEWTRVDDSFEFLFSVHPNDLIRIGLKAKDPITGYFASCHRGTGAFNVWIHDRNTCVGKSGSVEGIGIKTALSLEKLNIDVLGNVYPARPEQRHGLA

SEQ ID NO: 570 - protein, 1051 aa, unidentified
  REGION 1..1051: note = Description of Unknown: Cas Enzyme sequence
MVWRLALDMGTNSLGWAAFSLNNSGKIIGLTDAGVRIFSDGREPSSKDRVGESLAVERRLARGARRNRDRRVRRKQDLLQRLIKLDLMPKNATERKALECLNPYQLRADALERALTPHELGRVLFQINQRRGFLSNRKSDGDDEETGKIKPKITELRQVLDGQTLGQWLNERLKSDQSIRFRGEDGDYYADRAMYLAEFDKIREHQAPHHTLSASDWDDLRNGNKAQGFDGIFFQRKLKPVEKGRCEFFIDEYRAHKDLPIAHEFRILQEVANLQYYGADHEKFELDSEQRDRIFDALETHKTLSFGSLRKLKKTDGNLLFPRGCLFNLETGPRDKLNGNATAIDMRKPELFGASWDALSPGEQNDVVEMLHDAEDDAQLISDLQNRFDLDDDQAKAVSKFKLTAATTHLSRKFMMRCADIMRETGLRYDEAVKEVWDDDGVFLHHSHRAVDELIDHLPYYGEVLRGSVIGGKPTQYDPQEYPEQHYGKINNPTVHVALNQLRKLVNRLVDRLGPPAEIHVELVRDLKKTAKARNDIAKQNATYAKANDKRANVFRELHNGQDPSGLDLKKMRLWEELGKDQISRLCPFSGKPISAAMLFNGEAETEHILPFSRTLDNSTANLTVAIRQANRVKGNSTPYEAFAHDKHADKGMVWADIASRAKSFPKNKRWRFDADAMERFDKDGGFIARQLTDNAYISKITKRYLSHICDQNNIVTIPGGLTAMMRGKWHLNSLLGDHNYKERNDHRHHIIDAFVVGLTDRGMLNVVSRQTGRGTDDLVHIKLPDISLLRNQLDHRLHSIVVSYKPDHGTNGKMFNETAYGIVPPEKQDADLKGYGLVTRKKIGVLSEKEINAIRNPGWRTLVQDHVVTTKATGTKLDKNGLTKVLTEFGKTHNIKTIRLLVSNQSATVIPSAPYKAYAPDSFVCVDIWQVPKGKPGKWKKGEYEWQGAYWSYAQCKGQTPDKNVGLIKGLPIHPAAKFITRLFKNDLVELNDGEQVSILKVGGFSTTANKIDLRPQYETEGPQKFISINVLRTSFLRCLRVSEDGKIKG

SEQ ID NO: 571 - protein, 1051 aa, unidentified
  REGION 1..1051: note = Description of Unknown: Cas Enzyme sequence
MVWRLALDMGTNSLGWTAFSLNNSGEIIGLTDAGVRIFSDGREPSSKDRVGESLAVERRLSRGARRNRDRRGRRKQDLLQRLVKLDLMPKDAKERKALEGLNPYQLRADALERPLTPHELGRVLFQINQRRGFLSNRISDSDDEETGKIKPKITDLRQVLGSQTLGQWLNERLKSGKSIRFRGEDGDYYADRAMYLAEFDKIREHQEPHHTLSVFAWDDLRNGNKAQGFDGIFFQRKLKPVEKGRCEFFIDEFRAHKDLPISHEFRILQEVANLQYYGDDHKKFDLDQEQRDRIFDALDTHKTLSFGSLRKLKKPDGSWLFPRGCLFNLETGPRDKLNGNATAIDMRKPNMFGVRWDALSPDEQNDVVEMLHDADDDVQLISDLQAQFSLNDDQAKAVSMFKLTSATTHLSRKFMMRCADIMRETGLRYDEAVKEVWDDDGVFLHHSHRAEEELMDCLPYYGQVLRGSVIGGKPAHYDPQDYPEQHYGKINNPTVHVALNQLRKLVNRLIDRFGPPAEIHVELVRDLKKTAKARNDIAKENATYAKANDKRANVFRELHNGQNPSGLDLKKMRLWEELGKDQISRLCPFSGKPISAAMLFNGEAEIEHILPFSRTLDNGAANLTVAIRQANRVKGNYTPYEAFANDQHADKGMVWADIANRAKSFPQNKRWRFDADAMEKFDKDGGFIARQLTDNAYISKVTKRYLGHICDQKKIVTIPGGLTAMMRGKWYLNSLLGDHNYKERNDHRHHIIDAFVVGLTDRSMLNTVSQQTGRSADDRVRVELPDITPLRNQLAGRLQSIVVSYKPDHGVNGKMFKETAYGIVQEDQQDPDLKGYGLVTSKKIGALSEKEINAIRNRGWRSLVQDHVAKAKIAGTKLDTNGLAKVLTEFGQAHNIKTIRLLVSNQSATVIPSAPFKAYAPDSFVCVDIWQVPKGKPGKWKKGQYEWQGAFWSYDQCKGKNPDKNDGLIKDQPIHPAAKFITRLFKNDLVELRDGEQTQVMRVAGYKTKENKLDLRPQYETDSNQKYTSINVLQTAFLRRLKVFEDGTVKD

SEQ ID NO: 572 - protein, 1057 aa, unidentified
  REGION 1..1057: note = Description of Unknown: Cas Enzyme sequence
MAWRLALDMGTNSLGWSAFSLVKQGEVNNLLDAGVRIFSDGREPSSNDRVGESLAVQRRLARGARRNRDRRIKRKNQLINRLVKLGLMPDSKEERKSIEKLDPYYLRATAVNQQLPPFELGRALFHINQRRGFLSNRKSDGDDESGVIKPKITTLRNALGKQTLGQWLYARVASGRSVRFKGEEGDFYADRAMCIDEFDKIRSQQAQYHSLAENDWDDLRNGNKVQGFDGIFFQRKLKPVERGRCEFFINEYRAHKDLPISQEFRILQEVANLQYYGDNHTKHSLDDSQRALVLEILNEQKTISFNALRKKKFPDGSLVFPRECLFNLENSPRDILKGNATAIDMRKLEMAGSNWDKLSPSQRNDILELLHDAEDDQIIVGDLISQFGFNEKHAKAICKFKLSPATSHLSRKFMERCSAIMRDEKIGYDAAVREVYDDDGVFLHHSKYQVDQLIDKLPYYGELLRGSVIGGKPTDFDARLQPEQYYGKINNPTVHVALNQLRKLINALIERFGPPDEIHVELVRDLKKTAKARDDIAKENTKFAKANEKRADLFSELNNGAKPTGLDLKKIRLWEELGSGQLTRHCPFSNKPISAAMLFNGEAEIEHILPFSRTLDNGTNNLTVAIRQANRLKGNRTPYEAFSGGQYESQGMVWDKIAESAKCFPKNKRWRFDSDAMERFDKEGGFLARQLTDNAYISRLTKKYLSHICDQNKITTVPGGLTAMMRGKWHLNSLIGDHNYKERNDHRHHIIDSFVVGLTDRGMLQKVSAQTKRGADDVVRIELPDITDLRSQLEDRLSSVIVSYKPNHGINGKMYKETAYGVLPKEKQNADLPGYGLVTRKKISALSEKEIGAIRNAGWRSRIQHCVTEAKASGPKFDRSRLAKVLNEFGENNNIKTIRILVSNQSALTIASAPFKAYAPDSFVCVDIWQVPKGKPGNWKNGEFEWKGAFWSYAQCKGNTPNKNAGLINGQHIHPAAKFITRLFKNDLIAMQEGVETIISRVAGFSTTNNRIDLRPQYETAGAKKYLSINVLKDKFKKRLGVSEDGLRRGGNGYTDC

SEQ ID NO: 573 - protein, 1010 aa, unidentified
  REGION 1..1010: note = Description of Unknown: Cas Enzyme sequence
MDRTLGLDLGTNSIGWALVRHDDNNQPQSIEAAGARIFQEAVDAKTRTPKNQKRRAARALRRIISRRRRRKAKLKRLLVGAGVLPPDILETATPEILLNGLGDPYEIRKRALDSKLEPNELGRALLHICARRGFQSNRRSLLGEIATEFDDIIEASESLGVADPDDKPAKKALVAEEGIVKQEIASLREDMQAAGARTLGEYLSTVEKPRRKRGRHTDRAMFKEEFETIWTSQARFHHVLTDDGLKARIFEAIFFQRPLKSAKHLIGRCSLEQGRRRAATARLECQLFRVLQDVNHLSVRDPVTRLYRDLDSRERPILRQLLHQQSTMTWGKARKALGLHGSETFNYEDAGKDKLKGNTTCVAIEKILGDAWREMTAERRQALVEDMLTIANKGDLARRLRDHWKIDRRQQYQLATLELEPGYMSHSLKAIRKMLPALEIGAKYHEAKQAAGYALDRPDTAPRLQLGQVPMVRNPVVQKSLFEVRRVVNALIHVYGKPAVIRIEMARDVAMSGKQKEQFEKQQRVNEKANARALEQLETVGIPQPGRDDLVKYRLWEECKGVCPYTGKPIGMNELFSAAVDIEHVVPYSRCLDDSYMNKTLCMAQENRLVKRGRTPWEAYGEDKQRWEAMLQRIKAFPNAKQRRFTNNETPSIDDFVSRQLNDTRYMAVEVKSYVGQLGVPVEITKGAPTSELRRRWALNSLLGFDPEKKERTDHRHHALDAVVIALTSRSLYQRIARASAAHGHEALRHGALPLPVPWPDFVLGIRDALDRIVVSHAVNRRISGAFHEETAYGFRASTGKYHYRKRLDSTFQVSMVDKIADDFIRKIVKTRLDECSGDVKKAFAQPLLHKDGVTPVNRVRLARSAAGSSVVGVKGESGQAFKFYDLGNNHHIEICEDTSTGRRTGTVISTLDAARRARAEKTDPVNRVTVDGQRFVMSLAINDMFEVTSDQGVSYYRVQKISGDSEITLRLHTAAMLDRHHERLIKKPNTLKGRKVAVDAIGRVTYASD

SEQ ID NO: 574 - protein, 1079 aa, unidentified
  REGION 1..1079: note = Description of Unknown: Cas Enzyme sequence
MSRTLGLDLGPNSIGWALVDDSAEAIIATGIRVFPEGVDNFASTKEVSRNEQRRTARSMRRQIRRRGKRKAQLREALVSCGLFPADPAEQQRLYASDPYELRARALSEALQPHEIGRVLLHLNQRRGFQSMSKRKPKDKETSDMLAEISELAGAINKAGGTLGEFLHAKTRAFNHCKRIEEDHVRSRHTRRAMLVEEFVAICDAQRGFGNELLTEPLCYGEFGREASLAKLVRKPIPRHDPRRRGASDLGYFGLFGLIFFHRPMYWPRSIVGLCELEPKQKRCARGHRLAQRFRLLQEVNNLRYIDPDARVERTLDPDQRALLLEHLATRKEATFDQLRKRLGFDESVRFNMERGKRPKLTGMITDWAVAKAMGKQWHDRDEAEKNGIVEILLQADTDPDAAAGELIEQFAFTGAQADTLLSVELQAGYSGLSLKAIRKLLPHLEAGLPYMANDESNSALHAAGYLRRDELQRRIFDRLPMPERMAECKIGDIPNPVVKRALVELRKVVNAIIREYGKPDAIHVEMARSAQLGGERRKEYIKAMRDREARRDRAADELRKHRLSVNGDAITRYLLWERQATKCMYCGRTISLTQLFGGDADVDHVLPESQSLDDSQGNKVVCHRRCNADKGQRTVHQWLAASEPERYERICQQALSLLRKKLLPYGTYKRLLQKNVDLEDFTKRQLVDTGYIARATVEYLHCLFDADHAVLGLKGQYTAKLRHQWGLETILAELPDSPAWQEQGKLRPGQKNRADHRHHAIDAIVLALTNRSRLQELARHRRLGCPDGIDRRTGEVLEVSPPWDRFRQSVVEAVRAVNVSHRVRRRVAGGLHEDTFYGPVYDKAGQRVEGRFVVRKPLADLSPNEIPLIRDNGVRRVVEARLADAGLETGRGRKLDRTTYREAVAGLTMPSGVPIRKVRVYRSDLTIRPIREGTPNEAWVKPGSNHHLCIFQWQDNGETKREAVFVSRLEAARRVRAAEAIIRRTPPENHPVIPADAELVMSLSAGEMVLAEHKGRTKLLCFKTASSTQGQIWFVEHTDARPSAQDGRFAVKANTLEGRKVTVDTLGRVRWAESNSAQT

SEQ ID NO: 575 - protein, 1126 aa, unidentified
  REGION 1..1126: note = Description of Unknown: Cas Enzyme sequence
MASKHENLGALTFGLDIGIASVGWAVLGENRIIDLGVRCFDKAETAKEGESLNLARRTARLLRRRLRRRAWRLTKLARLLKREGLIADTNVFQKPFNLKDANEKGLSFWQLRVDALDRKLSAEEWARVIYHLCKHRGFHWISRAEEKAAEGDSKSEGGKVKQGLAGTKKLMQEKNYRTAAEMVLTEFPEAQRNKQGDYSKALSRILLGDEMTQLFKHQRELGNPHATEKLEAAILGNGDHKSGLFWAQNPALAGNDLLKMLGHCTFEKAEYRVPKASFTAERHVWLTRLNNLRIVVDGTTRPLNEAERHLALLMPYQQAGDLTYKQLRTALTKAGYLPESFRYTGLAYASGQKADEKAKDPESAPLVKLPAWHELRKTLEKKELASEWQKISSDALDGKPQLLDQIAWVLSVYKDDTEVEAELCKLNLPNAEKMIDALLDIRFDKFSNLSLKALRQIVPLMEQGQRYDEAVANIPEYGHHSQLHEVGAGEHKYLPPFYKERDKTGRMVFNDDMDIPRNPVVLRALNQARKVVNALIKEYGSPHEVHIEMARDLSRPLDERRDVEKLQKEFRDRNEKDKALFAQDFNIVGAVKGKEFEKYQLYREQQGKCAYSIEPMDIHRLFEQGYVEIDHALPYSRSFDDSKNNRVLVLAKENRDKGNRTPFEYLGGKDNSERWRQFVAFVEGNKSYRLAKRSRLLRKDFGKDEAKGFRERNLNDTRYICRFFKNYVEQYLQLHEDSDAKRCVVLSGQMTSFLRARWGLVKVRGDSDRHHALDGAIVAACSHSMVKRLSDYSRRKELEQVRAGFVDVDTGEIVNPAMFQQVQEHFPNPWPHFRDEVKLRLNVDDPALLHSEMNRFGTYSPEALKALRPLFISRAPQRRNSGAAHKDTIYAQPERLVAQGGVTQKVPLTSLTLKDLDKLIDPHRNEKLYSAIRIRLEQHGGKGDKAFPASNPLRKPDSEGNPTGPIVRGVTMVIDKLSGIPIRGGIAKNDSMVRVDVFTKAGKFHLVPVYVHHAVAKVLPNRAVVAYKDETEWTLIDDGFDFCFSMYPNDLLRIKLRNASHLGYYASCNRSTGAINLWSHDRNQQVGKDGMIESIGVKTALNVEKLNIDVLGNRYPAPPEKRRDLA

SEQ ID NO: 576 - protein, 1157 aa, unidentified
  REGION 1..1157: note = Description of Unknown: Cas Enzyme sequence
MNYYNGFIITENAMTSKQEKHGALTFGLDIGIASVGWAVLGESRIVDLGVRCFDKAETAKEGESLNLTRRMARLLRRRLRRRAWRLTKLARLLKREGLIADANLFKHKIEKNTPVPKSSWQLRVDGLDRQLNAEEWARVIYHLCKHRGFHWISRAEEKAAEGDSKGEGGKVKQGLAGTKKLMQEKSYRTAAEMVLAEFPDAQRNKQGDYSKALSRILLGDELKALFEHQRKLGNPVATEKLEAAILGNGDKKCGLFWAQNPALAGNKLLEMLGRCTFEKTGGDDGKGEYRAPKASFSAERHVWLTHLNNLRIVVDGTTRPLNEAERRVALPMPYQQAGDLSYKQLGGALIKEGFLQKDGFKFAGLPYPTKQASEEKAKDPETSVLCKLPAWHTLRKTLEKHGLESEWQKLSTDALDGKPQLLDNIAWVLSVYKDDDEVKTELGKLNLPNTEKMIDALLDIRFDKFSNLSLKALSKIVPFMEQGQRYDEAVANIPEYGHHSQLHKVGAGEHKYLPPFYKERDKTGRMVFNDDMDIPRNPVVLRALNQARKVVNALIKEYGSPHEVHIEMARDLSRPLDERRDIEKLQKEFGERNKKDKELFAQDFNIVGTVKGKQFEKYQLYREQQGKCIYPSMDEKQGICCYSLKPLDLHRVLYEEGYAEIDHALPYSRSFDDSKNNRVLVLAKENRDKGNRTPFEYLGDKDNSEPWRQFVAFVEGNKAYRLAKRSRLLRKDFGDKEAKEFRERNLNDTRYICKFFKNYVEQYLQLHEDSEAKRCVVLSGQMTSFLRARWGLVKVRGDSDRHHALDAAVVAACSHGMVKRLSDYSRRKELEQVREGFVDVDTGEIVNPAMFQQVQEHFPNPWPHFRDEVKLRLSIDDPTLLRSEMEKFGTYTPESLEALRPLFVSRAPQRRNSGAAHKDTIYAQPKRLVAQGGVTQKVALSSLTLKDLDKLIDPHRNERLYAAIRARLEQHGGKGDKAFPASNPLRKPDSEGNPTGPIVRGVTMVIDKLSGIPIRGGIAKNDSMVRVDVFTKANKFHLVPVYVHHSVLGLPNQAIVGGKEESEWTQIDDSFDWHFSIYPNDLIRVTLKQEGRFGYYAGCDRSTAAIHLWAHDRNQQVGKDGLIRSIGVKTALSIEKFNVDVLGNRYPAPPEKRRDLA

SEQ ID NO: 577 - protein, 1053 aa, unidentified
  REGION 1..1053: note = Description of Unknown: Cas Enzyme sequence
MNSRGTPWRLGLDIGSSSVGWAALELDMAGDPKGILGLGTRIFSAGVDGDIETGKEESRSVARRGARMQRRQLDRRARRMRNVFNELRRCGLLPGAGHAESEEIHQALELLDRELAESWITTGDHRAAQLLPYLLRAAAADRHLKPYEVGRALYHLAQRRGFASNRKESVKQTDEKELGPVKEGIKTLEALLAGQTLGQYFSTLDPHQHRIRSRWTSRQMYRNEFDRIRTSQEGGPAALDKDAWARIERAIFHQRPLKSQKGKVGRCEFMIGERRAPKWLPEFQRFRMLSVVNNLRVRTPVDEGAALTPETRRGFSERALTTDERAEVLALLDASASVRLTSLRAKLKLKGTTFNLEEGGEKEIRGNVTGARLRGVFGQRWDAMGDGDRRRVITDVLSMEQDRALERRARETWGLEDDAVAAFVALRLEEGYATLSRLALSRLLPHLEAGLSVQEARQREFPVHFVAGDRAGSLPPVRKSLFHLRNPTVERSLTETRRIVNELIRAYGIPEQVHIELARDIKKSRKDRQDLAKANRNRQGERESAAERLRELGLANPSRADIERVLLHEECGGKCPYTGRSIALAELFSKSSPWDVEHIIPFSRSLDDSFANKTLCLAEENRNGKRNRTPFEAYSGDSDRYAQILSRVGQFQGKDARRKLDRFRVKDLGDDLRDEFCSRQLNDTRYASRLACGYLEELYGGASDEDGVRRVFASAGQVTAIVRRELGIEGLLGSPTDGRKNRDDHRHHGLDALAIALTSPGMVKRLADAAEGARSAGRRRFAALPAPWVTFADEAIARAAEMVVSHRGSRTIGGELHNAANYSRPIGGDPKVRHVRKPVSWFVLRGDVEDIVDSAVRQAVKAHIAARGGDKRCLANDRDPPRLPAKDGTLGNPIRRVRIRVSNSVVPVGVGARQRFVAPDSNHHMAIVSLLGPDGNPVKWEGHVVTRLEAARRAVRGEPVIQRDWGSGRRFCFSLASGDMVKLTVNCREGLYLVRAVSASELEFSMATEARPVSVIKREKLKRFRFRPSQLIADVKCSRVDVTASGVVRQCNA

SEQ ID NO: 578 - protein, 1019 aa, unidentified
  REGION 1..1019: note = Description of Unknown: Cas Enzyme sequence
MSNPSEYVLGIDLGANSLGTALIDLDKQDVVFTGVRIFKEGVESLDTAKEASRGVARREARQQRKQVDRRRRRMLGLWRILQSAGLLPLGERQAVLNQLDRQFQKLYPSPYALPYTLRARALDHKLEPFELGRALYHLGQRRGFLTNRKAALKEDEKLGLVKSGIVGLLADMQAAKARTLGEHFARNVDPLQKRIRARYTSRAMFIAEWEAIWTAQSVHYPDLLTPALHDRLHHQLFFQRPLRSQSHLVGKCELEPNEKRAPMALPVVQRFRLLTAVNNLRLISNRGPAPDFTAEMRQQTLSWLAATETMKLSALRAKLKLPKGVIFSIETGGEENLKGDLVNARFKKHLGADWESLTPSQQTALAQNVITAPDDDDEAVAALMATCKLNSESAVAALSITLPSGYFSISSRAIQALLPDLEAGITYAEARHRVYPPPVSEPITKLKPVEIALPTIRNPIVMRALTELRKTVNAIVARFGKPSSIHIELGRDLRKGFDERMRIGKSNRDQEKRRDEAKEELSKQTGKPTSAINRRDIEKYLLWKECGHTCPYSGHSISINALFGDHPQFDIEHIIPLSRSLDDSFDNKTLCYREFNSIKSNRTPFEAFGAQEDEWQAMVSRVEGWNNDHKLSRFRMAEADPDAMLEAFTSRHLNDMRYASRLAAQYLGSLFGGSNGVDPAGQKRIITCSGPITAFLRNEWGLNRVLNPQGTHKSRDDHRHHAVDAIAIALCSPATVKRLSDCAAQARAQGRRRFGMLPLPWPEFYAQVEKRIAETAVSLRPEYKLNAQMHDQTLYSPPKRSTDNRSVVHIRQAVQNANVADIVDPTVRQAVELKIAELGSQKRLEGNWPELVHPNGRRVPILRVRVAKRETPVRLGKADSERFVLPNSIHHTEIVRDESTKTTKFVNYPVSVIEAMRRKRDREPIVRTDFGERASLVCTLRSGDILSLARTGDSLTELWLVRSVNSSGQMELNLLRDSRKKADIQKDAGLWKPSVNPVFKAGAQKVTITHLGEIIRAND

SEQ ID NO: 579 - protein, 1059 aa, unidentified
  REGION 1..1059: note = Description of Unknown: Cas Enzyme sequence
MTSLICDDLVLGLDLGVNSIGWAILQNSGNTPAKILNAGVRIFDAGMEGDISSGNAQSRAVNRRNARTLRRQTQRRSRRLKKIFHILQRMNLLPQSDASKIIPELDRELLSKYADSFKSVETVNLDNLLPYWVRKRALDEQLESYELGRALYHLAHRRGFLSNRKSPQKADEELGKVKAGINELKQQITDSGSRTLGEFFAGLNPHERRIRSRWTHRDMYREEFDAIWQTQQQYMPEVLNEKQYSELYNAFFHQRPLKSAKHLVGKCELEPSCRRAPWATLEAQEFRMLQMLNNCQLITEDGEVKNFSDSQRTKLIEALEIQGDLKFSDAKKLLGLKRTAHFTLENGGESRFVGNRVNARMLQIFSQDWQTFDDAKKEQIINDLRCYQNPAALAERAKAIYGLPAAKAEEFADIELEGSYCNISRKAIRKFLPLLREGMTFPEAKKKLYPQKFQAVEPKNSIIPLAKHIDLRNPVVSRVLTELRKVVNNIVLKYGKPGIIRVELARDMKNNAVKKKALTKRNRDNERVRKAAAEKIAKETIVKNPRRDDILKLQLAEECNWTCPYTGRHFGMNDLFGGSPTIDIEHIIPFSRSLDDSYLNKTLCDAEYNRNVKKNMAPGEYLSPDSEAWNKIIGSVSRFKGDRDTIAEKLRRFKLSAAEIEEQLVEFSSSQLNDTRYASKVAADYLGTLYGGVNDAQGKRRIQATRGGTTAFLREMWKLNNILGDGVKNRGDHRHHAIDAIAVALTTPATIKTLSDAAVRECDRRTHKGRFKMPAMPWDNFWQDTKDAIDKIVVSHRVKRGINGQLHDTTNYAPVKIMGEKGKPVFHVRRQLAGLKSTEVEQIVNPVIRQAVKDKLDSLGISDPAKAFTDFANHPFVTAKSGKTIHIHKVRISVSASPQAIASGPRERFCNTASNHHMEVFAVLDKDGNEIRWDAVVVSMLEAKQRLKALYKQKHKDKNFKIGSIVNRNHGPNTKFKFSISPGDTLQFENPSEKMPTLVHLKCVPFSQQLMFTSLNDARLQKESKAAKEWFSSKVDPLRKLKPQKVMVLPLGEVIPAND

SEQ ID NO: 580 - protein, 1048 aa, unidentified
  REGION 1..1048: note = Description of Unknown: Cas Enzyme sequence
MAVSEVNGDLALGIDLGSNSLGWSIVRVIEGRPVGLVDCGVRIFEAGMEGNIEAGQGETRAAIRRAKKATRRQIDRRRRRKAKVIHQLQRMGLLPPGKADEVIPSLDRQILAACSSRWDTGEGIHIENLLPYWLRKEALYRRLEPAEIGRALYHLSGRRGFLSNRKTPRKADEEDGQVLAAISELQKAIEEAGTKTLGEYLASLNPHVRRLRQRWTHRDMYVNEFQKICDAQAAHYPEIFTLENRRRLMAAIFHQRPLKSKKSFIGKCELETTCRRAAWSQPEAQRFRYLQVLNNCKMIFRDTGEIRDFSTAEHEKLVAALEEGDLSFARAKKLLGLKPKLVAFNLEAGGEKRFIGNRVNEKIAKVIGEPWYSYAPEKQEGMIEDLRQFRQEVPLMSRATKVWGLDPATAELFARVELEPGYCNVSRRAICKMLPLLEKRVPYATAREQLYGKELSTRETLDLLPPVLEHFDTRNPVVLRSLTELRKVVNAVIRKHGKPDVIRIELAREMKQGQRERQRRIKTMRENERRRESAAEQVRQETGMEPSGDDILKVQLAKECNWICPYTGRPISMNALVGKASQFDIEHIIPFSRSLDDSFLNKTLCYHEENRNRKQNRLPYEAYHGTEQWDGIVGAVSRFHGPCRDEKLRRFKMTPEEWEQENGDFVARQLNDTRYASKLARAYLGLLYGGFWDASGRQRVFAVTGQVTAIVRNMWDLNSLLGDGGTKERTDHRHHAVDAFAIALTTQGLIQQLADQALPWYERKRYRARFRQISLPWETLHTDLEKTLAGIVVSHRVDHRVNAALHKEGNYALVQRGNSSAFHVRRTLGKLKATEVKRIVDPRVRAAVEARLQEPGAADPMKLFVDPAKHPMLVSRAGRATPIHSVRIAVDEHAKPIGKLRPKYAVTDSNHHIEILGILGPNGSIEAWDGEVVSTYEGMQRVRQARPVIREDHGPDKRLLLVISPGDTLRFAAPGDLPELLHVRSVSKSHQGAIEIAGAALTDARKKDEIKKSKQWYRICSLSRLMALCPSKVNVLPDGTIQPVPCHE

SEQ ID NO: 581 - protein, 1047 aa, unidentified
  REGION 1..1047: note = Description of Unknown: Cas Enzyme sequence
MGDPSASGSFELGIDLGSNSVGWAMIRVCKGAPEGIVDCGVRIFEAGMEGDIETGQGESRAAIRRAKKAARRQIDRRRRRKARVIHQLQRMGLLPEGKAEEVIPSLDRRILAAHCQRWDSNDGICLDNLLPYWLRKEALWRKLEPFEIGRALYHLSRRRGFLSNRKSPRKADEEDGQVRAAISELQQAMGDKTLGEYLASLNPHERRLRQRWTHRDMYVAEFERIWDAQTAHYPAILTVENRRRLHDAIFHQRPLKSKKSFIGKCELEPGCRRGAWSLPEAQRFRYLQMVNNCKIVFRDTGEIREFAAEEHAKLVAALERGDLSFAKAKKLLGLKSKAAAFTLEAGGEKRFVGNRVNADIAQAIGDAWYSYAPENKARMIEDLRQFREEGPLATRAIKVWGLDPATAEAFAKVELEPGYCSLSRRAILKLLPLLQTRVPYAAARKQIYGEDLSAREMVELLPPVFEHFDVRNPVVLRSLTELRKVVNAVIRKHGKPDVIRIELARDMKQGQRERQRRIKTIRDNEARRDDAANEIRRQMGVDKRPSDDDILKVQLANECKWICPYTGRTISMHSLVGEASQFDIEHIIPFSRSLDDSFLNKTLCYHEENRHRKQDRLPYEAYHGTEQWDGIIGTVSRFQGPWRDEKLRRFRMTPEEWEREGGDFVARQLNDTRYASKLARAYLGLLYGGFWDASGRQRVFAVTGQVTAIVRNMWDLNSLLGDGGAKERADHRHHVVDAFAIALTSPGLIQQLADHALPWYERKRYRARFRQLAIPWQTLHDDAARALEGIVVSHRVDRRVNSALHKEGNYALVQRGASSVFHVRRALAKLKMTEIKRIVDSRVRAAVEAKLHKLGIADPAKAFLESSRHPVLVGRVGRSVPIHSVRIAVEEHAKRVGERQPRYSVTDSNHHIEIVGVLGPNGSVGGWDADVVSTYEAMQRVRLGQGVIRRDHGPHKKLLLVFSPGDTLRLATPGDLPELLHVRSISKSHLGAIEIAGAALTDARKKDEIKKSKQWYRICSLTRLMALDPSIVNVLPDGTVQPGTHHE

SEQ ID NO: 582 - protein, 1155 aa, unidentified
  REGION 1..1155: note = Description of Unknown: Cas Enzyme sequence
MVVKYRLGLDVGTASVGAAAVSLDSNGLPDGLIWHHVRIFNEPLENGQAGLVSKKAGRRKARMQRRQIDRRASRLRHIAHLSNLLDLKREEISPDDGCTLPYLRAQAATERVELDDLLRILLRLSKRRGYKGEFKAKKKGPVAEGSNELSLAMRTLAEQRGIPLKDENDTGITLGQYLLHRMENGLPTKLKIKEDSDDPKNKKVEDANAPKSFYALRKMVEHEFNTIWDTQAKHHDILNGNHDGKSIREHFYEALFFQRPLKSATDLVAQCGLEPTLPRAPRAQMAFQRFRIEKTLADLRWGAGKRAEPLTPAQKKTIRDLLDRNDKVKFEDIYEALEGAGCEKPQGKGLNLDRASREELPGNGTLAALRKLDKHSKKHHPERAANLEPTFRTLEEKTQIAVINFLAELGSPEQLDDPAWHTSFVKRDGKPRQFSDALIGFINLIKEHDHFDRLGKMDFDGGRASYSVKALNTLADWLEEPIWPGDWQDNMERIDEEAAIRVCYPKSLNREIKRMDKLPAPESTGNAVVDGSLRQIRWTVNRMIAELAKKEQKYELAEIVVEMAREMSLGISRRNERESDNTKQQKARREAEKEIRAHGKAPTPPNIRRYLLWAEQDKSFCPYCNKTICLAEVLSADTEFEHILPKKLTQVGLKRSEIVLAHYNCNQEKGDRTPWDAWGEGRNDARWQSVEAAAARFDAKKNYRKAKLLRLKDFEREVLTDESIDGFADNQFHHTSWIAKEATQWLECLCPNRVSVSRGELTSMLRRSWKLETVIPEVRYENNLPVLDTGGKLDDKGKALSAQPITPDEFATLKKYLEGHPVRREDRKANPDFEFNRRPDKRLDHRHHLIDAITLALTSRGLFQKMAKNYKAAAEKMLPRDGETAEERERRIKTHTRLRLEVPEPPLRNVRAAALDAVRECNITIKPDRHPDGALFKDTAYGVAQRDGEDRLRLALRQAVANLGKAQGKTSTEAARKAIANIISNDVRRFISEEFEARIAQSLDASAALAKPIFHPLFGTPIRKVRCFETYAEDAQPIGFTSRQGEHRKYLINAGYAYLELYTDGSKNPQPVKTRDAMREKGRPFPNNVTRIYKGDTVLDPKSGKKFVVKQIKSQAGGMLVMTLITETRPVAEMSAKDGRQQPSGNGLNRFRLVK

SEQ ID NO: 583 - protein, 1139 aa, unidentified
  REGION 1..1139: note = Description of Unknown: Cas Enzyme sequence
MGMKYRLGLDVGTASVGAAAISLDKDGIPNSLIWHHVRIFSEPLENAQGTLVSKKAGRRKARMQRRQIDRRASRLRHIANLANLLGLKREEVAPDDGNNLPYLRAQAATECVELDDLLRIILRLSKRRGYKGEFKSKKKGEVAEGSSELSLAMRALATERGIVLKDENETGITLGQYLLHRMESGLPTKLKVKEISDKPKSKKSEDENTSKNLYALRKMVEHEFNTIWDTQARHHDILNGTHDGKLIREHFNEALFYQRPLKSAADLVAQCGLEPTLPRAPRAQMAFQRFRIEKTMADLRWGAGRRAEPITPDQKRIIRDLLDHNDKVKFDDIYKALENAGCAKPQGKGLNLDRASREELLGNSTLAALRKLDRHSAKKHPERAANLEQAFRALEEKTQIAAINFLSEIGSPEQLDDPEWHTSFVKRDGKPRQFSDPLIAFVDHIKEHDHFDRLSKMGLDGGRASYSVKALNNLADWLEEPNWPGDWQGNMDGRDEETAISVCYPKSLNRDIKRLENLPAPESTGNAVVDGSLRQIRWTVNKMIEELGRQPDEIVVEMAREMSLGISRRNERESDINKHNKARREAEKEIRTHNQTPTPSKIRRYLLWVEQDKSFCPYCDKNISLAEALSGSATEYEHIIPKSLTQVGMKRSEIVLAHHGCNQEKGDSTPWKRWGNTDRWQSVEAAAARFDSRKQYRKAKLLRLKDFEREVLTDKSVNGFADRQFHQTSWIAKEAAQWLECLCPNKVSVSRGELTAMLRRNWKLETVIPEVRNESNLPLLDTEGKLIEPNDFDKLKKYLEGHPVRSEDRKAYPGFDFNRRPDKRLDHRHHLIDAITLALTSRGLFQQMAKSYKAAAEKMQAHSAETQEEREYRMKNETRLRLEVPEPPLRSVRAAALEAVRECIITIKPDRYPDGALFKDTAYGVAQREGEDRLRLALRQTVAGLGKARGKTKLETARKAIASIISEDVRRIVGDTFEDRIANGMDAGAALTDPIRHPLYNTPIHKVRCFENYAEDAQTIGFTSRNGEHRKYLVNAGYAYLELYSDGSREPQLVKIRDAMRGKGKSTPQNAIRIFKGDVVKDSKDNKFYRIGYFMSKGAIAVIPIFDPRSFDKISERGAGKKKIAFTQAAKRLSLVSDV

SEQ ID NO: 584 - protein, 1006 aa, unidentified
  REGION 1..1006: note = Description of Unknown: Cas Enzyme sequence
MSYILGLDLGTNSIGWACIDEKSQKALGMGSRIFPEGTDRDTKGKEVSKNTKRRDARQLRRQLARRSQRKENLKEVLITLGMFPTILSENETFFRNNVYELRKKGLDGRLTKFELGRVFYHLNQRRGFKSTRKAEKEKDDGIVAQQTSQLQKEIEQKKCRTLGEYFAGMDLAEQRIRDRYTLRKLYEEEFDLLWKVQKNHHPELTDDIKEQIRNRIIFYQRPLKSQAKLIGFCSLESKKRRCAKERLVAQKFRILETVNRLSMVDEDGVVHDFFKKQNEEFAPQMLEWRKMLIQELWEKEKLTFKQITKLLDIPEFNQFNLEKGGMKNLKGNTTGHAFASLFGKTWHQKALEEQEKIHQVVRGADDPEWLKSYAMTHWGLPDDKAQKLAHKTSFQSGYLNYSTKALNRIIPFLEQGLSLTDAKEAAGYTEEQDFENPEDLIKNLRNPIVQQTLYELMRILETILKTFGDPQKIRVELARDLKASAKKREEMHFENLKRKAEHEDIGKRLLEDGIKPTHATIIQYKLWKECGEVCPYTGDSISKSALFGPSPTFQVEHILPYSRSLDDSFMNKTLCRVDENKRKGNKTPYEYYSDSSEFDEILQRLKKNISDHGMPYNKLRKFLKKEVGDDFISRQLNDTAYISRQSKKLMEAMRFKVSISKGQATAELRHLWGLNTLISSDTKKNRGDHRHHAIDAAVVAMTQADTLHKLSAYNKYDRTATEKGFPPPWKNFRETLKPHVERMLISFRINKRARGALHEESLFGITPKKDEKGSPVYVIRKSIEQLTHAMVNKIVDPTVREIIKDRLRDFGVDPDQKKFTIPKEAFKEPIYMKTYKGLKIPIKKVRIHEPKNNAIALPGRCKTAVEPGGNHHVVLYKFKDSKGQQKQGGEICTLFEAVRRKKNRESIIRRDLGPEKEFLLSLSINEMVLLDIKEEEIDWEKTDYEKLNQHLFYVQKLSVQNKIACLFFRFHRDAAKATEPVCKTVGSFKGIKVNIDRIGRVFKAHD

SEQ ID NO: 585 - protein, 1101 aa, unidentified
  REGION 1..1101: note = Description of Unknown: Cas Enzyme sequence
MVGSRTRQSYVLGLDIGVASIGWAVVDPSTARVIRAGVHLFEAGVDGGKQNPETAMASGREQSRATPRRDARQQRRQTWRRAYRKRVLLKALIRRGLLPAPERRLDSPQDIDSYLKAIDAGLRHAWEAKQNADHRLRQLLPYRLRAEALRTRLEAHEVGRALYHLAQRRGFLSNRKTDKDDAGDENKNTGKVKTGISELETLMKAAGADTLGQYFAALDPSDSAALRIRGRWTARSMYEHEFARIWEQQSKHHPSLMTAEARTEIHRAIFFQRPLKSQAHLIGRCSLVPAKRRAPIADRLAQRFRMLQKVNDLEIMPCVQIELEDFDRETGEVRMNPKTGKPRVKKQWVPDPAQTQRRLTPEEREAAIVRFSRGDATFNQLRQSGAAPRESRFNFEREGETGLPGLRTDAKLRAVFGERWDGFSEDDKNAAVEDCLSFERADAMEKRGREHWGLSAESARAFARVRLEEGHASLSRAAIRRLLPGLESGVRYATIREKVFPESSKPIVPVGQLPPLDDAFDAPVSPAVSRALSEMRGVVNAIIRRYGKPAHVRIELARDLKKGRKRREAISKQMAARRKLREDAAYRLLKQYPDFGSRPEDVRPGDVLKVLLADECGWLCPYTGRSFGWEDVFGAHPTIDIEHVWPFKRSLDDSYLNKTLCCVRENREVKQHRMPSEAYSPDRLAEILQRVARFKGDAAREKLDRFRAEAIPPDFTNRHLSETRYISRKAAEYIALLYGGFSDEESTRRVHVPSGGLTGWLRREWAMDAILSDRNEKERSDHRHHAIDAIIIAHTTPTTIKRLQESAAKADEMGSRRRFAGVQAPFDLADTKRAVQAIIVSHRQNKKARGKFHKDTVYSKPLPSAGGKTRHRIRKELHKLNESEIGAIVDRRVREVVRAAFEERKRAGARTPAQAFGEPQHRPTLPHGERIRRVRLYTSAQPQLLGVARRDRKARGEAKQRRVDLQANHHTVIMAKLGKDGTEKAWVDEPVTLCEAMDRVRQRPARPLVSHEVPDGCRFKFSLAANDFIEMDTPDGQGRAIYRVLNVSKNDMEVVSHQDARTQKTRISEKQRERVRGSSLHSRHARKVHITYLGEVKNAGG

SEQ ID NO: 586 - protein, 994 aa, unidentified
  REGION 1..994: note = Description of Unknown: Cas Enzyme sequence
MADLSLGIDLGANSLGTALIERERHEIRFTGVRIFQAGVDGDIESGRDESRAVKRRQMRLQRRQAWRRVRRLNKTLRLLQRYGLLPVGEAACVIPALDRELHARYPETEVLPYFLRARALDHPLTAQELGRALYHLAQRRGFLSNRRAPEKEDEKKGKVKGGIESLEGQIETSGKRTLGEYLASLNPHEARIRTRYTHRPMFEREFAAIWTAQRAHHPEVLTEARFAELREALFFQRPLKDQSHLIGQCSLMPELKRAAIYLPEIQRWRYMQVINNLKLLSPSGEERTLTDRERESLYQACEAQEKVALKKAKKLIGVTDLWKFTVESGGEKELNGNLTNVRLEKILNLRWRRMSADRQIELLKDWADAKTDEAFQALAQEKWECSPEEAKALSELRLPDDYASVSLEAARRILPYLERGVTFGEARKAEFPEQFVAKEPLPLLPPVKEALPEVRNPAVMRALTETRKTVNAIIRKFGKPDYVHVELGRDLKRNRDERTKLSSKNREQKKKRDQARDALRTHGLPEPRRSDIEKYLLWQECKETCPYTGKSISLNAIFGANPMFDVEHIIPFSRSLDDSFLNKTLCYKPENANKANRTPWESYGGTPQFDEIVERVKRFGNDAKLRRFQMRETDLAKLLEDFSSRQLNDTRYASRLAQQYLGLLYGGRSDANGKQRVFVSNGQATAFLRQKWNLNRILSDSPHKSRDDHRHHAVDAAAVAMASAAMLQELARAAENAVRERHRQFGTFAYPWPEFREQLAAAIHATNVSHRPMRKLGGPLHEETLYGKPHVGRDGKHYVHIRVPVEKADIEEIVDPTVREAVRIAREAKTAPGLTTRDGRSIPIRKVRVRSVVKTVPVGEGARRRNVVTGDNHHMEVVGETKGKKAVYSGVVVSRLEAARRNRLKIPVVQRDHGPDKEFLFSLSEGDMVEWKGRYWRVRGVTTQSNGMPILSPATDARLKAEAVVERPTVNVFCKAGGRKVAVDHVGEVRLARD

SEQ ID NO: 587 - protein, 1031 aa, unidentified
  REGION 1..1031: note = Description of Unknown: Cas Enzyme sequence
MLIPNDSLVLGLDIGSSSVGWSLIQNRGEAVEIVASGVRVFPWTVDEQTLMSRSVERRRARQRRRQLERRARRRRLVASLLQRQGFLPPGPPDHRDPSWKAVLAMDPYELRGRALETRLEPWEFGRVMYHLAHRRGFAGSGRGADDSETGVIQEQIEKTAREMQKVNARTLGEFLAQLDPRERRRRGWHTAREWYRTEFEAIVQAQQRMGLNLDPDWVKRLRRAIFFQRPLRTSPRAVGRCGLVPGRLRAAWGLLEAQRFRYLQKLNDLRVLLPDGQVRPLTPQERELVRGELERSERLTFDRLRRLLSSCDPSEALGEPSTGKAGNCDEDPGARSTSDFSRQKAGLAFNLECGGQDCLPGNTTAARIRSAIGQKWDQASEDVRRAMVELLLGVKDRKLRARLALRRKEWALSDLEAERLAQVNLEPGRCRFSSAALRRLVPHLEAGCALTEAIAREFPEHEARFRTEADPPPETPVTNPLVRRALAETRRVVNAIVRTWGLPGRIHIELARELRKPLRRLRELLRRNEERQRQRKHAIKYLIEKGIQDPRPDQIEKFLLWVECKQICPYTGQSISDVDLFGPLPRFDVEHIIPWSRCLDDSFANKTLCEVDHNRNRKRNRMPTEVYSQDELSQILRRVRAFQGPYRFEKLRRFQMTEADLTTETGWLLRGDQLQATAHAARLAGRLLGRWYPAEERLSRIQITNGAVTSWLRVAWGLNQLLGVADEKNRSDHRHHLVDATVIALTTAATVKALTEAARRSARPRRFVDMPVPPGLVDSLRQQLETVIVSHRVDRRVQGPLHEETFYGRIQTPPTGESRTVVRKRIDALSATEAQRIVDPRVRELVAQVCNGRAPKEVFRDPSLIPEVPFGSRKVRIRHVRIWVSENPISLKDGDPRLVLPGSNHHLEIFDCREGPRPGWRCVVVSRWEAMRRLRAGKPVVRRFDEHGCPLVCSLARGETVRLNLPGGPVIAVVQKLSQDDYNFRLHTDGRRAADIPASERIRIRSSKALKKCLGCKLVVDVLGRCHVSRD

SEQ ID NO: 588 - protein, 1218 aa, unidentified
  REGION 1..1218: note = Description of Unknown: Cas Enzyme sequence
MQATDDSSPKKILALDLGTSSIGWSLFESDDDQVPTALLDLGIRHFQEVIIGEKSKRKLKNEKRREARGARRNLARRRQRRNNVLVVLQEMGLIASGQDPFASSPKGTGDAFGPYRLRAEALDRQLEAFDLARAFYHLGQRRGFRSNRGAKLISFLEDPVTAGFVQEFESVRAIKEAELSNSRRKKRRDREKELEGMLVEVESLEQKLKGKTLGQYFYSELQSGRRVRGRHTLRKMYVEEFHAIWDAQHQYYPDVLTDRYKTTLFEAIFFQRPLKVQTVLRGNCSLEPTKKKALRATLVSQEHRYWSDIVHLATEAPSVNRRNSRSTTLSHDWEYGPLTPEQRQTLADALDRTEILSWTAIRKLLKMPPNMGFNLMRTKENGLVGNRTAVTLRSIVPEFWSRADEKTRDNLIETLLTQRDKATLYRTMKSKYGFEPRTAFDLATLELEPGMASLSARAMTRILPYLRNGMRRTEAIRAAGYQLPDNHTGSESKLPQVAQSTDLTSPRVKKALGQLRRVVNELIRTNGKISTARIELSREMTLNEIELKNLLTSQAQLKKECEVARTVLRQIGIQQPTDEDIKWYRLAKQTGFQCPYTGESIGISIDSMSRFEIEHIIPNSYSYDDSYNNLTLCRRDYNARKGDMTPFEAFGHTTEWLAMVDRINKITGMGAKRKIALFKCKERPDQDRMIARQLTESSWISRAAMEYLKRAIPNVEVTKGKATQLFRDHWSLFSVLNQVIDEERAERGWPRVERKHANQKSRDDLRHHAVDAVAIAFTTRSVFQRISRHRKLHADGVSAKIRPLSNDVVPPCPDWLHAEMRTKLSTMVVSHEPTRGLSGALHEESLYGRRNCPKRHRIRVPIAELKKEDVERIIDDGLKGYIQNLTKKRNFYQVLSQGIEYKGSRLSHVLLLDNRFVIRKELKKVKPPEIDAVIENIIDPNLKAAFHAAFREITSNRIQLERLLIQVEPNSLRQVLIEASAAHDKGSKALKQNDDEDSENEPAEVTQDEGEKKTKRQKPALLFADRVTLVADPALRAELIATFALPRTKEAVLAAGIDYCGTRVRHVRIEAHTKNPNCLGKSPDKYVVHGNNHHVAIFENLQTGKREGRFVDMMEAARRVRQEGRPAVDTSPPPGWRFVNALYINDTVRIVDEGASNSNLYRIQKLAPNTSQITLRIATAGSVLHDEERLIKNVNVLRCVKLEVSPAGRIREIREPEP

SEQ ID NO: 589 - protein, 1184 aa, unidentified
  REGION 1..1184: note = Description of Unknown: Cas Enzyme sequence
MVVKYRLGLDVGTASVGAAAVSLDKDGQPDALIWHHVRIFSEPLENGQAGLVSKKAGRRKARMQRRQIDRRASRLRHIAHLSTLLGLKREEIAPDDGSTLPYLRAQAAIESVDLADLLRIFLRMSKRRGYKGEFKAKKKGEVAEGSSELSRDMRELATKRGIALKDENDTGITLGQYLLHRLENGLPTKLKIKEHGDEPKNKRDEDANTPKNLYALRKIHVEHEFNTIWDTQAKHHDVLNGTHDGKPIREYFYEALFYQRPLKSAADLVAQCGLEPTLPRAPRAQMAFQRFRIEKTLADLRWGAGKRAEPLTPDQKQTIRDLLDHNDKVKFEEIYEALEKAGHPKPQSKGLNLERASREELLGNSTLAALRKLDRHSKKHHPERAANLEQNFRALDEKTQIAALNFLAELGSPEQLDDPEWPRQIATSEGVRRFESAFVNPERYLLDFNGKPEKKRGANYVELIAFVNRIKEHDNFDRLSKMDFDGGRASYSVKALNTLAEWLEEPNWPGDWNNKEDGAKSLDEEGAVRACYRERMKVNRNIKRLDKLPAAESTGNAVVDGSLHQIRWTVNKMIAELGAPPDEIVVEMAREMSLGISRRNERESENTKQQKARRDAANEIRIHGQTPTPPKIRRYLLWAEQDKSFCPYCNKTIGLADALSGSTTEYEHIIPKSLTQVGLKRSEIVLAHLACNQDKGDRTPWDAWGEGRNDARWQSVLAAAMRFENMKPKQFRKAKLLRLQDFEREVLTDESIDGFADRQFHQTSWIAKEATQWLECLCPNRVSVSRGELTSMLRRKWGLETVIPEVRYENNLPVLDEGGQLNEKGKPEAKPIAPEDFVRLKKYLEGHPVRREDREANPGFDFNRRPDKRVDHRHHLIDAITLALTSRGLFQQMAKNYKAAAEKMQPRDGESTEDRERRMKSETRLRLEVPEPPLRDVRAAALKAVRECSITIKHDRHPAGRLFQDFAYRVIYPEGDVSARLARKKSVSDMAGDSVEQTRKNINDIVSPTVRNIILDEFDRRKNNGQSINEIFSEPFLHREHRTEIKKVFCLQKIGRGYMSTDGTYPVKHPLLTEKHEKRLLHDGYAYLEMVLENGRFKSARPITQWEGQRQFAETSVETIRFFKSDTVMDNQSGKLYLVRQIKAQSGGMLVMAPITETLGVEKLTSEYGLQFPSGKSLARFKLI

SEQ ID NO: 590 - protein, 1154 aa, unidentified
  REGION 1..1154: note = Description of Unknown: Cas Enzyme sequence
MVVKYRLGLDVGTASVGAAAVSLDKDGQPDTLIWHHVRIFNEPNEPGQGGLVSKKAGRRKARMQRRQIDRRASRLRRIANLASLLGLKREEIAPDDGGTLPYLRAQAATERVELDDLLRIFLRISKRRGYKGEFKAKKKGEVAEGSGELRFDMRKLATERGIVLKDENDTGITLGQYLLHRMGSGLPTKLKVKAISDEPKSKKGEDANAPKNLYALRNMVEHEFNTIWDTQAKHHDILNGTHDGKPIREHFYEALFYQRPLKSAADLVAQCGLEPTLPRAPRAQMAFQRFRIEKTLADLRWGAGKRAEVITPDQKRAIRDLLDHNDKVKFDDIYEALEDAGCAKPQGKGLNLDRASREELLGNSTLTALRKLDRHSAKKHPKRAANLEQAFRALDEKTQIATINFLAEIGSPEQLDDPEWHTSFVKRDGKPRQFSELLIAFVNRIKEHDNFDRLSKMDFDGGRASYSVKALNNLADWLKEPNWPGDWQDDMKRMDEEAAIRVCYPKSLNREIKRMEKLPAPESTGNAVVDGSLRQIRWALNKMIAELDAPPEEIVVEMAREMSLGISRRNERESDNIKQQKARHEAEKEIRAHGKAPTSSNIRRYLLWAEQDKSFCPYCNKTISLTEVLSADTEFEHILPKKLTQVGLKRSEIVLAHYNCNQEKGERTPWEAWGEGRNDARWQSVEAAAARFDAKKNYRKAKLLHLKDFEHEVLTDESIDGFADSQFHHTSWVAKEATQWLECLCPSKVSVSRGELTSMLRRSWKLETVIPEVRYESNLPVLDTGGKLDDKGKSLSAQPITSDEFVTLKKYLEGHPVRSEDRKANPDFDFNRRPDKRLDHRHHLIDAITLALTSRGLFQQMAKNYKTAAEKMQPRDGEAAEDRERRIKNETRLRLEVPEPPLRNVRAAALDAVRECHISIKPDRYPDGALFKDTAYGVAQRDGEDRLRLALRQSVAGLGKVQGKTNLEAARKAIANIISDDVRRIVGDTFEDRIASGMEAGAALALPIRHLLYGNIIHKVRCFETYAEDAQPIGFTSRCGEHRKYLVNAGYAYLELFTDSSQKPQLVKIRDAMRNKGKPVPENLMRIYKGDVVRDSKDGLLYRVCLFKAAGTIAVLPIWEPRSFKEANEKAEKEAKVGGTISFSPAAKRLKLIA

SEQ ID NO: 591 - protein, 1054 aa, unidentified
  REGION 1..1054: note = Description of Unknown: Cas Enzyme sequence
MGQQTPWRLGLDLGTSSIGWAVVDLTRTKGGKPKGIREAGVRIFEAGVEGDIEQGKDSSRATKRREARQPRRQNWRTQWRKQKLFARLVSLGLLPTSESSQPVARQSTLAVLDEALRSEYLPEGDHEAQQKLTYILRAKAVEIPLEPYEVGRALYALAQRRGYLSNRKAQSDDDESSGTVATSIGELQQGMNELGSDTTISQYFVQRVNPVDSTPEKIRHRYTARKMFTDEFDRIRDTQKNHLTLSPEDWNELWKLIFFQRPLKSQKHRIGRCKLEPEERRCEECLPVYQEFRILQKVNDLQVIQGDEPKRPIHDFPGAREALISALQTVPKLTAKQAAKAAGLPKGAAFSLEEHEGLDLIGHRTNVKMMAAFGKRWLQMPEQQQEQICREVLHYRSAKALKQRAMSAWGLDEEHAVILSNTHLENDYARHSRKAMKKLVGYMREGSHYRTAIEQAGYDVDQFGEALDRLPPVTEWDSDIGNPAIIRDLTELRKVVNALIAKHGKPATVHIEVARELKNSRKKRKELHSRNQQNRKRREQAAKAILEQCGIGNPTRRDVEKWLLAEECNWRCPYCSRSFGASDLVGSHAEFNVEHIYPRRFLDDSYLNKTIACRKCNAHKKDLTPKQAFAGKDYGRILSEVKQFNGFARDEKLRRFMTDAPDEDFVSRHLNDTRYNARLAANYLATLFGGRYDQDEEITRIVTPSGGLTWMLRTGWQLNDILSDDNQKTRDDHRHHAVDAIVVAFSDQSRIQQAAKAAILAQETNAKPFLRAVEYPWTGFKNDIAYAIEAINVSHRPTRTISGPLHAESIYSKPHEVNGNGKPQYRIRKELRKLSAKEITSEQIVDPAIRQLVQQKFAELGGKDPAKIFAEEANLPRLPNRNGPDIPIRKVRLAASVTARPVGRGPRQRNVASGKDSNYASMVYAVLDKNGNEKKWIHEIVTRLDAAELYSANLKTASTRGEEKILIPDEQDGARRFKFALRKNDMLLLEGPDGRDQLYRVQKLSKDEIQLCEHTKPTVTNPDRTPWNRVRSVDVLRKRNMRIVTVSPLGQIMR

SEQ ID NO: 592 - protein, 1022 aa, unidentified
  REGION 1..1022: note = Description of Unknown: Cas Enzyme sequence
LQSIYDGVTVVSIMEKIIDLVLGLDLGTNSVGWALIEEKAGCPAAICAAGVRVFPSGMEINERSGKTESHAIERRTARLRRRMLDRQKRRRLEVLHILQRNGFLPGGKPDHQVPEWQDILAINPYLVRAEGLDRLLSPTEFGRAIFHIAHRRGFLSNRKQAAKPGEDGVVKRETGEQEAKMKAAGVRTFGEFLWKLRLNDDACRLRERYTMRSWYRDEFTALCQAQQKIGLARLDDKVVRELREAIFFQRPLKVRPSLIGRCKLEPQRQRAAMALLTSQRFRLLQDVNHARLVDEAGRETDLTGEQRRRLSDALDLQKKLTFAQARRVVGAPKKSVFNFEAGGREDFTGNSTAHRIIDAIGLVAWKEMPAITREQVVEALMSMEDRDALCRLAMRKWKLPADAADELADVSLEDGHVNHSTKAIKKLLPHLEAGLSYAEAVAKAYPDKPLDPTEERLSPVPSDLRNPIVTRSLTEMRRVVNAIVDKYGTPARIRVELARDLKKTTKARIAAYTSMREREKERSRVAERLSQEVGIQEAKPWDKEKALLFEECGGVCPYTGKGISFAALFGPNPTVHVEHIIPFSRSLNNSFANKTLCYADENVHVKHNQTPFEAYASQPEKWQAILTRVRDFRGDRDLCREKLRRFLLEDVQGELDSFTTTDLNNTRYASKYASQFLARLYPPVERRKRIQVSIGQTTAYLRSAWHLNELLSPTDKKTRDDHRHHAVDAIAIALTTPATTQMLATAASRSYRPGVFGDVELPWDSLRSDVAAVLAKMVVSHRVDHKVNGSLHKETFYGLITTEPGKCSAVLRKPIERLSDAELRKKKIVDGAVRAAVEKKLQELGAESAEVFTDPAKRPCMPNKKGRYIPIRRVRVLQDLEPIALGTDNCRNIATGDNHHAEFFEVTNAKGEKVWQERIVSRLAAMKRKKLRQPVVAPHDGDGNPLVLSLAIGDTVNLQWNDKPVIAVVRSLSKGDYEFRPVNNACKANELGNDRIRIRGYKDLLKSACRIVRVSPLGETDG

SEQ ID NO: 593 - protein, 1022 aa, unidentified
  REGION 1..1022: note = Description of Unknown: Cas Enzyme sequence
MTYRLGLDIGSNSVGWAALGTEGGVPVEVLRAGVRIFEAGVQGDLERGKEESRGADRRRARLQRRQTDRRRRRLKAVYSLLADYGLLPHGKSARERDSNLTALDAELARRFPEARALPYFLRARALDQRLEPPELGRALYHLAQRRGFESNRKARQRETDEERGEVLKGIQSLYGSMAETGARTLGEYFARFLPPAERRIRCRWTHRRMYQQEFETIWAAQREFYPELLTRERHDQLFEAVFFQRPLKSQEELIGDCELEPGEKRAPLWHPLAQRFRMLQVVNDLRLSEPSGVERALTPEERRQLLAELEIKGDLTFAKVRHLLHLPRGVSLNREEGGNDKLVGNRTEARMRSWFGVRWDEMAPEQRTEAIEDLVSKLTEEELFGKAVDVWKLDGTLARGYSQSGLEEGKYLGYSLKAVGRLLPLMEAGQAFMTARHSLYPETLRLGAAEDALRPVTECVPDLRNPAVARALTEVRKIVNAMIREYGKPDEIHIELARDLKSPRKERENRWKRMREQEARRKEAAEKLAKEDGNPRPSAADIEKMLLMMECGCQCPYTGRTISMAAIRNGLVQVEHIIPFSRSLDDSFVNKTLCFVDENARKRNHTPWEFYGRTGGEEWERILDRVGKFQSRVARAKLERFQMREEQVDALLGDFSTRALNDTRFASKLAAHYLAHLYGGLSDEGGRQRVFATSGMLTARLRRLWSLSRLAGLSESGEKVRDDHRQHTLDAIIIGLTELRWVKRMADAAEYGRSQGRSRISSIEAPWDGFAADVGKAIDSLLVSHRPERKISGALHKETLYAERRRRDGSQFIAVRKPVNALTKGELASIVDTVVRGRVKLAVARAGDDPGKLNDGNAPTMPSGVPIRSVRVEVRKPLRSVGSGERLRLITGGDNQHFEVFSVLDRRGSVKRWDCVIVSKAEAAERVRTKRPVVCREHGPNTCFAFTIAKGDTFEIERDGVPEVVVARVLEGDKRVSLFSIRDARRQEKRNALRCTVNELMKKYKLQKVAITVLGEKIACRD

SEQ ID NO: 594 - protein, 1020 aa, unidentified
  REGION 1..1020: note = Description of Unknown: Cas Enzyme sequence
MSDYVLGLDLGANSIGWALIDEANRKIIDCGVRVFPEGVNQFDTKKEKSKSEDRRVVRGMRRQIARRARRKRALRRALTAAGLLPTNEADQAAVDGLDPFVLRRRGLTERLTPHELGRALMHLNQRRGFLSNRKADRQQKDDTKGMLAEINELQKVIQDSGCETLGEFLAKELEADPLRRIRGRHTRRDMLETEFELLWERQRKHHPELLTDALKYGERGKLPGVREPLPIAKGKSPLAAYGVHGLIFFQRPMYWPKSVVGQCELEPRRKRCPRADRLAQRFRLLQEVNNLKYLDPGTKDELLLSQEQRTLLLALLSKTKEMTFDTIRKKLGFLESIPFNLERGNRSKLLGTPVDALLANKEIFGKEWHDRPEDEKTQIVRCLIHGDEGEIRRRAQAEWGLDEAATERLLNVDLPAGYSMLSIAALEKLVPHMERGLLYMTDDNTPCALLAAGYLRADQLRRQAKDQLPSPPDVANPVVRRALSELRKVVNSIIGRYGKPSAIRLEFARNATVSKEQRQEMSKRMRDREAERDGAASRLRDEYGEKVTRDKIDQYLLWEEQGKVCIYSGRPIDVSHLLGGEVHIDHILPRSRSLDNSFSNKVLCFIKHNADKKNRTPYEWLAGSDPERYDQVCQRAARLLYNKRRRFTQKELDLGSFIERQLNDTRYICRVALEYLRLLFAEPYHVLCPKGSHTGTFRWLWALNSVLREDSVDRKNRSDHRHHAIDAIVIALTDHRRLQALSQAQDYNAEAVSGAKLDPPWEGFLKEVTARVEQIVVSHRVQRKVAGALHEDTLYGPTEKPGQFVLRKPLEALTPAMVEEIRDAEIRRIVIARLAQFGISYGRGAKGSIPAEVWKEPLMMPGPKGAQIKRVRLLKADKTIRPIREGSAWVKPGNLHHLCLFEWEEKGKTVRDAVFVSMLEAIDRVKQRQPIIQRTHPERPNARFVMSLSSGETVLLPEGAVDVPYTFETAASTSKQMWFRRHTAGGKSSDKSGVVSKKPSSFDGRKITVTPLGEIRWAND

SEQ ID NO: 595 - protein, 1073 aa, unidentified
  REGION 1..1073: note = Description of Unknown: Cas Enzyme sequence
MSAPFSKGETENRYRLGLDLGSGSVGWAAVLDADGDSPKILGMGVRRFEAGVTGSTDEIEAGKDKSRATARRDARGPRRQTWRRQYRLRKVFRVLQRLGLLPESDDDSHDTRNRVIADLDCQLRTEYLAEADHVAHQVLPYRLRAAALDEKLSRFALGRALYHLAQRRGFLSNRKASKKDEDTGVVKAGIRELSEEMERKGCRTLGEYFASLDPEQQKIRGRWTARQMYVDEFEQIWAAQSKHYGDLNAENHELLCDAIFRQRKLKSQKGLIGACELEPSKRRAPAASMEYQEFRLLQRVNDLVMIDPGNRKYSLIGKDDLELLPEAAAKRKALIAALQEAESLTFAKISKILGLKAEKRDGESIKWTFNLQEGGEKGIKGNTTAAKLRGVLGDRWTGLSEEDKYRLVDEILSFETEEVLVRRLMRGWQLPEKEAKEVADIHFEQGYGSLSRKAIRALLPALQRGIPYATARDEAYPEAKTVEIVLESLPAKHKCNRLRDVRNPAVERALSELRLVVNSLIRKYGKPESIRVELTRELKHSRERRKKMTERNRKNEGFRSDARAKILKEMGHERYCTAYNILKVRLAEECNWECPYTGRSIGMANLVGDNPQFEVEHIVPFSRSFDNSFANKTLCYHEENRTKSNRTPFEAYGHSERWDEILRRVGRFRGERSLVARKLDLFKREKLDDTEEFTNRQLTDTAYMSRLAAEYMGLLYGGRIDAEGTARVRVSPGRVTSYLRREWDLNKILGVSDEKERGDHRHHAIDALVIALTGASEIQTLSRAAEKAEAQNQHRLFMAVDQPWDGFLSDVFTGVEGINVSSRVSRKLNGQLHDATILSPPKPAVGKDGKPTQVHHVRKKLESLTKNMVDDIVDDRVRELVKEKLDAFGGDPGKAFQDAGNHPYFRSKDGRVIPIHKVRIRKSDKPVEIGTGSKRRYVNPGANHHLEVMAVLDQNGNEKRWVYRIVSRFEAVGRKNRGEAIISCVSDKKERFKFSLSGGEYVIMRFEGDDERLYRVTGITQSEVEFVLHCDARPITVRKKEGERIRCKPGRLMNSGARKVTVDPLGNILPAND

SEQ ID NO: 596 - protein, 1062 aa, unidentified
  REGION 1..1062: note = Description of Unknown: Cas Enzyme sequence
MATKDERKRTHQPYQLGVDLGSGSIGWAAVLETGGSASGILALGVRRFEAGVSGDIEQGKDESRATARRDARGPRRHAWRRQYRLRKVFRLLQRMELLPPSEDDSHDERHRVIAQLDRQLRAAASGRAPGVSQLLPYVVRARALDEKLSRHELGRAVYHLAQRRGFQSNLKAAKRDEDVGVVKKGITELEGQMQDAGSRTLGEYFASLDPEQYRIRSRWTARSMYQDEFEKIWAAQARYHPVLTDEHKQKLYDAIFYQRPLKSQKRLIGACDLEPYKRRAPAACLEFQEFRILDQVNRMNVIEPDGECRPPSAEERAKLLAELAEKGEVTFGRIRTLLKMRKSREYGRNYAFNLEEGGEKRLVGNRTAAKLGAILGQRWRELAPANRRTLVNEILSFESEDPLVNRLVSGWGFDAASARAVAQTRFEPGYASLSRKAISRLLPLMRKGIAYATARKQMYGEGRQEQEPLDLLPPKHECRLLRNLRNPAVERALSELRKVVNALVGKYGKPEEIHIELGRDLKHARKRRKQMADQNRENENARHAARKRILEAMKDESYCTPRNVLKIRLADECNWQCPYTGRTISMEALVGDNPQFDIEHIIPFSRSFDNSFLNKTLCYHEENRTQKRGRMPFEAYGHTDNWPEMVGRVRRFRADAQARKRKLELFQTEKLPDPSQFAQRLLNDMRYMSRLAADYLGLLYGGQIDARGKRRVQVSPGRVTAYLRDRWQLNSILGRPNDKQRHDHRHHAIDALVIALTGPSEVHRLSRAAEEAEAIGQTRLFPRGSFEPPCQGFLDEARQAVEGIHVSSRVSRKLSGKLHHDTIFSNPITCSDKRGRLAQVYHVRKPLDSLSPHEVGEIVDDRVRALVQEKLDGAGGDAKKAFAEQHNHPYFRTKDGRIIPIHKVRIRKHDKPVTVGEGSKRRYVVPGANHHMEIVAVLDEAGNEKRWEGHLVSMLDALARHRRGEPVIRREHGQGRRFKFSLAGGEHVVMEHEPGTAQLYRLVVISQGQVEFRLHTDARPDTLLRKREHSAGRVRRSPDSLRKAKARKVAVDPLGNVLPAND

SEQ ID NO: 597 - protein, 1045 aa, unidentified
  REGION 1..1045: note = Description of Unknown: Cas Enzyme sequence
MMTAEAELEPYVLGLDLGVESVGWAVIDLDQDGTPCGIRRAGVRCFDSGVEGQIESGRDHPRNTKRRKARLQRRQLWRRARRHGKLFGVLQRAGLLPPGPGRSSEDRHKLLFDLDRSLAGRYPADEDRAAAQLLPYRIRAKALDEPLEPFALGRALYHLGQRRGFLSNRKAVKDADEEGQVKAAIGELRRKMQQAAARTLGEYFAGLDAEEERVRGRWTSRQMYEEEFEAIWSAQAPHHAALTPELKREVHDAIFRQRKLKSQKGLIGFCELEPDCRRAPWACLDAQRFRFLQRVNDLEVIAPDGEIRPLTAQERDKLINALDTGGDLTFAAIRKLLGLNKPRGYSFNLEEGGEKKLVGNRTAAKFVAAIGKGRWAELSEADRDRLVEDLLSFEKTDPLVQRLIRAWGFSEAEAVQIAEIQLEPDYCRLSRRALRRVVPLLERGEHYATTRKKLYGDRLAEAETVDLLPPVADASAELRNPVVKRALTELRKVVNALLRRYGKPALVRVELARDMKRSRAARKDASQRNRQNERAREEAKKKLLVELGNEHPGRADVEKLLLAEECDWDCPYTGKRMSMATLLGPSPQFDVEHIIPFSRSLDNSFRNKTLCYHEENRTRKRNRTPVEAYAGSAQWDEILGRVREFKGSMAAAKLRQFQLKEIPEDFASRQLNDTRYISRLAGEYLGLLYGGRTDADGKLRVQVSSGPVTAYLRNQWGLNAILGEGPRKERTDHRHHAVDAIAIALTSPSTVKLLSDAAQRADAWGGRLFVPIDPPWDGFLDQARHAVDAICVSWRVDRRVAGALHKETLYGKSHPAPDARGRPVECRHLRKPLVDMSIGEIDSIVDDQVRWMVQGKLQQLGGTPKQAFADPANLPYFRTKDGRIIPIRKARIRQNVTTVELAGRGAPRFVAPGDNHHMEIVAATDAKGHTKWEGHLVTLMEAARRARSGEPVVRRDHGRGKKFLFSLANNDYVVMEHHPGEAQLYRVVGISEGELEFRLHTDARPTTVVKKIPGARVRRSPGKLLEAKARKVAVDPLGNILPAND

SEQ ID NO: 598 - protein, 1076 aa, unidentified
  REGION 1..1076: note = Description of Unknown: Cas Enzyme sequence
MAEKITREETDGNYRLGIDMGAGSIGWAAVLETEEKPSKILAVGIRRFEAGVLGDIESGKDESRATARRDARGPRRLTWRRQHRLRKVFARLQRMDLLPSCPDDSHDERHRLLAEMDRQIRERHRLLAEMDRQIRENPQSPFGEAAHRQLPYLLRARALHEKLPRHEFGRALYHLAQRRGFLSNLKAAKKDEDVGVVKKGISELEEAIEQAGAETLGQYFASLDPEQQRIRGRWTSRRMYEDEFEKIWTAQARHHADLTDERKQELHDALFHQRPLKSQKNLIGMCDLEPSKRRAPTACLEFQEFRILQRVNDLEVIQPDGECRPLDSDERDKLLAELRQKEKMTFGGIRKLLGMKKSKEYGRNYTFNFEESGDKEILGNRTAAKLHAAAGERWQQLDAQQQRSLVNDILSFESEEPLVTRLTNGWAFDARQAKAIAETHFEPGHGALSRKAILRLLPSMRDGVRFATARKTVYGEVLESTDPIDHLPPNHDCAVLRNLRNPAVERALSELRKVVNALIRRFGKPRRIYIELARDLKHARKRRRELTDQNKKNQKAKEDAKTRILEEMGDERFCTERNILKVRLAEESNWECPYTGRSISMVALVGDRPQFDIEHIIPFSRSLDNSYVNKTLCYHQENRSVKKNKTPFEAYHGTDKWEDILERVRRFKGDARTVQRKLALFKTEKPLDPAEFAERQLVDTRYMSRLAADYLGLLYGGQIDAGGTRRIRVSPGRVTHYLRQRWDLNSILGHPDQKERADHRHHAIDALVVALTGADQVSALSRAAEEAENLYLDGLFPRDGSFEPPWEGFLDQAREIVGQIRVSSRVSRRLLGKLHKDTIFSKPKPFDDGSGKPALAHHVRKPLESLSTQEVGHIVDDQVREIVQEKLAQIGGTPDKAFKQKSDHPYLKAKDGRIIPIHKVRIRKSDKPMAIGKGSKRRYVNPGANHHMEIVALLDKHGNEKKWEGHIVSNFEALRRRRAGEPIIRRDHGDGKRFKFSLAGDEHVEMSYDGQPEQLYRVTGITQDEVEFVLHSDARPTTLRRKLKGARPRGGPGKLRKCGARKVSVDPLGNVFPAHD

SEQ ID NO: 599 - protein, 1062 aa, unidentified
  REGION 1..1062: note = Description of Unknown: Cas Enzyme sequence
MAAENLRERTDGAYRLGIDMGTGSIGWAAVLETDDQPTEIIAMGVRRFEAGVLGDIESGRDESRATARRDARGPRRLTWRRQYRLRKVFRLLQKMDLLPSGDDSHDERHRVLAEFDKQFRESPDCPDPQAANQMLPYLLRTRALDEKLSRHELGRALYHLAQRRGFQSNLKAAKKDEDIGAVRQGITELEQYMQEAGSRTLGEYFAGLDPEQQRIRGRWTARRMFEDEFEAIWAAQAEHHDDLTAEHKEKLHEAIFFQRPLKSQKGLIGMCDLEPYKRRAPAACLAFQEFRIVQKVNDLEVIQPDGEIRPLQPDEREKLIAALNEKEKITFGGIRTLLGMKRSREYARNYTFNFEQGGEKDLVGNRTAAKMAKALGDRWQQFTAEEQIRLVDEILSFESEEPLIGRLTNGWGFDETQARAVAETPFESAYGSLSRKAIAGVLPGMREGKRFASVRKDVYNVEERTGDPADSLPANHDTGVLRQLRNPAVERALSELRKVVNALIRRYGKPSRIYIELARDLKHGRKLRKDMADLNKRNQKAKDDAKGKILQEMNNDERFCTERNYLKVRLAEESNWECPYTGRSIPPSALVGDSPQFDIEHIIPFSRSLDNSFANKTLCYHEENRKVKGNKTPYETYHGTEQWDEILARVRRFKADPRLAARKLALFQTEKLPDQEKFDDRQLNDTRYMTKMAGEYLGLLYGGQIDEGGTRRIRVSPGRVTHYLRQRWNLNSILGHPDKKERADHRHHAIDALVVAVTEAAQVSDLSRAAAEAEDMDLDGLFPRGGDFEPPWDAFLDEARRHVEKITISSRVARRLNGRLHKDTIFSKPIPSLDKNGKQVDFHHVRKPIGALSKQEVEDIVDDRVRELVKQRLAKLGGTPDKAFKDKADHPYFTAKDGRIIPIHKVRVRKSDKPMKVGRGTKQRYVNPGSNHHMEIVAVLDKDGKEKKWEGHIVNTFDAFQRYRRGEPIIQRDHGEGKRFKFSLAGGEHVEMEHEPGKRQLYRVLGISAKMIEFRLHSDARPSTVVRKISRARTIRSAGALLDAHAWKVTVDPLGNVFPAND

SEQ ID NO: 600 - protein, 1061 aa, unidentified
  REGION 1..1061: note = Description of Unknown: Cas Enzyme sequence
MASDTASISTQSAYRLGIDLGSGSIGWAVIPQTGNKPPDRVTLGVRHFEAGVLGDIEHGKDESRATARREARGPRRLTWRRQHRLRKVFRLLQAMDLLPASEDDSHDDRHRVLAALDRDLRARCESCHGRSSDHLLPYLLRARALDEQLSPHELGRAMYHLSQRRGFQSNLKAAKKDEDVGVVKKGISELEDLMNEAGSRTLGEYFASLDPEEYRIRSRWTARQMYQDEFEKIWAAQAPYHPHLTDEHKQRLFHAIFDQRPLKSQKGLIGMCDLEPYKRRAPAACLEFQEFRILQRVNDLEVIEPDGECRPLGPDEREKLLAELAEKGEVTFGRIRTLLKMRKSREYGRGYTFNLEEGGEKHLVGNRTAAKLVAILGDRWRDLSPERQRALVNEKLSFESEGPLVTRLTNGWAFDATSARAVAETAFEPGYASLSRKAMSRVLPLMRQGMPYATARKEVYGDVRQEAKPLDLLPAKHDCAVLRNLRNPAVERALSELRKVVNAIIRKYGKPAEIHVELGRDLKHARQRRKQMSDQNRKNKDARDTAAAKILQEMKDQRYCTPANILKIRLADECRWECPYTGRTISMVALVGDRPQFDVEHIIPFSRSMDNSFFNKTLCYHEENRKHKRGRTPFEAYGHTDRWEEILARVRRFQGDARVRRRKLELFQTKELPNPGDFAQRQLNDMRYMSRLAADYLGLLYGGQIDAQGKRRIQVSPGRVTAYLRGRWDLNSILGHPDEKERDDHRHHAIDALVIALTGAREVHALSRAAEEQERLGETRLFPHGSFDPPWEGFLDQARRAVQAINVSCRVSRKLSGRLHKDTIFSKPISFRDKHGRPTQVHHVRKRLDSLSTHEVADIVDDRIRALVQEKLDALGVDPQKAFAEPNNHPYLKAKDGRIIPIHKVRVRKHENPILVGHGSKQRYVNPGANHHMEIVAVLDEAGNEKSWEGHLVSMFEAVGRRRRGEPIIRRDHGEAKRFKYSLAGGEHVIMEHEEGKPQLYRVVGISAKVLEFRLHTDARATTLLRRISRARVTRSPGALREAKARKVAVDPLGNVLPAND

SEQ ID NO: 601 - protein, 1135 aa, unidentified
  REGION 1..1135: note = Description of Unknown: Cas Enzyme sequence
RTLPRPGGAQKKPRAGASIGCLLHGKPRSRQRLTRTKVPYYDKQGNRRSDTLTVILASFNQMSRGPLTMMAEIARERTEGAYRLGIDMGSGSIGWSAVLEKRDGKPSIILDMGVRRFEAGVLGDVESGKDESRATARRDARGPRRLTWRRQYRLRKVFRLLQQMDLLPASADDSHDERHRVLAELDRQIRAQFQGEDGRLAHRQLPYLLRAQALDRKLARHELGRALYHLAQRRGFLSNLKAAKRDEDVGVVKQGISELQQHIDRAGARTLGEYFAGLDPEQEQRIRGRWTARRMYEDEFQAIWTAQAEHHEDLGEEQKQQLYEAIFFQRALKSQRGVIGMCRLEPFKRRAPAACLAFQEFRIVQKVNDLDVFEPDGEVRPLRPDEREKLTTALSEKDMITFGDVRRLLGMKKSGEYGRNYTFNFEQGGEKELIGNRTAVKMANALGDAWSELTSEEQKHLVDEILSFESEEPLIGRLKSGWGLDELRARAVAHTRLEPGYGSLSRKAIARVLPGMREGHRYATVREDLYGITQKTDDPLDGLPANHETAVLRQLRNPAVARALSELRKVVNALIRRYGKPRRIYIELARDLKHGRKRRQQMADQNKRNQKANDNAKQKILQEMDNDERFCTVTNLLKVRLAEESNWECPYTGRQISMAALVGDHPQFDIEHIIPFSRSLDNSFANKTLCYHDENRKVKGKKTPYEAYHGTAKWDDILPRVRRFKADPRMAARKLALFLTEHPIDPDEFNDRQLNDTRHMAKLAGEYLGLLFGGQIDEEGTRRIRVSPGRVTHYLRQRWNLNSILGHPDKKERADHRHHAIDALVVAVTDAAQISALSRAAEEAEELFLDGLFPRGGDFEPPWDGFMADARECVEGIIVSSRVTRRLNGRLHKDTIFSKPIRSQDSGGKPVDVHHVRKPIKTLSTLEVEAIVDDRVRELVKEQLARIGGTPDKAFKDDANHPYFKTKDGRVIPIHKVRIRKSDHPMEVGHGSKRRYVNPGSNHHMEIVAVLDKNGNEKKWEGPIVSTFNAVRRRREGEPIIRRDHGEGKRFKFSLAGGEHVLMCYDGQQEQLYRVTTVTGKEVEFVLHSDARPITLRKKIREKGARPRGAPEKLRKCGARKVSIDPLGNVLPAND

SEQ ID NO: 602 - protein, 1163 aa, unidentified
  REGION 1..1163: note = Description of Unknown: Cas Enzyme sequence
MSSEATEVATTPVSYRLGLDIGANSVGWAAIRLSDESADAGRVQGLLAAGVRIFEAGVEGSIERGKDGSRAVARRLARQQRRQTWRRQFRKRQLFVLLQRHGLLPEAEDSSSAGRDAVLKPLDQELTGRWCSAGDLESHQKLPYLLRAAAAERILEPFELGRALYHLGQRRGYKANRRTPEGDDEQQGAVSGGISLLDQARLRDPADPASMRTLAQTVVEEFRFSGGHFAIRSEAAESSRRGRVRGHYTSRQMYIQEFEAIRNFQLANGGPLAAETWAQLEKVLFRQRPLKSQSHLVGRCTLEKDRFGRGRRRCLMALSDFQEFRLLQSLNHLMIVQEDGTEQPLMPGQKEVLYDHLMREGDLKLRTRAGRGKTAAASVISLLGLAKNTQFSLRSPEESEEDDVRLIGHRTNAKIRAVLGGEWDDMAESQQEKLILQLVYATDPARLSSWLTLHFGFNEPLAQQVAGINLEEQHASLSRRAIRRLLPRLRAGESYAAARLAVYPDSLRATAAADKLPPVTTWNREINNPAVIRALTEVRRVVNSLIQRFGKPAAIHVELARDLKRSRKERTQLWKQNEDNQKLRDKAKLEIVKQLGYSNPSRADVEKWLLAEECNWQCPYTGRPISAATLKHFDVEHIYPRQYLDDSFGNKTLSDPEFNRARKRNRLPSEVLEGAEWADVLNRVRHFKGRFAEAKLRRFQAESVPDDFVSRQLNDTRYNSRLAAQFLSLLYGGRSDADRQQRIVTPTGGLTWLIRRGFGLDRILSDGDYKERSDHRQHAVDAICVALSSQKVIKRLSGLAEQVSQSSQRFNAFLSEFARELPWPAFHEDAVQAIQGIIVSHRPQRAIGGPLHAETYYSKPLPAPVPVQSDGARGKGSRGKVTEHRVRKSLDSLTKKDIEGDAIVDLAVRAAVQRKYAELASAAGSASAAEPKKLWGNRADTQRFPRLPPSRAKSGRSGEAGGSIIFKVRVRTSVNAKTVGKGVTQRYVAAGQDANFAAMVYEIASADGRSVRWVHDVVTRLDAHEKLVERRRLLRENSSKGEAEGAFGRTESESFGELILVPRTRDDFATMNNPPFAVKADDSIRFVCAFRKNDLLELDVNDGRLIYRVQKFSTGEIQLCEHFRQIVDGKDRNTSNRISATDALRRRRLRVVHVTPSGEVRSV

SEQ ID NO: 603 - protein, 1154 aa, unidentified
  REGION 1..1154: note = Description of Unknown: Cas Enzyme sequence
MQVASADGLSVAVRYRLGLDIGANSVGWAAIRLDELEAEQHRPSGILAAGVRIFEAGVEGSIEQGKDSSRAVKRRNARQQRRQTWRRQYRKRRLFVFLQRQGLLPSSDDTTSVGRDAVLKQLDAELTALWCPAGDVDAHQKLPYALRAAAATRLVQPHELGRALYHLGQRRGYKANRRTPEAGDEQGGVVSGGISVLDQARLRDPEDSSSLRSLAQTVVEEFARENGTFAIRSEASNSPRRGRIRGHYTSREMYQQEFATIRDFQLANGGPLTTENWQVIQRILFTQRPLKSQSHLVGRCTLEKDRFGRGRRRCLMALPEYQEFRVLQMLNHLAICHPDGTEERLTEGQHAVLYDWLMREGDLKLTTRAGRGKAAAPSVVSLLNLPKGTRFSLKSAEESEEDDERLIGDRTNSKFRKILGQSWDRLSPEQKEKLILQVVYAADPEALAAWIARHFGFSGELAVAVSRISLEEQHGGLSRRAIRKLLPLLRVGKTYAAARKEVYPESFVATNAVDLLPPVTQWNREINNPAVIRALTEVRRVVNSVIRRFGKPETIHVELARDLKRSRQERKKLWSQNDENRRARERAKARILEKLGNSSPSHADIEKWLLAEECNWECPYTGRRFSATTLKDFDVEHIYPRKYLDDSFANKTLCDPDFNRMRKRNRLPSEILDGDEFEAVINRVRSFSGTHAESKLRRFLAESVPEEFVARQLNDTRYNSRLASEFLATLYGGRNDATQRQRIVNPTGGLTWLIRRGFGLDRILSSSDQKERGDHRQHAVDAICVALSTQKVIQRLSGLAEEFSRPGNRFNVFLSEFSRELPWPEFHTDAANAVLQMVVSHRPERSIGGALHGETLYSKPFAVSPSDDRQSRKKTSTSVEHRIRKSLDKLEKRDIEGDAIVDRAVRAAVQAKYAELVATASSPSAATPEKFWNNRALVDRFPRLQPAVTKRNVGSNSGGSIIYSVRLRARAKPAVVGRGPRQRYVAPATDSNFATMIYEIRTAEGTVVRWDHEVLSRLEAHQRLVSSDANLRSGGSLTTDHNPVPDPVEKILVPRSADEIRAMNDAPFRLKPTEQVAYIGSLRKNDMIELDGGMGDRMIYRVQSLSSTEIQLCEHQLQGISGKDRNTLNRITSVDSLRRRSMRFLNVSPAGDVR

SEQ ID NO: 604 - protein, 991 aa, unidentified
  REGION 1..991: note = Description of Unknown: Cas Enzyme sequence
RDEDPDAQSTSEDAGDGRDSAGKEDTRKVKANIEKLHQDMQAAGARTYGQFFARHINPEERRIRQQWTSRQMYEAEFGAICDEQSKYYPSLAENQAFRRELYTAIFYQRPLKPTGHLVGHCSLEPDRRRALWAIPLSQRFRLLQKVNDLTVRDPDADTYRSLTGEERRKLLDALLIQGDMTFKQIRKLLPGFIEPKVNKETKEVERVGHVFSHEGGGEDKLPGDRTAAKIISRDAKAPGIAQRWLDMPDAQREELVLAILDFNDDNALAEHLRKRFSLTPQQATTLCLVRFEEGRCALSRRAMARLLPLLEKGMPFAMAKEQIPEYRVRAIRQTAALDALPRVLATDQRHFPIGQPAHPCFRRPRDLANPAVARALAELRKVVNAIIGQHGKPAYVHVELGREAKKTPLRREIAWENTRLRQNERDEAEMAIRRCKEISISEPKRDDITKWLLAEECKWICPYTGKTITPESLYSSPQFEIEHIVPLSLSQDNSFDNLTLCDAEYNRNVKQKRIPYVVESGDVERWHAILERVKRFTRRNRACRNPNRKAKRRVILQAFPNPKADRFAWTPEQVKEFYGDQFTPRQLTDTQYASRLAGEYLGMLYGGEVDTAGNRRVQVSSGAVTAILREEWGLNGVIPGLPDSPAHKTSQEIRLDEKLRTDHRHHAIDAIVIALTSPRTVQILADAARRVELAELRRQDVRDSQGRRRTRYAEIQPPWGTQHSFLEHVRGVIASIKVSRRPERRIQGPLHAETNYSREIDIQGSKNRRQRVPLDRLSAKDIESDVIADRAVRDAVRTRWRELGGGDPRRVFARPESHPHLPARAGRQSPPIHSVRINVSIKPVTVGQGCRQRHVVSGKDTLHHTVIVAEKTPRGERWRDEPADRLEVHRRRRRGQPVIQTDWGTDHFVMSLCKDDCIEMDDGDGGRAVYVVRALSKGDIKVRLHYDARTDEQIAKAGQRSKFRITSADTLRKRNAQKVTVTPLGAVLREG

SEQ ID NO: 605 - protein, 1053 aa, unidentified
  REGION 1..1053: note = Description of Unknown: Cas Enzyme sequence
MKSQFDHPPYWLGLDIGVASIGWTLVGLDDQRREPVRLLRGGVHTFDAGVEGDVESGRDEARGAVRRQARMPRRMFWRRQRRRRNILRLLQRAGLLPVRDLGSAQAIHEYLLALDADLRLKHQTDGDRVAAHLLPYKLRAAALDHRLEPTELGRAFYHLAQRRGFLSNRKSVKKDEDEGAVKKGISDLQAAMDAAHARTLGEYFSRLDPEAERIRRRWTARQMYVAEFNRIWDAQVPHHPAILTDALRKDLFRSIFFQRPLKSARHLIGRCELVPTARRAAMADRLVQRFRILQKVNDLEIIPTDASPRPLTADERARLVDALCRHSDLTFAKIRSKEILGLPKGTTFNFEQREEEKKLPGHRTDEKMRTVFGDRWDRLPETERDAIVLEILGFEKPDALERRAIKAWSLDPVAAKALAETRLEQGYAAHSRAALRRLVARMEDGTRYATARRELFPDSFEAVQPRDRLRPVSKSIGAIRNPAVERALAELRKLVNAIIGAHGKPEVIRIELARDLKRGRKERERKSREIDEQTRLLDKAKARILAECGIAEPSRSDKEKALLWEECGGLCPYTGRSIEFSSLFGENPQFDVEHILPWPRSLEKGFLNKTLCEVAENRDRKRNRTPFEAYARDETRYAEILARVRRFQGKGAAAKLRRFEMKEIPEDFVSRQLNDTRFASRLAADYLSQLYGGRSDADGRLRIQVSAGGLTAHLRNEWMLNSILDDGGRKTRDDHRHHAVDALVVALTGPAAVQVLQRAAERASAEGRRLFARVQEPWPRFLEQAREAVLQINVSCRQHRKIAGDLHEDTNYSAKEHPFTDKDGKTKSARHVRKPVDDMIPAQVDDIVDPVVRERVRAWMQDENRASFPVTRASDGREIAIKSVRIRKVVGVEPVGLERTPEGVKPGPRTRYVKPGANHHTVIVATLDKNGNEVRWDDHPVTRLEVHRRKAANQPIIQKDWGPNLVFKFSLSANEYLLVKNAEGQADLIRLISISKGANEFRLHSDARSAKEARIRGSGARIRLNGDGMRKCRAREIPKVRVTHLGEIIPAND

SEQ ID NO: 606 - protein, 1055 aa, unidentified
  REGION 1..1055: note = Description of Unknown: Cas Enzyme sequence
MISVIPYRLGLDLGASSLGWAVIQLDQSGGKPVGISAAGVRIFEAGVEGDIEQGRDASRAVVRRQARQPRRQQWRRQRRKQKLFILLQQFGLLPASAENDSVARKQLLDDLDAQLTGKYVPENDHDLRQKLPYLLRDRATAGPVPPHELGRALYHLAQRRGYLSNRKGQSKDEDAGQVLSAIGEMDEKLKQNKLTLGAYFNRKLNPHEERIRRRWLSRKQYRDEFNAIQAAQKDAHPQLTLEVWKTIDDAIFFQRPLKSQSHLIGRCELEFDKRGKGLKRCPLALPIAQKFRILQKVNDLRVTTASRRNEPLTEAERQKLLNVLNETGELSWSKVKKVLGLKEKDIKFSLEEWDDKLIGNRTNSKMLPVFGPRWLELSEDERTTIAQEVLHYRKPEALQKRAMKVWGLDEAAAYQLAYKTHLEADYANHSRLAMEKLIAGKSDIPGLETGASYSTIRRALFPEKFTSGKILPSLPPVNQWKADIRNPAVIRALTELRKVVNAVIKRFGKPEHIHIELAREIRNSRVKRKETHTQNQKNQKRRLDAVSSIIKEGGRSSPRRSDIEKWLLAEECGWECPYCGKSINRKRLLAEDAEFNIEHIFPRRYLDDSFLNKTVACRTCNDIKGDKTPAQSFSGTRYEEILQRVERFHGTARDVKLLRFKTETPPPDFTDRQLNDTRYNSRLAAEYLQLLYGGRYDASGEQRIVSPTGQLTGKVRANWQLNDLLGIEDGEKEREDHRHHAIDAVVIALMTQKQIQRLSEAANNSEKHHSRHFFESIQWPWSSFKNDVTFAIEAINVSHRPTHTIAGPLHAETIYSKNFGTEKKAEHRVRKHISKLTAKEISGDQIVDPRVREAVQRKWAELKNALPGKLWGNDDADFPILMNQDGSGRGSVIRKVRLITDAKPRAVGKGPRARNYASGKDSNYASLIYAVLDKDGNEVRWEHEILDRLTANQNHSRNHGKLGEKVLIPEETEKRKFKFALRKNDMLRVQGSDGTDVLYRVQAISIGEIQLCPHNKSLIRGKERNPRNQVRAIDSLRKYNARPCVVSPAGEIQER

SEQ ID NO: 607 - protein, 1057 aa, unidentified
  REGION 1..1057: note = Description of Unknown: Cas Enzyme sequence
MDKAENHLAGNETILGLDLGTNSVGWCLLSARDGQPTGVIALGVRVFEAGMEGDIASGKGESRGLQRRQARQQRRMTERRARRKRKVLHVLQSAGLLPPGSAGEVVPQLDAEFLPGCLGDSGADERHQRAQVLPYWLRKEALDRPLAPYELGRAFYHLAQRRGYRSNRKTLAKDAKEKGQVEAEIAEIRSAMEASGARTLGEYLAASDPEERRIRQRWTARGMYLDEFDAIWDAQAPHHAAVLTPEFRKDLHQAIFYQRPLRSAAGLVGTCTLEPDRKRAPLALLCAQRFRLLCQVNHCNVIPPPPARRARGLTTEERDRLVEALERDGDLTFTRAKDLVGLSRRAKFGFEEGGEKRFVGNRTNAALAKVFGERWWDLSSDDQQQVVEDLRSFEKADALASRGMRRWGLGEEAARKLALVTLELGYSNHSRAAIGKLLPALERGAPYTTAVRSAYGETGPRTEVHDLLPPVTGIGDLRNPVVCRVLTELRKVVNLLVRRYGKPTQVRIELARDLRRAKKQRQAASKKIRANEQAREAARRRVLDETAVGQPGPDDLLKVLLAEECNWQCPFTGRRISMANLVGENPSFDIEHIIPFSRCLDDSYINKTLCYHEENRHRKGNRTPWEAYGSTPAWEEIVARVSRFKGDAAAVKVRRFQTPDEELESLQDFTNRQLSDTRYASRLAMDYLSLLHGGAVDATGRRRVQAGRGQVTRYVRQALGLNRILGDGPGKSRHDHRHHAVDAFAIALTDAKLVKRLSDAAVRAFERRGKRRHFEPIPDPWPGFFTDLCDSVDATVTSHRPHRRINGPLHKDTYYAKVETRDPQTGRTRTTYHVRKELRKLSKRDVDNIVDPAVRAIVKRELAARKLLPPKAFADRDNDPVILPRKPGARAIPIHRVRVRCAINPVAVGDPDVPRHVMTDTNHHLEVVAVLDDQGQETKWEGHLVSRLEALRRVRAKQPVVQRDHGPKRRFKLCLAPGDMIRLANSEGAPELAVVRSVSIESSGRTRVEFVDVNDARKGQDIKKAQAWYKPATNTLAKRRCRKVTASPLGELELAND

SEQ ID NO: 608 - protein, 1060 aa, unidentified
  REGION 1..1060: note = Description of Unknown: Cas Enzyme sequence
MAELTLGLDIGPNSIGWGLVDEEGHQVLAAGVRVFPEGVDRDQQGGEKSKCQTRRDARGIRRQIRRRAGRRRLLRQVLSEAGLLPADSNELNQLLAVDPYLLRRRAVEEKLELHELGRVFLHLGQRRGFLSNRKADKSDSKSKGIKAEISKLAAAIEQAGCATLGSYFAKLKDSFDPCRQTDGPHIRRRHTKRSMYEEEFEKIWAKQSEYYPHLLTDALKFGRQGKQSFPKKPEHCGKFSDPLTEYGIYGLMFFQRKMYWPKSVVGRCELEPKEKRCPRAARIAQRFRILQEVNNLRLLDRATRVERPLDSAEREKVLKLLLGSKEAGFDKIRKALNLPETVRFNFEQGGRKKLAGHLPDYTLGGKNCLGKRWKELTEEIKDRVVDILIEEDQESDAVRRLVNECGLTEDEARRAAAVNLPEGHLSFSRRAIEKLLPHLERGLFLMGNDASDSAIHAAGYLRPDQRVVNQRRFLPPAPTLTNPIVRQALVEVRKTVNALLRELVYKPGHRLTVIRVELAREAKKSFAEREQLRFEIAEREKTREEAREWIQTFNPQIKPTRATINRYLLWKEQDEFCPYCDGKISPEQLFSGEADVDHILPRWRSLDDSMTNQVVAHRRCNQEKGDRTPREWLEVSDPERYERVMQFAERHLSYGKQRKFAQKDIKLDHFVNRQLNDTAYISRCVAQYLQCLGAKIVCTRGDMTADVRYWWGLNSILQDDSSDRKKRDDHRHHAIDAIVVALTDSKRLFALANARGENMPPPWKGFREEVERLIRDINVSHRAQLRLHGALHEDTFYGATQKCRTAEPIALQDRPWAKNWIEDEGAYVRRKSLDKLEKTQDLDKIRDLAIREILRQHLRNQGIDPDKPGKISKGALTGVNTPRMPSGVPIRKVRMIERSETFCPVSPRRYYQYVKPGNNHHIVYRAVTSKDGRQKWTAEVVTMWEAARRAKAGLPLIDRSDRGNAKFVMSLSIGESFLIDSPGGGRLLCVVRKIDQRSKRVSYKLHTDARKATEIDKDNLSLGVAQMQARNAQKVLVDPLGRLRRADYKSSAISEAQPSA

SEQ ID NO: 609 - protein, 1021 aa, unidentified
  REGION 1..1021: note = Description of Unknown: Cas Enzyme sequence
MRIWGLDLGTTSIGFAVIEHDSARAVGRIERLGVRIFPEGVTEDKKEPRNKTRRAKRLMRRGLRRRKLRRRLLNEALAAAGFLPPYKDAAAWNVAMSLDPYSLRVKGLTEALKPYELGRAFYHLAKRRGFAGRGGDDDKRDPDEAKAREDAAKLQQEVGGKTLGEYLAQQDKKRGRHHTRSMIESEFNRLWDKQKAFHPALNDPQFAERIRNLIFFQRPTFWRLATLGRCPFVPCAPLAPKASWVAQRYLVLEQLTKLRIAGANQRPLLDDERAILLDLAHRQKSISWNGVRKALRSLWRDGGEPEDQAFNLEVSKAETGIKGNVVEYELRQIFGSAWDDHPKRDEIRRDLHRRLWTADYVQVGNARVEIRRPDQAAQERRNAAAAMVRDWGVTETQADALSRLELPSGWLRLSDAAVEAMLPELERGNGVGKLLESPEFAGWRERTFPNREQPTGEVCDRLPSHPRAMPAVRNPTVHRTLNELRKVVNNLIRAHGRPDSIRIELTRDLRESKNRRSERLSRNKKQEADRKKAVADLQAHGIANPGRDDIEKWLLWKESNERCPYTGDHIGFDALFREGKYQVEHIWPRSRSLDNGFGNKTLCRTDVNIAKGNRTPFEMYAHDAEAWNALKLRLADCKLPEYKVRRFVKDMISDAGSEEFAERQLADTGWAAREARDFLKRLWPDEGKAKSAPVETVNGRITAQLRHQWGLNAILNPEGQGKNRADHRHHAVDALVAALTTRGFVKRLADWHKIRETGVRPPQLDLPWNGLLKEAEAKISEVVVSHKTRRKVSGALHAETIMGDTRETERTKTGTYRLFVTSKPVERLSKSEIADIRDPKVREIVARHVAGRGGDPKKAFPPYPHLPMKDGQPGPEIRRVRLRIKQQIGLMVKAGTGFADPAANHHIAVYRTPDGEIKFKPISLHEAAQRVARREPVVARTLDGAKLIFSIAPGDTIEFPRGHKYAGLRSVTSVWSSGVVVTEACNDAQGEPWRPTIGSLISAGARKVSVDPIGRVRPARD

SEQ ID NO: 610 - protein, 1090 aa, unidentified
  REGION 1..1090: note = Description of Unknown: Cas Enzyme sequence
MKIIREKTPARSYVLGLDLGSTSIGWACVETRNGRPADVMATGVRLFDAGMSGDFQKAAEMSNAITRREKRLARRQIHRKAVRRWSVFKLLRDHNLLPHFGIQSLRELSPHVQQMDRELAERYGIKSDHISSQLLVYRIRAKAAKEAIPLHDLGRALMHLAKRRGFNSNLRGIPKKDEDEGLIKSSIKSLATELDSRSVTLGEYFSQSNPIQQRIRKRWTGREMFIREFDAIWATQSKYHPVLSEELYKKLRKAIFFQRPLRSAKGLVGKCSIITSKTRLMAAHPLPQEVRMLQFVNNVRITESGKTERQLSQAERDKAVSVLSNCGKLTIKQFRDLLGLPKKSKLNFDNDDDTHAYGMGTSSALRSILGKQWESLDEPKKELLIYDLSSFNKRDALLRHLDRKWGITGAEAEELSELTLEAGYSNHCREALQAIRHYLLNQDPESMRWLTYPEAKQKAFPQSRTMQTFERLPPVRNALRGITNPAVIRALTELRKVVNELIDRFGQPGSVRIELARELKKTKKERKKIEDLVREQAKNRSKAISRIRNDFTGYAEKSGYDRGIEMVLLAEECNWQCPYTGEAISSVKDLIGDNSRFDIEHIFPRRYLDNSFSNKTLCLHHENRNIKKDRLPAIAYQGSPDRFEEILARVRRFRGPAANKKLQRFMATEVPNDFVNRQLDETRYISRTAAEYVGLIFGGRIDENGRQRVFTVSGGLTAILRGQWKLNQILGMTAEKNRADHRHHAIDAIVIACTDSNAIQSLQNAAAIGWQHGDLKRIPSIDPPFSEILEASRRSVLSIIVSHRPNRKLNGPLHAETLYSVRRNLQGKYDTKSRRPLEKITAAQIDLIVDTRVKEIVKKKYEELLTKHKAPRMAGDLFTIENHPFIENSDGSRTPIHSVRIWEKAGDTDPKHRKITVNGVDRFVASTGGSNYCVRFYSILDRDGRVTGWKDRILSRFEAMKLFSRNNKKNVSDVVPKPEIHIDSTSSVKASGVDQFDESRFLFDLFINDFLVMKNKQGSPTLYRVLSLSAGDIEVRAHVDARKSEEVKKSKERVRIGPRAISKMEFRKVDVSPSGVVRDSITGEFFSFIN

SEQ ID NO: 611 - protein, 915 aa, unidentified
  REGION 1..915: note = Description of Unknown: Cas Enzyme sequence
LKYHDHSAVHHLPYLLRARALDHPLDPLELGRALYHLGQRRGFLSNRKAKAKDGDDEKGKVYGGIHQLRDEMSSTRTLGEFFSRLNPQESRIRQRYTHRSMFEHEFELIWAAQAPHHPVLTPELKDALTQILFTQRPLKDTADLVGNCEWEPTEKRAPLWSLDFQRFRLMQSVVHLRVQDPDGRIWSLNPDQRRQLVETLDTAKDLTFARARKLLDISPKARFTIEEGKETKFKGNTIGARLYELLGDLWLQMSDSLKNDLLSDIAAQKTDEDVQVMLESEWGLPPDRAEAIAEKFSLPQGYASLSLTAMRKAMPFLEQGLSVQEARMAAGYEIDPRVPVHDFLPPLKDSNLDIRNPAVSRTLTELRKVVNAIIRKWGKPAEIHLEVARELKKNRDQRMKDTTRMRERESLRDSIRQRIVSELGVPEDKIRRRDIELGLLYDECGGICPYTGESIGSFTSLFSGNARAQIEHIIPRSISLDDSFGNLTLCLTAENATKSNRTPYEAYHQQPERYQAILDRVKTFKGKAAGHKLARFKLETLDKQELLEQFSSRHLNDTRYASILAARYLALLFGGEIVDGKRRIIKSTGQITADLRNVWDMNSILNDGPRKTRDDHRHHAIDAAVIAVISQKYVTLLSEAAERATAERKRRYASIPPPWVGFKEAVAAAAQTINISFRADHRVTGPLHKETYYSKVGVSAAGGDVVRTRKPVHQLSADQVTSIVDPGVRAAVLAKLAIVKDPKKLENDWPELPNASGAPVKIKSVRIELNRAVRSLGKGHRQRFAEGSETHHVAVFEVTKGKRRVWDGEVVSMRDALERVSLGKSVIDRSETDGRGFLFSLAKNDTLLLTDRSGQRSGIWVVRKIKQRQITLVPQWDARLEGKRQEYSPTVGGLQALSTSKITVDPIGDLFPSHE

SEQ ID NO: 612 - protein, 1059 aa, unidentified
  REGION 1..1059: note = Description of Unknown: Cas Enzyme sequence
MALVLGLDLGARSVGWALLEKQGDNWTRIVRAGVRVFEAGTEGNIEQGRDQSRGATRRIARLARRQIRRRRQRARALYRELASAGLLPEVTPSPGSPLAVLIQQAINDLDEHLRQKYAQESAVSQLPYFLRARALDHRLEPHELGRVIYHLGQRRGFKSNRKAEAREKADGDPLKEQKDKSVVYREIEELKAQIQDTGARTLGEYLSRVDPAVERIRHRYTQRRMYEEEFEAIWEAQRPHHAALTRELKDRLWDILFKQRPLRATDDLVGECDWIPGEKRAPVWSMDYQRFRLLQAVNHLRVSENHSAPRPLSSEERLRLLDVLETQSKISFAQAKKILGLRKAEFTIEEGGEKNLPGNAVAAQFYEKLGQDWIRLKPEDRQALVECVAVAESDEQLLEALKQQWGLSEDQARRIVQEVSLPSGYARLSLKAIRAVMPYLEEGWDVQRARIEAGIPLHRPVELHDLLPPLADSGVAVYNPAVKRVLTEMRKVVNAIITHYGKPDEIHLETARELRKSREEREKDSKRMREHEKEREAIIRRICEEIGIPETRISRDDVRKAMLWEECNGMCPYSGRSLGGFASLFSGNSPAQIEHIIPFSRSLDNSFVNLTLAHVSENAYKGDKTPWEAYGANPEQWDRILQRVALFKGSYKKAKLNRFKMDSNAVGEFLEQFSSRALNDTRAAAVAAARYLALLFGGETVGGKLKILKITGQVTAHLRDAWDLNGLIPSIHRETRGEAADKEPKTPPLKSRDDHRHHAVDAVVVALCDQGSIHRLSEASKTAVAARRRLLAPMAPPWVGFREQLKDILKSMNISFRPDHRVTGALHKETFYTKLGQNQKGGDMVRLRVPVTSLSSKDIENIADPTVREIVRAKLEEVGGDAAKLEKNWPLLPNRNGNPVPIKKVRVNLNRAVVSVGKGRWQRWAEPSETHHIEIYEVTANGKTTWSGDVVTMRDAISRASRGELVVRRSREPNSRFLFSLAKEDMLRLQGDKSGIWVVKKIKSNTQIVLVPQHDARKEKEKDKSNGRETLNPTASGLRKYYAEKVVVLPIGDVVVCHE

SEQ ID NO: 613 - protein, 1057 aa, unidentified
  REGION 1..1057: note = Description of Unknown: Cas Enzyme sequence
MPYVLGLDIGARSVGWALLEKEGDSFTRILRAGVRVFEAGTEGDFEQGRDESRGATRRAKRLARRQIRRRRQRARALYRELSSAGLLPPITPMPGSPMAVLIQEAINRLDCELRRKYAGERAVNQLPYLLRARALDHRLEPHELGRALYHLGQRRGFKSNRKAESGKKAMEDSSKAGEEKSLVYRGIDDLKRQIREAGARTLGEYFATLDPAEQRIRNRYTHRSMYEEEFEAIWEAQRRHHAALTRELKDRLWQILFEQRPLRDTEDLVGECAWIPGEKRAPVWSLDYQRYRVLQTVNHLRVAENRSAPRPLTHEERWRLLEELEKKPKVTIAQAKKLLGLKKAEFTIEEGGEKELPGDKVAAQFYEKLGESWSRLNPEERRALVECVATAESDEQLSETLQQQWGLSADQANKVVREVHLPSGYAPLSLKAIRAVMPYLEQGMDVQRARLAAGIPLDRPVPVHALLPPVADSGVAVFNPAVKRALTEMRKVVNAIIRRYGKPDEIHLETARELRKSREERMKESRRMRDREKEREEIIRRIRDEVGIPEEKISRDDVLKGLLWQECEGRCPYCGESLGGFASLFGGNSPAQIEHIIPFSRSLDNSFVNLTLAHVSDNAYKGDRTPREAYGSDPERWDEILQRVEVFKGSYSKAKLNRFKMDESAVGELFEQFSSRALNDTRASAVAAARYLSLLYGGETVDGKRKILKVTGQVTAYLRDVWGLNGLIPSIHREARGEAEDRQAEARPVKSRDDHRHHAVDAVVVALCNQGWIQRLSEANRGALAARRRLFAPVEPPWVGFKEQLKDILKSMNISFRPDHRVTGALHKETFYTRIGKNEKGGDVVRVRVPVTGLGSKDVEAIADPAVRAIVRAKLEEVGGNAKKLENNWPLLPNRNGKPVPIKKVRVNLNRAVVSVGKGRWQRWAEPSETHHIEIYEVTSRGKTAWSGDVVTMRDAIGRASRGEPVVRRDGGPNSRFLFSLAKEDTLRLQGEKPGIWVVKKIRANTQIMLVPQYDARKEKDSSNGRESFSPTPGGLQKYSAEKVLVLPIGDVVRCNE

SEQ ID NO: 614 - protein, 1057 aa, unidentified
  REGION 1..1057: note = Description of Unknown: Cas Enzyme sequence
MALVLGLDIGARSVGWALLEKQGDEWKRIVRAGVRVFEAGTEGDIESGRDKSRGATRRIKRLARRQIRRRRQRARALYRALAEAGLLPGISPQPGSPMSLLIQQQINALDAQFRARYAAETGVHQLPYLLRARALDHPLEPFELGRVIYHLGQRRGFRSNRKAESRKAGAGDESKANEDRGKVYEGIDSLRTAMQQAGARTLGEYFSRLNPAEKRIRGRYTHRSMYEQEFDAIWTAQKAHHPALTREFKDRISDILFRQRPLQDKEEFVGECSWLPGEKRAPVWSLEFQRYRIWATLNHLRITGNRSAPRPLSPEERALLFTSLDAAEKLTIAQAKKALGLRRTAGFTLEEGGENHLPGNKVGAKFHAILGNRWTSLPPEKQNELVTVVARASTDEELEEALQRDWGLDGEMSRRIVREIVLPSGYALLSLRAIREVMPFLQQGYSVQEARQKAGIPLERQVPVHPLLPPLADSGVAVFNPAVKRTLTELRKVVNAIIRHYGKPDEIHIETARELRKSREERAEDSKRMRGREREREAVRDQIHKEIGIPLDQISREDVLKGLLYRECEGMCPYCGQSLGGFASLFGGNSPVQIEHIIPFSRSLDNSFVNLTLAHVSDNAEKGNRTPWEAYGHDPGKWEQILQRVGAFKGSYAKAKLNRFKMDEQAVADLLQQFSSRHLNDTRAAAVAAARYLALLYGGETVDGKRKILKPTGQVTAYLREVWGLNGLIPSIHREAAGAEESDDGRTIRKSRDDHRHHAIDAVAVALCDQGTIQMLSEANRGAAAARRRRFAPVPPPWVGFKDELRQVLRSMNISFRPDHRVTGALHKETLYKYVGRNERDGDVVRVRVPVHTLSVRELGQIVDPNVRVIVQAKLAEIGGDLKKLENNWPCLPNRNGAPVPIRTVRVDLNRAVVTVGTGFRQRWAEPSETHHIEIYEISENGRTVWTGDVVSMREAILRAARGEPVVRRSAGANGRFLFSLAKEDTIRLFGDRAGIWVVKKIKGNEQIILVPQHDARKEGSGAASRTEFAPTAGGLRRYSAEKVTTLPIGDVVPCHE

SEQ ID NO: 615 - protein, 1027 aa, unidentified
  REGION 1..1027: note = Description of Unknown: Cas Enzyme sequence
MNTKLPREAGENYILGIDLGSNSIGIALIETTYGKIIHTTARVFPAGMDGSEKDWEQGRESSNAAKRRTMRGQRRQTDRRRRRLRKLANLLRTFGWLPSGSDLEFQAAINQWDREHAEKYDVHGNLPYYLRAKALDEELSLMELGRALYHLAQRRGFQSNRKAGPAKDEKPGEVQKGIDEISQAMQADGSRTLGEYFSRLDPAVRRIRSRWTDRKMYRQEFEAIWRTQEKFHVGELSEERRSLIEAAIFFQRPLKSADHLVGWCELIPNQRRAPARNLAYQRFRYLSAFNNLRLYSPEHQERPIDFAEQAKILEELEISEKLTFAAIKKLLGVKQGYYFSIEEGGEKATPGNATAARIYAAVPAFWRGLSEPNKAELVEDLGERFEADEQLQTHLRTRWGLSEEEAGKLAKVNMPAGYGSLSEAAALRVLPGLQKGLPYSTLRKELFGETDRQPVQALLPPVVNAVREVRNPAVLRSLTELRKTVNAFLREFGKPDEVHVELARDLRRSKRERLEMADGNRKNEQKRNEAKESLKGCGMTDPKREDIEKYLMWMECGRVCPYSGEWISYNALFVSPQFEVEHIIPYSRSLDNSFVNKTLCRIVTNRLKGKRTPFEAFGHTDDWPAMVERVKRMNNRAKLARFTMEEQDTEKLLEDFSARQLTDTKYASRLAAKYLGCLYGGKSDEQGRQRVFTCAGAVTAILRRIWDMNRVLNDVPDKSRDDHRHHAVDAVAIALSSMKFVKAISDAAAQSQSRRPIRSAMLADPWEGFREELREAILERTEVSYRPVRKLAGALHEETYYSLAKKDGDKTSVHVRKAIAGLTAKELADVVDPAVKRAIVAKLAEPGMTLKKMEDDPPRMPSGVPIRRVRVRKAGNPVSIGEGARQRQVISGDNHHMEVVAELDEEGKPKRWRGEVVSRLEANLRKREKRLVVNRNHGETTQFCFSLSEGDLVQFEAIPGDLRTFKVRGVSTESGGRLGLSSHLDARTKDKIKDDGGLLRPSVNVFMKGKGRKIRLDHLGRVVAAND

SEQ ID NO: 616 - protein, 1060 aa, unidentified
  REGION 1..1060: note = Description of Unknown: Cas Enzyme sequence
MMTDGEELVLGIDLGTDSLGWALIARQDGEPQRLVRAGVRIFDSGMDETKGLGKEESRNLARREARLHRRQLGRKRRRLAKVFCLLQAWDLLRPGDMKTPDERQDHLNSLDREILDSSWFKTKQSMGRLPEPLQTLPYLLRAAALDEPLPPRYLGRAFYHLAQRRGFLSNRKAPPKKDEKPGEVQAGIGKLRSEMDRTGARTLGEYFSRLAPSEERIRGRWTARKMYEDEFGAIWNAQARHHPQILTPEREKHLRRTIFYQRPLKIKRGLIGMCELEPGQRRAPRYLLVSQRFRLLQAVNNLKVIPPGEPEKWLTPQDRARLAENLELRGDLKFDQARKLLGLTKDYAFNLERGGEKTIRGNRTASALNKVFGERWQQFTPAERESVVNYINGFQHPDKLAAAAQKKWELSAEAAGEFAKISLEGDYMNLSRRAMEKLLPRLEEGMAYAEARKLVSFERGEPRAALPPAGRSIQALRNPAVERSLTELRKVTSAILREYGKPAEIRVELARELKKSRLDREGIAKAMRENEAARKKAAQRILGETGIINPSRDDIRRVLLADECKWECPYTGKPISMRGILGHEPQFDIEHIIPFSRSLDDSFANLTLCDQQENRDVKKNKTPHEAYSSDPLRYQQILDRVGRFNGDRRRVARKLERFKMDDAKLEEMLQKFSARRLTDTAYATKLAAQYLGLLYGGNADAEHRQRIFVSSGGVTADLRAAWKLNAILKDGPSTDGGWKPKERTDHRHHAVDAVVIALTNQATVKRLADAAERAPREGRRRFASMESPWPDFADSVRAEIDSLVVSHRVSRKVSGALHEETIYSPPIPLPGNNGKSERRVRKPLAAFTKSDLEAIADEAVAQLVRQKLEELGGDLKKFSDEKNLPAFVTEKGLRIPIRKVRIRKALSTFQLGEGRAARHVVNESNHHLEIYAEIKPDGSEGKWDGEVVPMWEAYKRKQEKEPIVQRDHGPLARFKFSLAPGEMIECELKPGEKGLFIVRSVSQFATGQIQTGVVPITDARKKKDIISARDFLRPGPDTLRQWHTRKVSIRPLGEVTEAHD

SEQ ID NO: 617 - protein, 1069 aa, unidentified
  REGION 1..1069: note = Description of Unknown: Cas Enzyme sequence
VSEHLDYVLGIDLGSNSLGWAIIELIDGEPAQVVRTGVRVFDAGMEGDVESGREESRNLKRREARLHRRLLWRRQRRLTKLFNLLQRLELLPPAPNNSEHSLDGHRRPTTPEQRQDLLNQLDSKILSSPWFRAKANSGAFPEPEHTMPYILRASALDEPLEPHLLGRALYHLAQRRGFLSNRKQAAKKNDDEGAVKEGIAELRRAMEASGARTLGEHFARLNPSVERIRCRWTARDMYEKEFDAIWEAQAPQHPDLLTPERKKQIHDAIFFQRPLWFDPDTVGNCELEPGEKRAPAYLLISQKFRLLQTVNNLRVLPPDDVDMPLTSADRKKLIDELETKGDLTFKEISKLLKLEKGYKFNLESGGEKRIKGNRTNADFYAAFGERWLAMSPGERDRVVEYVNAFQKPEKLKAAARRKFNLTEEQAEKLADISLESDYMNLSRKAIEKFVPLLEEGVTYGEARKRLYRDSFAAREPVPLLPPVEMALAEIRNPAVKRSLTELRKVVNALVRLYGKPSYVHLELARDLKKSKKQRQTISENHRRNESARARAAEAIIRADVGIREPRPDDIRKVLLAEECHWTCPYTGKSISMRSLLGPEPQFDIEHIIPFSRSMDNSFQNLTLCYVPENRNVKGNRTPWQAYHGDPDRYEAILDRVRKFAGDRQTVALKLKRFMMSDDQLENFLEDFRNRQLNDTAYATALAAKYLGLLYGGVNDADGRRRVQATSGQATAYFRSLWKLNSVLNDGPTTDGGAVPKSRDDHRHHAVDAVVIGLTDAAMIKRLSDAAQRAPLEHRRRFASLEAPWPNFVDSVRAEIEKIIVSHRVSKKVSGALHEETIYSRPMGEDGEVRVRKPLASLTKQEVEKIADAGVRKLVQQKLEELGGVEPKKAFSNPENLPRFPESGVVIRNVRISKALPVFALGDGRRARHVTSESNHHVEIYAELDEHGNEGKWGGEVVSMAEAYQRLKAGKPVVQRDHGPLVKFKFSLSPGEVIECDDDNEGKRLLVVRSVSQFATGQIQIGLAPVNDARKKADMIKSKSFIRVVPNSLAEWHARKVAISPIGDIAEARD

SEQ ID NO: 618 - protein, 1103 aa, unidentified
  REGION 1..1103: note = Description of Unknown: Cas Enzyme sequence
MDTQPSRDYVLGIDLGSNSLGWAMIGLEDGQPAKLLRAGVRVFEAGMEGNIESGQEESRNLKRREARLHRRQLWRRARRLKKVFRLLQTYGLLPAVPPPFRAAPAFVALAFRPADGGLKPTATPDQRQDFLNELDRQILTSAWFAAKKASGVYPEPEQTLPYILRSAALDERLEPHLLGRALYHLAQRRGFLSTRKQARAAKKKEEEGVVKQGISDLRRKMEEAKARTLGDYFSRIPPSEERIRGRWTARAMYEEEFQQIWNAQAKFHGELPTDERKKLLFQAIFYQRPLKDQPELIGHCELEPEERRAAAYLVTSQRFRLLQTVNNLTILPPGEPEKKLTPADRAKLIEALELHGDQTFPHIRKLLGLTRNYGFNLERGGEKSIKGNRTNSDFYAVFGERWSRMSPEERQRAILDVRSIQKPETLLRRAREYWKLDEEAAQRFCDISLEPDYLNLSRRAMEKLLPLLEDGITYGEARRLLYPERFQAVEPLPLLPPVQDALTEIRNPAVTRCLTELRKVTNAIVRQYGKPGEIHIELTRDLKQPKKRRQDRADRMRANEKARKAAAKRIVEEAGISDPSPDDIRKVLLAEECRWECPYTGKSISMRKLVGPESEFQIEHIIPFIRSLDNSFLNLTLCHVEENKVKANKTPYEAYSGDPERYERILERVKRFQGDKGIVAQKLHRFLMTPEQVEEFLAGFTARQLTDTAYASRLAADYLGLLYGGVVDQAHVRRVQATSGQVTAYLRNLWLLNTILRDGETTHGGYATKPRDDHRHHAVDAVAIALTDAGTVKQLSDAAQRAPLERRRRFASLQAPWPDFVDSVRQEINRIVVSHRVSKKVSGALHEETIYSAPVAAGGTCPDLIGSPPGATLKGGATDVRHVRKPLASLTKTEIEDIVDPGVRQRVLDKLEELGGDIKKFTKEENLPFLLAKDGRRIPIKRVRLRKKTPTVTLGEGRRAREVTPGSNHHIEIFAELDEHGEEVEWDGQVVSMFEAHQRMKAGQPIVQKDQGPDHLFKFSLAQGEVVECDDKQQGRSLFVFRKVTQFTAGGIQIGFAPLNDARKAREIQVSRAWLWATPNTVGERHARKVAVSPLGEVSEAHD

SEQ ID NO: 619 - protein, 1111 aa, unidentified
  REGION 1..1111: note = Description of Unknown: Cas Enzyme sequence
MPEQPPQDFILGIDLGSNSLGWALIERANGGPAGLLRAGVRIFEAATEGDRESGQEESRNRARREARSHRRQLWRRARRLRKLFHLLQSYGLLPAGVATERERQDLLNELDRSILASSWFRAKADSGLFPEPSQALPYILRAAALDEPLEPHFLGRALYHLAQRRGFLSNRLKPAKKDDDEGVVKQGISELRQKMADANAHTLGEYLAHLSPSEQRLRGRWTHRDMYQHEFEKIWDAQAKHHPALLTDERKKPLFQAIFFQRPLKFDPAVIGKCELEPDCQRAPAYLLVSQRFRLLQTVNNLKVLPPGEAERDLAPEEHAKLIEALELQGDLHFQKDRKSNGKTLPSVRKLLDLRKGCAFNLERGGEKSLKGNRTFADFYAVFGQRWLDMPPQERDAAVEYVYAFEKLDKLKEAAKKRWSLDQAAAEKLAETSLEPDYMNLSRRAMEKLLPLLEQGVTYAKARQQLYPEKFQARGELPSLPPVEAASDPAKLQEWVKRAKALPPGAQFPDPISGIRNPAVMRSLTELRKVVNAIVRQHGKPSEIHIELARDLRKPKWQRQEASDRMRANEKGRKAAAKRIPDETEIKDPKPDDIRKVLLAEECGWQCPYTGRTISMRKLVGPESEFQIEHIIPFSRSLDNTFVNLTLCYVEENKTKSNRTPYEAYSGDSDRYAAILGRVKKFIASRGMVAEKLKRFQMTPEQVEGMLGDFSERQLRDTAYASKLASRYLGLLYGGLSDAEHQRRIQATPGRVTAFLRNEWGLNAILRDGSTDKGGAVPKERTDHRHHAVDAVAIALTSPGTVKQLSDAAQRAPIEHRRRFASLQAPWPDFVDSVRDVINSIIVSHRVSKKVSGALHEETIYSQPTAVAPVSSPAKKTRRSETATIEGTEVRVRRPLEKLTKSEVQDIADDRVKQMVTEKLGDGDPKKVFSNKDNLPFFETTDGRRIPIKRVRLNKAVPTFALGEGRTERHVTSESNHHLEIFAELDENGNELEWDGVVVSMAEAYLRLRLHQPVVQRDFGPHRQFKFSIGQGEVLECDDPGGNRRVLVVRGVWPQVKGSPRLAAVAINEARKKQDIISSKQFLSPVVNTLMKWHARKMVVSPLGEVSEAHD

SEQ ID NO: 620 - protein, 1079 aa, unidentified
  REGION 1..1079: note = Description of Unknown: Cas Enzyme sequence
METRPSPDYVLGIDLGSNSLGWAMIGLEDGQPAKVLRAGVRVFEAGMEGDIESGQEESRNLKRREARLHRRQLWRRARRLRRVFNLLQRFGLLPPGEGSLPEKRQDFLNELDKTILSSPWFAAKKISGVYPEVEQTLPYILRSAALDERLEPHFLGRALYHLAQRRGFLSTRKKAKAAKEEEEGVVKQGISELRQKMAQASARTLGDYFSRIPPSEERIRGRWTSRAMYEEEFQQIWNAQGKFHGELPTDERKKLLFQAIFYQRPLKDQPELIGHCELEPEERRAAAYLVTSQRFRLLQTVNNLTILPPGEPEKKLTPADRAKLIEALELHGDQTFPHIRKLLGLTRNYGFNLERGGEKSIKGNRTNADFYAVFGERWSRMSPEERQRAILDVRSIQKPETLLRRAREYWKLDEEAAQRFCDISLEPDYLNLSRRAMEKLLPLLEDSITYGEARRLLYPERFQAVEPLPLLPPVQDALTEIRNPAVTRCLTELRKVTNAIVRQYGKPAEIHIELTRDLKQPKKRRQDRADQMRANEKARKAAAKRIVEEAGISDPSPDDIRKVLLAEECRWECPYTGKSISMRGLMGHDSQFQIEHIIPFTRSLDNSFLNLTLCHVEENKVKANKTPHEAYSGDPERNERILERVKRFQGDKGAIAQKVRRFVMTPEQVEEFLAGFTARQLTDTAYASRLAADYLGLLYGGVVDQAHARRVQATSGQVTAYLRNLWLLNTILRDGETTHGGYATKPRDDHRHHAVDAVAIALTDAGTVKQLSDAAQRAPLERRRRFASLQSPWPDFVDSVRQEISRIIVSHRVSKKVSGALHEETIYSAPVAAGGTCPDLIGSPPGAALKGGATDVRHVRKPLASLTKTEVEDIVDPGVRQRVQDRLEELGGDIKKFAKSENLPFLLAKDGRRIPIKRVRLRKKTPTVTLGEGRRAREVTPGSNHHIEIFAELDEHGEEVEWDGQVVCMFEAHQRMKAGQPIVQKDHGPHHLFKFSLAQGEVVECDDKQQGRSLFVFRKVTQFTVGGIQIGFAPLNDARKAREMQVSRAWLWTTPNTLGERHTRKVLVSPLGEVSEAHD

SEQ ID NO: 621 - protein, 1088 aa, unidentified
  REGION 1..1088: note = Description of Unknown: Cas Enzyme sequence
VPEEAQGEFILGIDLGTNSIGWAVIGLVDGEPTKLIRAGVRVFEAGMDGDLESGREESRNRARRDARLRRRQLWRHRRRLIKVAHILQRAGLLPEGNAGDPEAHQNFFNCLDSEILASDWFASKEKSGAYPEPRHVMPYILRASALDGGIEPHLLGRAIYHLGQRRGFQSNRLKPAKKDDDEGVVKEGIGELRRKIQEAGARTLGEYFSGLSPSEERIRSRWTARDMYEKEFDAIWSAQAGHRPGLLTEGRRKELRKAIFFQRPLWFDPNSIGTCELEPACRRALAYLLVSQRFRLLQTVNNLRILPPGEPERSLTPKDREKLTEALELRGDLTFIQIRKLLGLTKEYTFTLERGGEKRLRGNRTNADFCEVFGERWLGMSAEERDGAVEYVHAFQKPEKLPEAAKKKWGLDDKAAEKLPAISLEADYMSLSRRAMEKLLPLLEAGVTYGEARRQLYPELFQASEPKPLLPPVELALAEIRNPAVTRSLTELRKVVNSIVRIYGMPAQIRIELARDLKRSKKDRQSLTQRNRDNEEAGERMKKKILQEASLATRSRTDIRKALLHEECGGICPYTGKPIDFRHLFGPESQFDIEHIIPYERCFDNSFSNLTLCHNEENRHVKGKRTPWEAYHADEARFEEILDRVKRFHSPSARSKLWRFQMTETEATEFVSKFVSRQLNDTRYASRLAARYVAMLYGGLSDDEHSRRVQVTSGEVTAQLRRSWLLNQILNDGPTAGGGEVPKRRDDHRHHAVDAVAIALTDDSTIQQLSRAAERARHQGQRKLGNLEGPWPNFVDSVRQAIRDEVTQDGVFKRAVVSHRVSKKVSGALHEETTYSRPFPVAAMSSSPKSDRRSETVAREVRVRKPLASLSRTEVGDIADPKVKELVVKKLQELGGDPKKFPPPGSRENLDRFPCFVAQDGRRIPIKRVRVNKAVPTFPLGEGKTIRHVTPESNHHVEIYSVRDKKGRERWDGEVVSMHESYERVKNRKSLVEKNHGPLAEFKFSLAPGEAVECASGKGGRGLFVMRKVSQLSKGGITIGLAPVNDARQAREMQTSRAWLWSTPDRLRERSARKVGISPLGEVSESHE

SEQ ID NO: 622 - protein, 1008 aa, unidentified
  REGION 1..1008: note = Description of Unknown: Cas Enzyme sequence
MKGGSSCRIPQLTHISDFNFGIGVNLLQRFDLLPPAPSISEHLPNGHRRPITPEQRQDLLNQLDRRILSSAWFQTKVNSGAFPEPEHTMPYILRAAALDEPLEPHMFGRALYHLGQRRGFLSNRKQAPKKNDDEGAVKEGIAELRKAMQTSGARTLGEYFSRLNPSTERIRRRWTSRDMYEKEFNAIWDAQAPHHADLLTPERKKQIYDTIFFQRPLWLDPGTVGNCELEPGEKRAPAYLLVSQRFRLLQTVNHLRVLPPDDVDMPLTPTDRKKLVDALETKGDLTFKEISKLLKLEKGYKFNLESGGEKRIKGNRTNAAFYAAFGERWLAMSPEERDRAVEYVHSFQKAEKLKDAARRKYDLTEEQAEQLAGISLEADYMNLSRKAIEKFLPLLEEGVTYGEARKKLYPESFEAREAMPMLPPVETALAQIRNPAVMRSLTELRKVVNALVRRYGKPSCVHLELARDLKKSKKQRQAISENNRRNESARAKAAEAIIKADVGISAPSPDDIRKVLLAEECHWTCPYTGRSISMRSLLGPEPQFDIEHIVPFSRSMDNSFQNLTLCYVPENRSVKGNRTPWQAYHGDPKRYQAVLDRVRKLAGDRQTVAAKLRRFTMTDDELEGFLEDFRNRQLNDTAYATSLAAKYLGLLYGGVNDADGRKRVQATSGQATAYFRSLWKLNSILNDGPTSDGGAVPKSRDDHRHHAVDAVVIGLTDAAMIKRLSDAAQRAPLEHRRRFASLEAPWPNFVDSVRTEIDRIIVSHRVSKKVSGALHEETFYSAPRADGTVHVRRSISANVRSTRQISKSELDDIVDDRVREAVKAKLDELGGDLKKFADERNLPCLLTRNGSRVPIRKARIRRARPVFSLDRVRHVSTDSNHHVELIATLDAHGNEAEWQGRVVPMRDAYLRVRLHAPVIDRTCDPSEEYKFSLCPGEVIECWRGDGPELLVYKGVSQYTAGQVVISLLPLNEAGKNPKLIRVVPNRLRQWHARKVVVSPIGEVTEAHD

SEQ ID NO: 623 - protein, 1069 aa, unidentified
  REGION 1..1069: note = Description of Unknown: Cas Enzyme sequence
VSEHLDYVLGIDLGSNSLGWAVIGLIDGEPAQLVRAGVRVFDAGMEGDLESGREESRNLKRREARLHRRLLWRRQRRLTKLFNLLQRFDLLPPAPSISEHLPNGHRRPITPEQRQDLLNQLDRRILSSAWFQTKVNSGAFPEPEHTMPYILRAAALDEPLEPHMFGRALYHLGQRRGFLSNRKQAPKKNDDEGAVKEGIAELRKAMQTSGARTLGEYFSRLNPSTERIRCRWTARDMYEKEFNAIWDAQAPHHADLLTPERKKQIYDAIFFQRPLWLDPGTVGNCELEPGEKRAPAYLLVSQRFRLLQTVNNLRVLPPDDVDMPLTPTDRKKLVDALEMKGDLTFKEISKLLKLEKGYKFNLESGGEKRIKGNRTNADFYAVFGERWLAMSPEERDRAVEYVHSFQKAEKLKDAARKKYDLTEEQAEQLAGISLEADYINLSRKAIEKFLPLLEEGVTYGEARKKLYPESFEAREAMPLLPPVETALAQIRNPAVMRSLTELRKVVNALVRRYGKPSCVHLELARDLKKSKKQRQAISENNRRNESARAKAAEAIIKADVGISAPSPDDIRKVLLAEECHWTCPYTGRSISMRSLLGPEPQFDIEHIVPFSRSMDNSFQNLTLCYVPENRSVKGNRTPWQAYHGDPERYQAILDRVRKFAGDRQTVAAKLRRFTMTDDELEGFLEDFRNRQLNDTAYATSLAAKYLGLLYGGVNDADGRKRVQATSGQATAYFRSLWKLNSILNDGPTSDGGAVPKSRDDHRHHAVDAVVIGLTDAAMIKRLSDAAQRAQLEHRRRFASLEAPWPNFVDSVRTEIDRIIVSHRVSKKVSGALHEETIYSRPMGKDGEVRVRKPLDSLSRPEVEKIADEGVRKLVQQKLEQLGGIEPKKAFPNPENLPRFPSSGVVIKNVRITKPLPIFTLSEGRRARHVTSESNHHVEIYAELDEHGNEKKWGGEVVSMAEAYQRLKTGKPIVQRDHGPLVKFKFSLAPGEVVECEGKDGMRGLFVMRKASQLTSGQLQIGFAPLADARKAREIQTSRAWLWASPNTLGERNPRKVVVSPIGEVTETHD

SEQ ID NO: 624 - protein, 1128 aa, unidentified
  REGION 1..1128: note = Description of Unknown: Cas Enzyme sequence
MPDGAPLDYVLGIDLGSNSLGWAMIRLVDGEPAGLIRAGVRVFEAGMEGDLESGQEESRNLKRRQMRLQRRQTWRRGRRLRKIFNLLQRFGLLPPGDASTAEKRQDLINELDKTIRASDWFKTKVACGKFPEPEQTLPYILRASALDERLEPHFFGRALYHLAQRRGFLSNRLRPAKAGEEDEGKVKGTIKALRGQMQQRGCSTLGQLLSQLSPTEKRIRGPEAWTARDMYESEFDLICEAQASHPPEALNEEHTAKLRDAVFHQRPLRFDPNVIGKCELEPDERRAPAYLLPAQRFRLLQTVNNLRLLPPGEIEKPLTPADRQKLTAALDVKRELKFSEIRKLLGLPRDYVFKGEAEGEKRVIGNRTSASFYEVLGERWLTMSSAERDRLIEIVHSLPRAEDLIPVLRADWGFDDDAAERLSDISLEPDYANLSRKAMERLLPRLEQGESFMEARKGEYPESFKASLPLPSLPPLASEEVERRVGTVRNPTVTRCLSELRRVINAIVRSYGKPTQVRIELARQIKKPKKQRQAISKRNQENEAARDRAKVRIKEITGDEHPSRDDIRRVQLSDDSCKQCVYCGESIAARNFLGRESQVDVDHIIPFSRSLDDSYMNLVICHSGCNRAKGDHTPHEAFSGNAELYSQILDRVKRLAGDRRTVAEKLRRFRMNQEELSSFLDDFRNRQLNDTAYAAKLATRYVSLLYGGIADAAHEQRVFAPSGQTTSYFRSLWKLNSVLNDGPTKDGGLVPKSRDDHRHHAVDAVVIGLTDPGMVKRLSDAAERAPSAGRRRFASLEGPWPNFTDSVRAEIEKIVVSHRVSKKVSGALHEETIYSRPMNATAASPSVGPTLGSAGVAPGFSPAGADPSPLSGQALKVGATVAAISDRRRRPKKNGGGDTAATIVHVRKSLANITRQEIKDIVEPSVRKLVQAKLGSLGNGDPKRLFSVEANLPCFETKDGRRIPIKRVRVSKAVPVFPIGGGRSVRHVASDSNHHVEIYARLDDRGNEVEWGGDVVTMYEAFQRVKAHRPIVEQDHGSLVNFKFSLAPGEVIECDGKGDGRGLFVMRKASQLSAGQLSIGFAPLRDARKAREIQESKAWLWANPDTLRQRNPRKVVISPLGEVNEAHD

SEQ ID NO: 625 - protein, 1068 aa, unidentified
  REGION 1..1068: note = Description of Unknown: Cas Enzyme sequence
MKNDSLEDWILGIDLGTNSLGWAVIGTKEGVPERLIRAGARVFESAMEGNSEAGKEESRNRARREARLARRQHWRRARRLHKTFNLLQRFGLLATGASETPQDRQDSINRLDRSILTSEWFSIVKDSAAYPEPMQVLPYILRARSLDERLEPHAFGRALYHLAQRRGFLSNRKQERAAKKEDEGPVKKSIGELEGEIEKTGARTLGEFFGRLSPTEKRIRTRYTARKMYKDEFNKMWEAQAAHHPTLLTPERKKLLFQTVFHQRPLKFDPDVIGRCELERDERRAPAYLLVSQRFRLLDRANNLEVIPPGETSRPLTVADRAKLIQELELKGDLSFKKIRELLGLPKNYHFNLEEGGEEKLPGNRTAAQFYGALCQRWLDMPPDERDRMVEYVHGFEKPEKLEEAARKKWGLDGASAEKFADVSLEPDYLNLSRRAIEKVLPLLEEGVRFATARKQVYPRSFEVLKAVDFLPPVMDSLDIRNPGVMRSLTELRKVANAIIREYGKPAEIRIELARELKKPKKVREATFKKNRENQKSRIAAAKRVEKEVGLSNPSRDDIRKVQLAEECGWLCPYTGQPISMRTLLSEPQFDIEHIIPFSRSLDDSFVNVTLCAIEENRNRKGNKTPYETYRGEPARYEEILERVTRFSGKGGAATEKLRRFKMTPDEVEARLTDFTARQLGDTAYASRLAAQYLGLLYGGTVDAKGTRRVQATSGQVTAFLRNEWKLNGILQDGPTSKGGSRVKSRDDHRHHAVDAVAIGLTSAGTIKMLSDAAQRAHQERRRRFGSVQSPWVNFVDTVREEVESIVVSHRVSRRVSGPFHKETNYALCDLNALRNSKEARLPRTRKLLKAMNAAEVERIADESVKRLVIEKLKSLGVNDPEQAFSNALNLPHVPNRNGPPVPIKKVRVKDQVKTVVLGEGRARRFVRPESNHHLEIYAEVGPKSEEKKWGGEVVTMHEAYQRLRQSMPIIQRNYGPLAVFKFSIASGETLECDDGPGKRSLFIVRSISKEGKTESIKVEMIRINDARLKAEVKKAGRWTTKSPNMLFQMKALKKVVSPVGGVSEARD

SEQ ID NO: 626 - protein, 1071 aa, unidentified
  REGION 1..1071: note = Description of Unknown: Cas Enzyme sequence
MAEQPCGEYVLGIDLGTNSVGWAIIGLVNGEPTKLLRAGVRVFEAGMEGDIESGQEQSRNLKRREARLHRRQLWRRARRLTKTFNLLLQFGLLPQGDASAPEKRQDLINKLDQDIRVSEWFKAKAKSSAYPEPEQTLPYILRSAALDEPLEPHFLGRALYHLAQRRGFLSGRLRPAKADEDEGKVKGAITTLRAQIAERGSRTLGDFLSRLSPTERRIRGPEAWTARSMYEEEFERIWTAQAQHHPSLLDEQRRKKIRQALFFQRPLWFDPGTVGQCELEPGERRAPGYLLTAQRFRLLQKVNDLQIEEPDRAPRYLTPEERAKLSDALELQGDLPFHKDRKAEGRVLPSVRTLLGLPKNVSFNLQRGGEERMQGNRTTSEFYAVFGERWLDMSAEEHKQAILDVLSIHKPEALRRRALGHWKLGAEAADRFCEISLEPDYMNLSRKAMENLLPVLEQGIPLQTARKQCYPESFRASEPKPLLPPVERSLTEIRNPAVMRSLTELRKVVNGVIRSYGKPTYIRIELARDLKKSRKQRAAVSEVNRRNEKARAKAAEELVKGGVGIKEPKREDIRRYQLAEECHWQCPYTGKTISVQALFGPESQFDIEHIIPFSRSMDNSFQNLTLCHVPENRSAKGNKTPHEAYSGHPDRYQAVLERVRRFTGERAMVSAKLRRFTMDEDELQEFLADFRNRQLNDTAYASALATRYVGLLYGGLADAEHHQRVFAPSGQTTAYFRNLWKLNAILNDGPSRDGGRAEKSRGDHRHHAVDAVVIGLTDAGMVKRLSDAAQGAFSAGRKRFAPLEGPWPNFVETVREALDQVVVSHRVSKKISGALHEETIYSSPLSDNSVRVRKPLGALTKNEVGDIVDDGVKALVVAKLGSGDPRKVFAAAENLPCFETTDGRRVPIKRVRIKKAVPTFPLGAGRAARHVASETNHHLEIFAELDEDGNELEWRGDVVNTATAFQRTTQGSPVVRRDHGMSRRFKYSLSPGEAVRCENGPHTSGLLVARAISQYSDGSIVVDLVSAADARLKREVVKSGQWLRVVPNTLRKWNARKVVISPLGEVSEAHD

SEQ ID NO: 627 - protein, 1085 aa, unidentified
  REGION 1..1085: note = Description of Unknown: Cas Enzyme sequence
VYNSAVSEYVKEENMAEQPCGEYVLGIDLGTNSVGWAIIGLVDGEPTKLLRAGVRVFEAGMEGDIESGQEQSRNLKRREARLHRRQLWRRARRMTKTFNLLRQFGLLPEGDASTPEKRQDFINKLDQDIRASEWFKARAKSGAYPEPEQTLPYILRSAALDEPLEPHFLGRALYHLAQRRGFLSGRLRPAKTGEEEGKVKGAIKTLRAQMAEKGSRTLGDFLSHLSPTERRIRGPEAWTARSMYEEEFERIWTAQAQHHPSLLDEQRQKKIRQALFFQRPLWFDPDTVGQCELEPGERRAPAYLLTAQRFRLLQKVNDLQIEEPDRAPRYLTPEERAKLSDALELQGDLPFHKDRKVEGRVLPSVRTLLGLPNKVLFNLQRGGEERMQGNRTTSEFYAVFGERWLDMSAEEHKYAILDVLSIHKPEALRRRAMGHWKLSAEAADRFCEISLEPDYMNLSRKALENLLLVLEQGIPLQTARKQLYPESFKASEPKPLLPPVEQSLTEIRNPAVMRSLTEFRKVVNGLIRSYGKPAYIRIELARDLKKSKKQRTAVSEINRRNEKARAKAAEDIVKGGVGIREPKREDIRKYQLAEECHWQCPYTGKTISVQALFGPEPQFDIEHIIPFSRSMDNAFQNLTLCYVPENRSAKGNKTPHEAYSSHPERYQAILDRVKRFTGEHAMVSAKLRRFTMAEDELQEFLADFRNRQLNDTAYASTLATRYVGLLYGGPADAEHRQRVFAPSGQTTAYFRNLWKLNGILNDGPSRDGGRIEKSRDDHRHHAVDAVVIGLTDTGMVKRLSDAAQRAPSAGHKRFAALEGPWPNFVETVREAIRQIIVSHRISKKVSGALHEETVYSPPQADGSVRVRKPLAALTKHEVESIADDRVKALVVSKLAGGEPKKVFATEENLPHFETSDARRIPIKRVRIKKAVPTFSLGGGRTTRHVATESNHHIEIFAELDQQGKEREWDGIVVPMHEAWRRLRAGEPVVNRDAGPGRLYKFSLAQGEVVECDGKHEGRSLFVFRKVTQFTKGGIQIGFAPLNDARKAREMQVARAWLWTTPNTLGDRHARKMTVNPLGEVTEAHD

SEQ ID NO: 628 - protein, 1073 aa, unidentified
  REGION 1..1073: note = Description of Unknown: Cas Enzyme sequence
MPAPLSSQDYILGIDLGVGSVGWAIVGTKDAQPSALVRAGVRVFAPAVEGNIESGREESRNVARRSARLQRRQTWRRSRRNLRVFRLLQTWGLLPVGASKTSQERHDLLDLLDLRILGSDWFQRKRIDNSIPEPMQVLPYLLRASALDEPLEPHFLGRALYHLAQRRGFLSNRKVSSRSKADDDSGLVKPAIADLRKQMLETGSRTLGEFFSRTSPSQARIRSRWTGRDMYEGEFTFIWDSQTVHHPTILTPERKKLLHKAIFFQRPLSSARHLIGTCELEPKHRRAPRSLLVSQRFRLLQRVNDLQIVLPGQPTRDLAPEERADVLNSLERKGDLTFPAIRKLLHLPKEAKFNLEAAGETRILGNRTNAFFLRLFGDRWDKMPSEERDQIVDYVRSFQRLDKLPTAAAKKWGLSEESAQILESDPLEPDYLNLSKAAMCKLLPLMEEGVPYAEARRQVYPQRFVSQAPQELLPPVFLAEASVGRIRNPSVVRSLTELRKVVNAVVRKFGKPKQIRIELARDLRNSRAQRERMAKSNRENEKLRADAAKRILKEIGNPGPSRRDLQKAQLWDECHGECPYTGKVISFASLFGPEPQFDIEHIIPFSRSLDNSFTNLTLCHAEHNRNVKQNRAPSEAYGSDPDTYQAILNRVRKFSSRSATEKLRRFLMTPEEIQNFVSDFAESQLNDTRYASRLASDYLGLLYGGRVDADHKLRIRATVGRITAILRDEWKLNAILNDGSTSQGGLTLKSRDDHRHHAIDAIVTALTDEGTIQTLSRAAENAYLAKRRRFAPIEEPWQGFFEDVRNEISRIVVSHRTSGRVRGPLHEQTLYSHPIPVAAGASGQKKPGKPGFEHRVRKPLESMTTEEAANIGDPVVRSLVAEKLAQFGGAVPKTVFSVPANLPVFQASDGRRIPIRRVRVRKPLTATVLGSGPSTRYVVPESNHHAEIFAELDQKGKEIEWDIFIVSLAEAIRRKHSRESVVSKNHGAQETFKFSVAPGDVIEMDVASGRRQYFVVRGTSYPSVSLAPIADARQKKELVKDHAYLRMVPNSLRKKNARKIHVTPLGDVEEAHD

SEQ ID NO: 629 - protein, 1057 aa, unidentified
  REGION 1..1057: note = Description of Unknown: Cas Enzyme sequence
MEGKMCVGLDLGINNVGWCALRRSDNGVEILGMGTFVFDSPLEDENKPSEGLASRRRGMFRRARRTARRRHQRKMRLYGTLAEYGFLPPKLRDRVTLFCRNLDPDSNRRIDPYTLRSQALVRALTPYELGRVLCHLNQRRGFISPRDLMAQGAFKTREELDAQADEEMRGMKEEIKRTREAMAGFPTIGAFLAARQARREPVRKKKLRGASVSQQKAIDEQRYVRADRHMIQQEFEAIIAAQKHHHPILTDSLVDKIRRQIFDQRILATDHRVRGRCIFFPDEWRIPRASMTAQKFVIAQEVAHLEISDDLHQPYRKLRPEERKVLVDRLLLGQDLTWTEAKSLLGHGVLARFSLEPEPGKKRGKAAGTKDALRGSVTAKKMYEILGPKWDALGDAARRELVGEIVSIRDWLRDMKDGAPPAAIRRRILFLRKAYGPAQVRFTEQEANDLATVDLPDGYLNVSLRAIKKILPGLLEDCVYSEACARANLNHTSPDTPAVSGPILRYPTEQEIGHALVRTSVRSAIRVLRSIVGEWGLPDSICIELPRDLAVGAQQREEISKRQDENEKERMSIAKELLANGYPASPTNIKKVRLWRELGGLGLPYEPDRVVSDLRDLIEGDYEIDHIVPRSHSFDNGMANLTLCTREFNTQVKGNRTPYEALATRDPEAWNRIVAHVRGLKAMPVNKRNRILAKERPEDFTGRHLAATGYISRQVLAIAQRITRRPEDVVVTPGRATSDLRRFWELGHLVPLHPEEEAAIREEREREEQVEKGLLKPEDLPAKRSSGKQRSNYKHHALDALVVALTDRASLQALTRYYQLEETGSPLLAEKAGRKLERAKTLPDPDLQRKATEALERASVVRRPRRRPQGELHKQMPEAGVPVGMAPGRPWSSAVRGKHLVKFDGDGRPAQAYPLGNNHHVVIWESLTPNKKGETERWAEVVPMIEAVRRRNRGEPVIRKHSPDSNARFVMALCKGDTVEMEDGTLAYVASFSPKEQEGGIDLFLWHLFVARLPKNKAVGEPYLVRRMQSTALLKFLAARVVLNPVGEVVYREGGPG

SEQ ID NO: 630 - protein, 1061 aa, unidentified
  REGION 1..1061: note = Description of Unknown: Cas Enzyme sequence
MVTSKRAQPYLLGLDIGVASIGWEILGIDDTGEPARILQAGVHTFDAGVEGDVESGRDEARGAARRDARMPRRMFWRRQRRRKKLLRLLQRHGLLPPGKIGSPQEIHEYLLAIDADLRSRLNPKNDRVVSHVLPYRLRTEALDRKLTPVELGRAFYHLAQRRGFLSNRKSLKKDEDEGVVNQGITELQSLMEKASARTLGEYFAGLDPEAERIRRRWTARSMYVDEFNRIWDAQAHHHPSIMTDALRKELFRANFFQRPLKSARRLIGRCELVPSARRAALADRLVQRFRLLQKVNDLEVTLPGQSPRRLSPEERAKLIEALSNQGDLTFAKIKSKDVLGALSSKPRALPKGTVFNFEQRDEEKKLPGHRTDEKMRVVFGERWEQMSDQERDAVVLDVLSFQNPDALARRAMKAWGLEQPMARALADTRLEQGYAAHSRRALRQLVARMEDGTPYATARRELFPESFEAVEPVDRLPPVLKWNSSLRNPAVARTLTELRKLVNEIVRVHGKPKQIRIELARDLKRARKERERFSKEIDEQTKARDFARARILSEAGVGQPRRSDVEKALLWEECGGLCPYTGRSIPFASLFGKNPQFDVEHILPFSRSLDNSFQNKTLCYHEENRQHKRNRTPFEAYASNPDRYREVIGRVRGFQGRAVPAKLRRFEMEKIPDDFVNRQLADTRYASRLAGDYLALLYGGRSDAAGTQRIQISTGGITAHLRNEWLLNSILGQGEKNREDHRHHAVDALAIALASPGLVAQLQRAAERASAEGRRLFARVQEPWPGFLDQAREKILAINVSRRQAKKIAGDLHEDTNYSKEYQWIDKDGNLKSVRHVRKSVEGMSESQVEDIVDPVVREKVRAWVQAQAGKTKKDVAPPPTIKTRDGRQIPIRTVRIRKVISVTPVGLEPTADGPKAGPRTRYVKPGANHHSVIVAVLDKNGMEKKWEDHCVTRLEAHQRKATGNPIIQKDWGPAGNFKFSLASNDYLLLKDQNGDDQLVRLLSLSEGAYEGRIHYDARMASEARKKGSDARIHMTAESMRKRQARKVRVTYLGEIVPAND

SEQ ID NO: 631 - protein, 1035 aa, unidentified
  REGION 1..1035: note = Description of Unknown: Cas Enzyme sequence
MAKDSGSGRIFAFDLGTTSVGWAVLRDSEGGAPSALIDAGVRIFDAGVEGQIEQGRDEARNVKRRLSRAQRRQLWRRRRRRSKLYRTLMDAGLLPRLVRTRSAEIHEAIGEVDRELLASSGSTGLDRQRLPYALRASALDRPLTAHELGRALYHLGHRRGYLSNRKDAPKPDEDKGKVESAITELDHHIQITQSRTLGEFLFRHVDPNVSARRRWTSRAMYIREFLAIRDSQRLHHPSVTDAQWKAIQQAIFQQRRLRVPAALIGRCGLLPELARAPKASFEYQQFRLLSVVNNLRVIDVGTGETRTLTADERDRLTRALSRAGSMRFTAVRTLLKLKGTKFNTEIDGGETQIPGDRTSADLARVFGDRWESMPEADRAAVLRDVWSFEKDEALARRGRKRWGLSDESASAFSAVRLESGYAPFSLAALRRLVPHLQAGLNVEEAKRLEFPHLHQPKQQYDFLPPVDSVVRNLRNPVVHRTLSELRAVMNELIRAFGKPARVRVEVARDLKRSRYERERKWRDMRDRERTRDAAVARLLNDAKVVNPTRADIEKCLLFEECGGVCPYTGKSINFASLFGPHPQFDVEHIIPRSRSLDDSFANKTLCDVEFNRSVKQNRTPFEALGGSAEWSDVLARAKRFVGVFAAEKQRRFKLEDGAEAILAQFASRQLNDTRFASRMAAEYIALLFGGLQVDDQERFVQVSAGGVTAELRRRLRLGAVLGGGDKVRSDHRHHAIDAVVIGLVTPRMVQEIASFARQRELGRLSGAGVRSDLALPWPSLIEDVRACMERLVVSHRPNRRLRGSLHQETNYGAEIAPGRRRQRVPLARLSRADVADIIDPVVRQKVAERIGELDPKKVFVDDKNLPRLGDPSKGRVIRRVRIASAVTAVQVGRGAPRFVAPGSNHHMAVRETVDGKGRPVWRGEVVTRLEAHVRHNSGAAVIDRQTNSANKHLFTISSGDMLRLTIDGRVDYFVVASVSGAQIELRLHRDARPATAIRQGGKAGGRVRMGVDALRSADAERVAVTPAGRVRRSRE

SEQ ID NO: 632 - protein, 1015 aa, unidentified
  REGION 1..1015: note = Description of Unknown: Cas Enzyme sequence
MSDIPAVHEGLVLGLDIGTNSVGWSLIELKKKKPADIKACGVRVFQTGVNIDAKSGKNESRNVERRLARQRRRMLDRRQQRKTITARLLRRAGLLPAGNPSHGTPEWKALLGQDPYVLRAKGLDQPLTPYQFGRAIFHICQRRGFQSNRKTQPKKDERGVVKEATSRLEAEMTAAGARTLGEYLNSLNPHEQRRRDRYTLRAWYRKEFNALWDAQAANEALKLDDSLRRDVERAIFYQRPLKKQKAHLLGYCELEKAAHKPRAALALLSTQRFRLLQDLNHTMVVSESGRARALTPSERALLLAELERCTAFKFSKAKKLLKLQRGDCFNMEEGGREAFQGDSTAAGIRSVLGERWDAADAHAKAQLVEDLMSIENPEALERRVKRVWQLDDVDAEALSDVSPEDGHASLSTKAINKILPFLEAGLSYAEARDKAYPERAEPPSVDKLPALENLRNPMVQRSLAEVRHVVNALVAEYGKPGRIRIELARDLKQNARKREETWQDMRRREKDRQRVAERIVKEAGLTQPKRSDIEKALLFEECEGTCPYTGQGISFRDLFGDSPRFDVEHIIPFSRSLDDSYANKTLCEVGENRSHKRNRTPCEAYGQTDRWKDILGRVRGFSGTYAREKLRRFMIEEVAGEDGFVEDFSSKQLNDTRYASLRARDFLAHLYPAAERKKRMQVSAGRTTAYLRSAWKLNGLLSDGDFKSRDDHRHHALDAVVVALTEPAVTKALATAAGQARRPGVFDRMPEPMPNFVEKVRKALEPIVVSHRVSRRLNGPLHEDTIYGLIKVEGTNCKAVIRKRLDALSDADIKKNAIVDKAVREAVHAKLAELGLPPAKAFQDVANRPCLKLKSGRLVRIRRVRIFKNELPERIGAEPGRLIIPGNNHHMEVFSVNDRKGNSTWKCEVISLLDAKGRQKLGQPVVRADDEHGNKLVFSLAIGDAVQMEWQGHQVVAVVLKLSDRDYCFRQHTDARLVGALGDDLIRITSESALFRSKCRKVSVDALGRTHACHD

SEQ ID NO: 633 - protein, 1016 aa, unidentified
  REGION 1..1016: note = Description of Unknown: Cas Enzyme sequence
MIDDVSRTLGLDIGLASVGWSLIESRHGAPCTIVQAGVRVFPMGMELDDKGKGTSRSVERREARQRRRQLDRRAMRKALIRSILFKNDLAPDRKTDTSGWREFERFNPYELRAKGLDHALTPHEFGRVLFHLAQRRGFLSNRKAPVKKDEKPGELMKATNAILADMQNLQCRTLGEYFFKLDPHQRRIRGNYTLRKWYIDEFNFIWEKQAALDPQKYGPELRKKIYDAIFDQRPLRVKESTVGTCDLEHGKRRCRVAHLDAQRFRILQQINNLKIEEDVGKERLLTKEEREKLLIELCGTEKLKFTTARKALKIKHKFNLERGGSEALNGDVTSTRIRDQIGNTWDELDQAEREQLVNDMQSIEAPEVLKRRLMQHWLVPEVAAELLSEVSLEDGHLAHSLAAIRKMLPHMEAGAPYMTALMSAYPDNAQWKAGDEIPKFPNLRNPLVQRALAETRRVVNALVKHHGKPNMIRVELARDLKKAAKERENEWMRMRAREKERTQARDSIQRLKEYHIATPRASDIEKWLLFQECGGICPYTGKAISHAALFGEHPQFDVEHIVPFSRSLDDSFANKTLCYADYNRNIKKNKTPFEAAGGTDSWEDIINRVRLFSGNYADTKLRRFILEDVADEDGFLDEFSQRDLAITRYATKAAYNALARLYDPSIAKSRVQATQGKATSYLRRAWRLNDILGLANEKTREDHRQHAIDATVVALTTPGTIKALADAAVFGRAGAFNPIPHPWDGFKEDLQTVIGNITTSHRVDKRTNGPLHKETYYGIITDPSDLKTNRAVVRKEIASLSENDVSGDNIVDPAVRDAVRNRLKELGESDPKKAFKERAQHPFMVAKDGRKIPIHKVRMFQSCDPIAIETSPGNRNVVLGNNHHVEFFHVKDKKGNPTLKSVVVSQLDTLRRVAQARRDGIPAQIVRQTDEEGNKLAFSLAIGEVVEIDWKDERIRCVVQKLSQEYYVFRSTNDARKVKDIPSNEVIRIQSDNKLISINLQKLICTPIGQTYRTRD

SEQ ID NO: 634 - protein, 1173 aa, unidentified
  REGION 1..1173: note = Description of Unknown: Cas Enzyme sequence
MKILGLDIGSSSVGSAWVDTVSEEIYTGVSVFPAGVEERSDGRGDPRNHARRFKRSQRVGIRRRSDRKLALRKALQDWGWMPKDRVVIAAWMQMNPWRLRRDGLSEALSPTEFGRVLLHMSQRRGPSWFDDEEVSSTTETESTDKRGSGRPERKKKPLKAVNEALVERLGERTFGQFMADLFDERHPKGKPIRNRQDQQGQTIYEFFPSRQMLRGEFERLWKKQRSFPGELAEQLTDERKLDLANPSGTDVWKCQGLLWGQRNTYWDAGTLGRCDLEPTDRVCPKADMYAQEFLTLQDVNNIRVICKGEPSRRLNPQERKKVLGVLERQKTATAKTVRAALGLNRKDIKDLVTLNVEHDSPKRLNTNWFVREIVAAIGRDAWTAMPPKTREGVNRAVCKFDPREPADVEKLTAGAKTWWGLSQEQAIGLVAAWRTRPGPESRIKLSRRAVRNLLPYLREGDSVTEARQRFAEDADNGATDERRQRYRLGGYRANHAVRHFLSKHPDQLPPAPMLANPVVRKAIHEVRRHVSAYIRKFGCKPDRVIVELARDARLSGKRVNEIVADNKRNRNQREAIRRDPELAYVFQDMRKHQVNQAIERILLCRAQRGVCAYSNLDGNEGRCITDRQAAAGLGLETDHIIPRSRGGSNRRGNKVLCYAATNRGKGDQTPKEWLSEEHFAELARRFRHWEKGPKEDRTRWCNLHRDVFDMEAYIQSQLTDTAYASRQVIQWLDQVLYGGEVVGGPSKRRVFATNGRYTSLLRRNWGLFFDESNPDADEKSRADHRHHAIDAVVIACTGPKRIAKIAATWREQEYALAKGRQPRRFTIDTPWGDHDSFRGQVLDVIRNQVVSHRSERRKIVGEFHKETLYGPILDEDGELTDEFTQRISVAKLTANHLRVPEYWEALREKLEHAETGAEKKALRRQLLNLPDVPAAKSGVVRDRWCREELRQCLRNADLDPDAFTDRDIKRLIRADKLRLADGRAAKKVTLRKVFNYTVRVPRRVPDMRTHRRVLDPNPQSTRVYEAQSNHHMEIREDTRGKWVGKIVTTFEAARRVRPPRTGGQVPAPAVDRTDNADGKFIMSLAVGETLHMAHPKTGLMGYFVVFKLDNGKPPVVHVKPHWDAGKATAGADHPVREDVPCSSDKLRQLGPDGGSPRKVWVGPLGEVKAYTRD

SEQ ID NO: 635 - protein, 1052 aa, unidentified
  REGION 1..1052: note = Description of Unknown: Cas Enzyme sequence
MADTGTILGLDVGANSVGWALVATTDDRPSAILAGGVRCFAAGVEGQLEQGREEPRSVRRRQARQMRRQTWRRQRRQRALFALLQRRGLLPETAACDSPAIHECLRKLDAELRARNPVPATHRDAQLELYRLRARAARESVSKHELGRALYHLAQRRGYLSNRRQAERRDEDDRGQVERAIASLDAAIRASGEPTLGAYLASLDPEAQRIRGRWTSRAMYLAEFERIWATQAAHDPGLTPELARLVHRAIFRQRPLRDQSDLIGRCELEQGERRAAKAHPVFQRFRLLQTVNHLRVQPPGEALRPLSEAERRALVEHLGREGDLTKSRAKQVLGLPARTKLSIEEGGEMRLVGNRTESSLRRIFGERWDALAPGDQDRLFSDLRSFEKSDALRRRAERHWGLPPERARELSELQLEQGYASLSTKAMLRLQPSLEAGASYAEAVRKEYPNAFVATKVLERLPAVGEEFPELRNPTVLRSLSEVRGVVNAIVRRHGKPSCVRIELARDLKRGRKQRQEQWKRAREQESLREDAADEIKRERHEAYPPRRDVEKVMLAMECKWQCPYTGAQIAMRDLLGDSPSIDVDHIIPFSRSLDDSFANKTLCRHEENRNVKRNRTPFEAYATSGRWEEILGRVRAFQGRLSEEKLRRFQLEQVGSELSEEFTTRHLNDTRYASVLAAEYAGRLYGGAVDADGRRRVQVSTGRLTAFLRSRWDLNKLLNDGGEKTRSDHRHHFVDALVVALTDAAAVKLLAGAAQRADDLGGRRLFAQVEPPWDGFNDEARATLEKIVVSHRVRRRLNGPLHEETLYGPPRRSPGRGKKPEEVRHVRKAVDQLSRADLDLIVDPVLRKRVRAQLVELAQRDAKLADPRRAFADVSNHPFIETASGRRIPVHRVRIRKRVSAVAIGHGPSLRHVAPGSNHHMAVVAVLDERGAALRWEAHVVTRLEAMDRWRRGEPVVRRAWGPKRALRFSLTSGDSVRVDLGGAQPEVCLVRTVSGSRVELTRATDARSATEIRKAKKDGGRLELRIDALRTRRCEKVNVMPLGDVIVARD

SEQ ID NO: 636 - protein, 1041 aa, unidentified
  REGION 1..1041: note = Description of Unknown: Cas Enzyme sequence
MEKTNTNTNTEPLVLGLDIGSNSIGWALVKNTSKEIFKSGVRIFETSVEGDIERGKEEPKNLARRNARQARHMTDHRVMRLKNLFKILSNKGLLPETKNLDSQTRHNIITEIDKTYFDYLKTKTDFDSKSAFIIPYKMRAEALDNKLEPHYLGRIFYHIAKHRGFQSNRKSDKKSKDTGKVKEGITMLAGKILETNSRTLGEFYSKTDPLIERIRGHWTSRDMYRHEFNEIWKIQQQHYPEIFSDKLKEDIEQAVFSQRPIKVKKNAVGYCQFEHKDHRADMATLEAQEFRILQTVNNLALFNEAGEKQEISDSWRETIIEIFNSSKEVEFKKIRKKLKISDSLIFNYEKNGEEKLKGNTTLCALNKVFNDIKTRFDETTVRSIVNSLINEEDENKLRDQAINTWKIKDEEIENFLSINLEDGYSALSLKALRKLLPELRDKTSYSTAVKKIYGEQQVDKFQELPSLTTPTLPPDIRTIKNQIVLRALNELRKVVNAVIREYGKPEKIVIEFARDMKKSKKDRESIYKENMLQEKERKRIAVKILEEVGIEKPSRSDIEKYLLMEESKFMCPYTGKTISPSNLFVNPEFEVEHIIPFSRSLDNSFANKTLCHTSENKTKGNRTPAEAYTGEKYEQIIQRVKLNFKGKLARHKLERFLSTEKEFLTSFSNRQLNDTRYVAKVSAKYLGLLYGGIIDDKGNRKIFASRGDATAFMRLAWNLNSLLGKENKKERTDHRHHALDAITACYVDGDIFSILSQAAEGRVDKRKLFACAKPPYWKFFDDCMNSINSINVSHRVSRKVNSKLHDDTFYSEPKEFKGKKTVHIRKSLSEQFDKKTAEKIVDDKIRNIVLNHLENFGGDPKKAFAETNMPAMESKDGRVIPIRKVRIRVNENVFKIGNNERARNVLLGSNHHIEIFETTNKKGEKIWDGKVVTTLEAAERVKNKLPIINRNHGEGTSFLFSLASGESLYLKDDSGNPMLCKVDKMTCEASGTIGITFRKNFDARKATEKGVQFKKSPNPLKDLFISKVTITPLGEIRRAND

SEQ ID NO: 637 - protein, 974 aa, unidentified
  REGION 1..974: note = Description of Unknown: Cas Enzyme sequence
NDQQDNPNYEFFPTRQMLRDEFERLWTAQRAFGGVLAPQLTDDRKRVLYDPTGTDVWKCQGLLWGQRNTYWDPGTLGRCDLEPTDRVCPKADRHAQEFLVLQDVNNIRIQWEGELSRPLAGDEREKVIAALEKQKSASVKTIRSALGLNKKEIRGLVTLNVEEDPKKKFNTNWFVREIVGAIGANAWGAMDDRSRDAINRAVCRFDPREPADVAKLAGGARTWWGLSKDQADALIGAWQTRPAPDDRINLSRRAVMNLLPYLRRGDSVTEARQRFAEEPDSGATDEQRCRYRLGGYQANHAVRHFLSKHPDQLPPAPTLANPVVRKAIHEVRRHVAAYLRKFGHKPDRVIVELAREARLSGKAADAITLDNRRRRTKRDEIKEQFEELFRSKNNRQIALAIERILLCRAQHGACAYSNLDGGEARAINERQAADGLGLEVDHVIPRSRGGGSGRGNKVLCYAATNRGKGNQTPKEWLSPEQFATLAQRFRHWTDGEKEDRIRWNNLHRDVPDREAFVQSQLTDTAYASRQVTQWLEQVLYGDTPDGKRHVFATNGRYTALLRRHWGLFFDAGNPAADEKSRADHRHHAIDAVLAACSGPERIGAIAATWQAQERAWGAGQQPERLNIAPPWGEDGTFRRQVMDAIDALVVSHRAQRRKIAGPFHKEKQYGPILDADGHLTDEFTQRIPISSLRPNHLRPPDHWDTLRVKLEAAETKAEQRALRRDMLNLQDKPAGKSGIVRDRWFREELRRCLRDNGLNPDRFTEADLKVLIRNDKLKLADGRMPKRITLRKVFRQTVQFPRRGYDMTTQTPLIEASPQSIRVYEGQSNHHIEIRENANGQWHGQVITTFEAARRVRPPKRAGLPPQPAVDRTDNADGRFVMSLGVGEMVRMAHPETGQPDFFVVFKLDNDPPRMHFTAHWDAGKSKDDDEENHRQREDVARSAAQLQQLAVDGLPPRKVWVGPLGDVKDYEAD

SEQ ID NO: 638 - protein, 1332 aa, unidentified
  REGION 1..1332: note = Description of Unknown: Cas Enzyme sequence
MSTVLAFDIGSNSVGSAWIDRETGKITTGISIFPAGVDESDDKRGDPKNAKRRMARRTRITLRRRAQRKRELRLKLIEVGLLPCNAAEFKALLEQTDPWALRRAGLDKSLTPHEFGRVLLHLAQRRGALGLKIADEDEATDSKPDDEGKVKQAIGAVRIKIRDANARTFGELIAMERDIRIHALPGPDLRPEKKRVGPREYRDAIRNKAGNYEHCADRPMIRDEFAQLWIAQKKHNSDTARLLTDSLRTELDNEEGDSTWRHKGLLFGQRRQSWDLGTLGRCVLEPTERCVPHADMYASQYRVVETVNNLRIIERGKSARPLTEVEREKIKEYLSGPLGMSPARRMKGKTIPERPKATVSVSDLRILMGWPKIAGKTPEFRFNIESDEDRDINTDWFNREIVHGAIGKDAWQSLSQSVREGINRAILRYDPDQDGDATALKTGVMKWAGLSDAQADALVSAWTRRPKIDAKRLNLSRRAVRNLLAVMDRPEPWPDARQSGERRWVTQIEARKIIAKDDTFKDITTGRPLDVHTRRRYATGAKGATAADRHYMNKHLLMKNGQPVCGPDGLPLREPPPAPLISNPVVRKAIHEVRRHVVEYMTTFGRRPDDIHIELAREARMGAVESDRVLFRNRLRNRIRRDIISEFNLDSMTPTQQRTAVNRVVLCMQQGGMCALCGNQIVKTKITPRIAAEGDECEVAHIIPRGSGGHNGLGNIVLAHTKCNRDMARRTPRQYWNDSLKGGFDEGYRWIEGIYGEVDRPKPSEMKKAEGDALWMCYFDRRDDKRKMEQFAKDVKDIQDMTARQEAATKYASRQVMAYLSDSLFEGKGLPERATGMDNPEDERRIFANDGMWTSRLRREWGLFFDPHGAKSKSLSNDEEHFRREKNRGDHRHHAIDAIVIAYCTPSVQIAWENRERAADVARINTADEVEMENYRRRFPIPPPSPFKSREEFRDTVEKAVLGDDVNPRPICHRAVKRKLIGALHEETLFGPVVDESGALTGNYTAKKSVLALTPNHLRMPAGWNELEAKLHDGKVSRSSKRDIRRSLAQMNDPPPGKSGIVRDRALRNQIRRCLHAASLDPDKFAANQIKKVAESGAIRQLSGVPIRSVVLLRTMSDPVVIARKSPDYISGKLQADPSAAACRAYVGGNNHHIEIRESKKGKWSGEIVSAFEAAQRKLRKLKEFKKARIPRPCDFEKLPDVARKKLRPIIRGIELAHPLVNRTDDETLGGRFIMSLCEGETVWMLHKETKEPGYFVVAKLDKPQQVVLVPHWDARAAGERKDSSGNAIPDSARESFTATPSDLLTLAPPGHPHAIKVRVSPLGVVTKLEKD

SEQ ID NO: 639 - protein, 1111 aa, unidentified
  REGION 1..1111: note = Description of Unknown: Cas Enzyme sequence
MSEPLKFERPPQRPYILGLDIGANSIGWVCLAAEPCGPGWEPTGLLHKPSDMGRWPTMGVRIYPVGVAEFDTGDEEGPAVKRRRARMMRRQTQRRARRMRKTFRILQEAGLLPHYPQGTLERHGAPAGPEPTTRVESRRHRQARMVAEQAARDELLKIFDARRAKDWAQRLEKHQRSLAFDHLPYLLRTRALSEPLPLEDLGRAFYHLSQRRGFLSNRKDAASVKPGAKKPAKGSDDDIESLKGQMKALEAAIHENGHRTLGEHLLWKLTEKKEKVRQLKTYRFLYREEFDAIWEAQAHHHPNVLTDELRKRLNDAIFRQRKLRSQADKIGICSLEDGSYYRLEETGELVPTRAERRIPACSLLFQRFRALQRVNDVRAVVKKTGEIRDLWPEERKKLLQNLEGVKSLTAKEVSSVLAWGKEYAAQLNFDDETGAALDGCWTNQQLHEIFKDRWSQLTFDQRETIVTDLFDYEPDDWYEDDPDAPDRQERARDPHIARRALSQEGPWGLLKPTRSEAISLVHVKLSSDYASLSRAAIQRLIPHMESGMQYRHALDKCYKPKESEALDYLPPVNKVFRSVNNPIVTRSLTELRKVISHLIAYYGKPEQIRLELSRDIHQGKKGRDEARKGIKENLKRKENAVKEYAEQANLIGKSTNSFRAKDLEKLRLWVEQKHVCPYTSKTISGSAVLSAEYEVDHIIPFSISQDDSFSNKVLVCARANQEKGNRIPLTAFGSDREHWSKIEGWVESRRKKGDIAPHKLDRILMTEAQVQELLEQFKSRQLNDTRWASRWAQRYLMHLYGGNVVTGVDPKGRRRIQTSAGRVTADLRRELGLEGLLSDVIDPSVPRPAGRFNKRIDHRHHAVDAFAVAWFGPKAALAMAKAAEAAPGAYKRFYAQLQEPWTDFRDDIREALKACIPSHRVSNRARGALHKETVYSPTTIASGERKSNLSVGKGHRQRNVDHDGNHHVLFALQDSGDKAGPIIEVVTYWEACQRVLRARDGKDAKRHAVPYLRVHGTLMTLCIGDTVVFNKHNTTLICNVTQIWQNKTIALRPVSETRTPRSPPPDQDKIEKFLLTNIPFSGLLVSGTQLLQRGLRKLSVSPIGVKRPARA

SEQ ID NO: 640 - protein, 1011 aa, unidentified
  REGION 1..1011: note = Description of Unknown: Cas Enzyme sequence
MRKTFLILQKAGLLPSYQEGALERHGAPAGPEPKPKAESRKYRRERIVAEQAARDELLKAFDATLSRACAARLPKDQHSAAYDHLPYLLRSKAVSEKLPLHEIGRAFYHLSQRRGFLSNRKDAATVRPGAKKPAKGTDDDPETIKGQMDALQNLMNEHGHRTLGIHLLWKLTEKREKVRELKTRRYMYRDEYEVIWETQQKHYPDILTDELKQRLYKAIFHQRRLKSQDDLIGICALEDGAYLRIEKGGELVPTKPQKRTPACTIRFQRFRALQRINDMRVVEKKTGEVRKLTDVERGQLLMEAENRKSLSSKEIPEVLKWGKQYVAQLNFDDETGSALSGCWSNQQLKEIFGERWDRLSLDEKDSIVLDLFEAEPDDWYEDDPDDHREGRKRTPHIARRALACEGPWGLIKPTKGEALQLVEFKASSDYAGLSKAALSRLMPLMESGMAYRTAVEKCYRAKLSEILDYLPPVNKVFKSVNNPIVTRSLTELRRVMSHLIKFYGRPEQIRLEVARDIQKGKAGREAAREGMKANLKRKKEAGTDYFQEIGRPGATLDGASKRDVEKVRLWYEQDHVCPYTSKSIPAGRVLTSEYEVDHIIPFSISQDDSFTNKVLVHNRANQEKGNRIPIAAFGEDQERWKSIEAWVAQRRKKHGKVSSRKLDRILITKDQTKELLDDFRSRQLNDTRWASLWARKYLMHLYGGNVVEGVDEKGRRRILTSAGSVTADLRREKGMDAMLKAVLDPSTPLPPGPFSKRFDHRHHIVDAFAVAWCGPQAQALMSRAAEAAPSEKRRLYGKIEDPWDGYQADIIEALSVCVPSHRVSNRARGALHKETVYSPTTVTSGERRSNLVVGSRHRQRNMDHDGNHHVLLAMQDGNDGLVQTVSVVTYWEAVRRLNEARQESKTGDVVYRRVPGTLMTLCIGDTLSCEREGRRQYCWVRQIWQAGQVQLCPVSETRTPDSPPKDKAKMEAFLKKKIPRSGLLISLNVLGRMNSRKHSVSPIGVVRPARA

SEQ ID NO: 641 - protein, 1027 aa, unidentified
  REGION 1..1027: note = Description of Unknown: Cas Enzyme sequence
NSVGWAIVDAENERILGAGAYVFPEAGEIDAGMYETHRHKRGMKKRQRRSLRRKRQRRDELVRILVAHDMAPASTGERAELYCSRADVYGNPLDPYALRKKGLDERLSLHEFGRALFHIARRRGYLNVALLKLKHLAVTRSFAETAVAAQKAEPADGGSEDKGKNADREGPVVQRVARVRRQLEESGARTIGEFYADNLATRTPIRGAGPAKLAKLKEKGIVRDPLGLRADRMLFEEEFHLLWDKQSVFHAGVLTVSLKAEVYNAIFWQRPLSRQEHLVGNCDIFPGRKRAPMASLIFQRSRILQYLNTLTLLDLTTGEMRRLSGDEVVRIAAQLERQASLTWNHARSAAGLPNTVRFSDEPDDRGRAARGRDGSRRARTNIRGNDVGARMRNAIGAKWDHLSAEQRESLVERLTTCREFRNIVPGLQRQYGLSDAEIYSLATMELPQGHGNHCVRVLRDLEQHLRAGLNYHEAMVAAGFRSDNESIEPSVEKPLLHLSRPRDLRNPIVQRSVEAAFKVINAVIDKYGKPDKIRIELPRDVARTNADRERMYEAQDKNARENERAARRLADNGFPLGHNNVNVRKVRLWWEADGRCPYFPDIAVTLGMLVNDYDIDHIVPRSRSYDDSWTNLTICPVFENQSVKGNKTPYEAYADRWGQIEALVSRLRTMSPRKRDRILKKEWDEAEFTNRALSDTRFISRAVHTEVKKLGVPVEVSRGQLTSELRGAWEMGAVVPLTAEQHDKMQAWHARRLKKVDKPRFDHRHHAVDAIITACVDIGTLQRMTDWYKQRERGMHRRDIDRPKPWPSFTADAKAVIDRCLVVHAPTRGVAGPLHEETARKPPPKESVDAALSALPAAQRARVRRCVVVGKQLVFLAPNGDPTKAYDLGSNHHAVIWEPIGTVTGSKTPVREMEVVTMLEASRREEAGEPVFQDTSRRFPGYRAVMHLCENDIVEWAGERAGFKRVATRTLYPDGRPYLLLRPLTDARADPHSQTLITSRPGLSLLVRRISLNPIGDVIHRQPIIGE

SEQ ID NO: 642 - protein, 1335 aa, unidentified
  REGION 1..1335: note = Description of Unknown: Cas Enzyme sequence
MTVRHVLGLDIGTNSVGSAWIDTQTGEITAGLSVFPAGVDETDDKRGDPKNAKRRMTRRTRVTLARRAARKRELRLQLIRSGLLPADPAVMKAMLETTDPWQLRRKGLDAALTPHEFGRVLMHLAQRRGALGLRPAKAQEEATAAESPKAGRKEPKADVGGDEVEEDGKLKAAIDAARSHMIERKARSYGEFIWMLRKERVTPVTTTDQRSPDQQQKGGPRMWCDPVRNKAGKYENAADRAMIREEFHKLWAKQASLSGPLAALLTDDLRRQLDDPDRTAWDKDPSKSAEDRLWYKHTFKEGGLLFGQRRQTWDMGTLGRCVLEPTERCAPKADMHASFFRVVETVNNLMVIEQGRTPRPLTKEQRDEVMKCLRGPLGVHTSGKFKGQPRRSVTVTDLRCLPAFGWGKASKHSKFRFNIESDPEREINTDWFHREIVIPAFGESAWDAMTQQQRESVNRAVLKFDPNEPQEAARLHAGAMAWWKLSPAQADALIAGWMTRRPLEERLSLSRKAIRNLLPIMKQMWSEPGGGHRWLTQIEARKLIAEDQDYRDVTTEKALDHWARRRYATGAKGLNAADRYYQKKHPLSLPPAPMLSNPVVRKAIHEVRRHIEAHIQRAGFIPDRIVVELAREARMGGKDADRILLRNRLRERIRKNIIATFELSPREPSQQRAAVDRVVLAVQQNGVCPLCLNKTVTTSITPRMAAAGQDCEVAHIIPRGIGGGNGLRNLVLAHTRCNREMGRQTPRQFWDNRFDEMMSIVERMYCDIERLRGKAVDKAAEDKLWAAYFDKADDEAKVNNFKKTKQDLEGHTERDLTDTRYATRQVLAYLADALYEGKGLPERGGDRKIFTTDGRWTGELRREWGLYHDVHAANSNGVEATEVEARREKNRGDHRHHALDAVAIALTDRAVQVKFENRVKEADKNDITVETYEAFCRENPIRPPDPFTDRDDLRARATAAIFGQRDALDHPVCHRQVKRKLIGALHEETLFGPVVGRPGLFCGTKSILALSPNHLRVPEGWDELSATYRRAKSAAERKEFGRRLAALEDPSPGKSGLVRDRALRDRLRTCLREAGLDPDRFSAADLKKAVAAGYLKQASGVPIRAVRLLRVMSDPVIASRVGYDHSTGKRVSVFDAATGEGRSAAARAYVGGSQHHIEIRKDDKGKWSGDVVTMFEAAQRKLAFFRALRKAGVPTFKKLRELPKADRRQFTAAIRAADRAHPIVDRRDDPSKGGAFVMSLAEGEMVFMRHKDTKELGYFVVAKIDKPQSVVLVPHWDARAATGRKDASGSKVPDSQREQFAVTPTDLCTLAPPDKPHATKVRVSPLGKVTAVERD

SEQ ID NO: 643 - protein, 1136 aa, unidentified
  REGION 1..1136: note = Description of Unknown: Cas Enzyme sequence
MALILGLDLGTSSIGYSLIDDQKMDIVDMGVRIFPEGVDNLGDGQREQSKNAQRTANRSKRRQFYRRRLRKQYLLKLLAQYKMCPLPYEVIRAWNLKDLSNDLLFRDWIKQDPYELRSKAGNEQLTLHEIGRVFFHMIQRRGFQSNSRNASSDEGKIFDGDNKAGKIGINETAEAKGDQTLGEYLYNIKPLENEPNSGGLPRIRNRYTTRSMYIEEFEKIWECQSQYHEMLDNGLKALLGGRKREEGYSEDGVLFHQRPLRSQKHLVGNCTLEPKKTKCLKSHPVFEEFNIYQWVNTVDCNVPLTTEDREKIVDILVSKKSITFGALRKVIGREDNYYQFNFENKETIKKAHTIPDLSNKKYFGKGWFVFTPKEKDDIWHVLHFFDDKVKLRHYAMEKWGFDENKASAISCFNLNDNYANLSKKAMTLILPYLKVGYTYSDAVVLAGVQNAFGESWSDISEEKRDFIIDNVGEIISSKRKGGSIEPLKAFLKSEFSLTDRQLKKLYHHSANTTKIERVKKLPVNRSADRKIQAYRNPVLITAIFELRKVINELIELHGQPDKVHVELARDLKASKSKRNDIKRQQSERERQNDRIRQEVNNLGQDVRSRTNLLKYKLWEECNRTCPYTGNSISVEQLYSEQVEIEHIHPLSQSLNDSIANKTLCFTAENGRKENRTPYEYYFKTFGEEKWEAVKSQALSSFKNKENYADAYHKFKHFIKQERDNDFTTRHLNDTRYLSRVAKDYLAQICDKVVTLPGQMTAIIRKMWELNRILNPDDIKEREDHRHHAVDALTIACMTKSHLQQLSANAEYDDSFRFIHDFPKPWANFRVDAERAVDNILITYKQKNDVLNVKTTTVLKNGKTYTNTGIAARGELHKETVYGYRQAPASEQSLHVRRSLGQIQTEKQVAKIVDSTIRILVSERIKSLGGYIKEKVPEGAFFKASESGELIPQVFLPNKNGDKVPIKKVRMRETVGNAVKLKSANQWVNPGNNHHFIVYQDGHGELKYEAVPFWVAVERKLRKEALYQLLPAHRKEGKMIEIFRANDLFILGQTEEEIADRMNDSLFLQEHLYKVQKIAGGDYFFEICFRKHTDSRLDKDAKPQYKYIKNFGTGKTGWYTHQPYKVNLSVTGKLSMK

SEQ ID NO: 644 - protein, 1514 aa, unidentified
  REGION 1..1514: note = Description of Unknown: Cas Enzyme sequence
MKKILGLDLGTNSIGWALIQQDFENRQGNILGMGSRIIPMSQDILGDFGKGNSISQTAERTNYRGIRRLRERHLLRRERLHRVLNVIDFLPKHYAQEIDFDKRLGKFIEEKEPKLVYNGKDFVFKKSFEEMLEDFRHYSPNVLLNDKGDAKLVPYDWTIYYLRKKALTQKILKEELAWILLQFNQKRGYYQLRGEEEEEVPNKLVEFHSLKVVDVIADEAQKGKQDIWYSLVLENGWVYRRASKNPLFDWKDKVRDFIVTTDLNDDGSVKTDKDGKEKRSFRAPSEDDWTLVKKKTENEIDKSNKTVGAFIYDRLLKNPQQKINGSLVRTIERKFYKAELVQILKKQMEFHPELQNEDLYNDCVRELYKNNEAHQLLLSKRDFMHLFIDDIIFYQRPLSSQKSSISNCALEKRIYKDKCGVYQTQGLKVVPKSNPYYQEFRIWQWMYNLSIYRNEDDKNVTGDFLSSISDWESLFAFLDGRKEIEQKSLLKFLLDQKGFKGKQLNANIEQYRWNYVLDKSYPCNETRTLINTRLSKVKDGTLFLLTREIEQHLWHLIYSVTDKIDYEKALASFADKHRLDKTSFVDAFRKFPPFKSEYGSFSEKALKKLLPLMRIGKYWNWDTIDSKSKGRIDKILSGEYDETIKDRVREKAMPLMHENQFQGLQLWLAQYIVYGRHSEAAVLDKWNSADDLVSFLQDFKQHTLRNPIVEQVVTETLRVVKDIWTKYGNGAKGFFDEIHIELGRDMKNTADERKRITTAVTENENTNLRIKALLLELMNDSTIENVRPYSPMQQEILKIYEEGVLNSDLIIEDDILKISKMAQPSSSELKRYKLWLEQKYRSPYTGAIIPLSKLFTPAYEIEHIIPQSRFFDDSFNNKVICEAAVNKLKDNQIGLAFIKNFHGQIVECGLGQKVKIFEVEAYEDFVKQHYAKNPSKRNKLLLEDIPEKMIERQLNDTRYISKYISGVLSNIVREDANDDGVNSKNVIPGNGKVTTELKQDWGLNDVWNELILPRFERLNRITHSTHFTAWNSNYQKFLPAIPLEYAKGFSKKRIDHRHHAMDALVIACATRNHINLLNNKHAKSKERFDLNRKLRAFEKVAYNHPQTGERIERDVPKAFLKPWSNFTIDAKRMLESIIISFKQNLRVINKATNHYEKWGEKDGVKVKEVIAQKGVNWAIRKPMHKDTVSGLVELRLKKEVSLNNALENIADIVDKELKKEIKKLQASGLDKKMIVKHFKEINNQWNNQSVAKVEVYYLDNTNVASRVLLNDTFDRDRILNTITDTGIQKILINHLDNYKDRKDNSGKEIAAHLMAFSPEGIEEMNKNIVQLNGGKYHQPIVKVRTYEPKGNKFPVGSVGNKKGKFVEAAKGTNLFFAVYIDADGKRSFETIPLNIVIERQKQGLSSVPQINQNGNSLLFWLSPNDVVYVPKNGENVIDIDFRDIKKDTFFDLYKVVSFTGNQIFFVQHTVATSVVNKVEFSSLNKMERALDGKMIKDSCVKLIVDRIGQLKSML

SEQ ID NO: 645 - protein, 1445 aa, unidentified
  REGION 1..1445: note = Description of Unknown: Cas Enzyme sequence
MKKILGLDLGTNSIGWAHVIQGDTPEQSSIERIGVRVNPLTTDEQTNFEKGKPITINADRTLKRGARRNLDRYQLRRKYLSELLKREAIIQDDTKLTEDGKNTTHETWRLRALSVVQKIEKDQLARVFFAINKKRGYKSSRKAKNDEEGQAIDGMSIAKRLYDEHLTPGELVYLQLTEGKKFIPTFYRSDLQAEFDKVWNYQKQFYPDIFTNGLYKELQGKGQRATSAIFWTQCNFNIAETKDLEDDLKNEKTVLLSARDKKKLQSYNWRSRAIKEKLEKEKVAYVLTEINNNLNTSSGYLGEISDRSKELYFNKQTVGQYLYKKLTENPHTSLKNKVFYRQDYMDEFEAIWTEQSKYHKELTPSLKEEIRDVVIFYQRKLKSQKGLISFCEFEFKNIEIEINGKKHTRTIGQRVIPRSSPLFQEFKIWQTLNNVLIKRKGSRKRVVSTLNNDSEIFALSQEDKNMLFDELNIKGNLKSTTVLQLLNLKPSEWELNFTELQGNSTNKVLYEAYFKILEMEGYDVKELLNIKLNKDDIEFDDLSVPSSRIKEIVCSVFDSLHINTTILDFNAELEGNKLQNQSHYQLWHLLYSYEGDDSQSGNEQLINLLGRKFGFNAQHGKILANIVFSPDYGSLSAKAIHKIYPYLKENKYSEACELAGYKHSAASLTKDEIASRTLNNKLELLKKNSLRNPVVEKILNQMVNVVNTLIDVNSVKDDTGKIKEYYKFDQVHIELARELKKSAKERAELTSSINSAKIKHDKIFNLLQKNFGIANPTRNDIIKYKLYEELKNNGYKDLYTNEYIPRELLFSKEIDVDHIIPQARLFDDSFSNKTICFRKDNIRKGNRTATDFIQSDFGIDAVEAYLNRVESLYETGKKNAEEGISKAKWLKLQKKETEIGDGFIERDLRDTQYIAKKAKEMLLQIAPVVVSTTGSITDRLRQDWGIVNIMQELNFDKYKAVGLTDTVLKKDGTTKERIVDWNKRNDHRHHAMDALTVAFTNHNHIQYLNYLNARYNETHKFHSNIKAIENKETHIQKDDTGNAKRVFNLPIPGFRQLAKSHLECILVSHKAKNKVVTKNKNKIITNKKGHIVKTELTPRGQLHKETVYGKIKIPVIVEEKVTAKFDADKISHVNSAQIKALLLQRLSENDNDPKKAFAGKNALTKNPIYMNAEKTSVLPEKVKLTYFEDGYTIRKDVTPDLKIDKVLDEKVKQVLQARLNEYNNDSKKAFTDLDKNPIWLNKDKGIAIKRVTITGVSNAEPLHYKKDHYGKPILDAGGHPIPADFVSTGNNHHVAIYRDEKGELQDRVVSLYEAVQLVNIGQPIIDKEYNKGLGWQFLFTMKQNEYFVFPNERTGFNPNEINLLDGQNAKMISPNLFRVQKMSKVSYGNSSVRDYVFRSHLETNIDDRPVLKNIAFKSIKSLSYLESSIKVRVDHIGRIIAVGEY

SEQ ID NO: 646 - protein, 1561 aa, unidentified
  REGION 1..1561: note = Description of Unknown: Cas Enzyme sequence
QMFQKKFVLLWHNNRKTIDMKKILGLDLGTNSIGWAVVNADEIARDNNTSYLKPISISSAGSRIIPMSADILGDFDKGNSISQTAERTRLRMVRRIHERSLLRRERMLRVLKTLGFLPTHFANKIDDFGKFIDESEPKIAWIKRENGRYTFLFQDSFQEMLKDFALHQPQLVADGKKVPYDWTLYYLRKKALNERISKEELAWLLLQFNQKRGYYQLRGEEEEEDNTKRVEFLSQKVVRVEATNEKKGDDIWYNVYLENGMIYRRPSRYDLDWVGKVKEFIVTTDLDKDGSPKKDKDGNVKRSFRMPKEDDWTLIKKKTEFDIENSNKTVGCYIYDTLLQNPNQKIIGKLVRTVERKYYKDELIQILRIQKELIPELKDTELYKRCIEELYPNNEAHRSNLAKPDFVNLFVNDILFYQRPLKSKKTLIDNCPYEYHKDKDGNVYPIKCIAKSNPLFQEFRLWQFVQNLRIIQRERFVSDGQLDLFNNVATGKLQTDVDVTTEFLKTEDDYVNLFDWLNDRSSIKQDTLLNSYFKIKKEKGKDHYPYRWNYVEDKEYPCNETRTSIINGLDKCNIGSDFLTHEIEMALWHILYSIEDKIEINKALKTFAEKNNLGNTFVEVFSKMKPYKKDYGSYSEKAIRKLLPLIRMGKYWKENNIDAKTLERIDKIITGEYDETIKNRVREKSISLTSIEQFKGLPIWLACYIVYNRHSEAKEIEKWEKPEDIDCYLNTFKQHSLRNPIVEQVITETLRTVRDIWKKEAQIDEIHVELGREMKNPADKRKKMTERIQQNENTNLRIKALLMEFLNPELGIENVRPYSPSQQDILRIYEENALDNLTKEDTEYEFVSKMSKTAQPSKSDVIRYKCWLEQKYRSPYTGKMIPLAKLFTPAYEIEHVIPQSRYFDDSFSNKVICEAEVNKLKDRQLGYEFIKNCAGQIVQLSQGESVKILSAEEYEKLVKNFYASDRLKMKKLLMEDIPDGFIERQMNDSRYISKVVKGLLSNIVRVKQSNGEYETEAVSKNLISCNGSVTDRLKKDWGMNDVWNSIILPRFQRLNELTGTRNFTTLNREGHEIPNMPLELQKGFNKKRIDHRHHAMDAIVIACATRDHVNLLNNEAAHSKHNANRYQLQKKLRRFEKTINGYGKEIEVAKVFLMPWQSFTTDAKQVLQNIIVSFKQNLRVINRTTNNYLHYDENGKKKYQKQTNGDSWAIRKSMHKDTVFGEVNLRRKKSVSLNEAIKKPNNIVNKDFKRKVIELLGEGSDAKYIKKYIEDNKDIWSDIDPAKIEVYYFTKDEKKRNGEPKERYFATRKPLDVSFDQKKILESVTDTDIQKILLAHLETKGNNTELAFSPDGIDEMNRNIVALNNGKFHQPILKVRVYEKADKFAIGQTGNKNKKFVEADDGTNLYFAVYETTDRNRLFATIPLSLSIECQKDAPKDWIRLLDERLKDKRQNEILQKYQKIEIPEDATLLFVLSPNDLVYVLSKEEIENGIQNINSEKIYKTVSFNKKQCFCIKSNVASPIVNKLEYTSSNKMERAITGEMIKETCVPIKVDRLGNIIKIG

SEQ ID NO: 647 - protein, 1093 aa, unidentified
  REGION 1..1093: note = Description of Unknown: Cas Enzyme sequence
MRYRVGLDVGTASLGVAAFSLDENNNPLELIWKHVRIFDEPLEKSQAGLKSKKAGRRAARMQRRQIDRRLGRTKSIAALASLLGIQIEPSIDSGRTLLEIRARAARELIDLSDLIRVFIRLGKRRGYGGEFRPKKEGVKLGEVEGGNHDLKAEMQVLAQSKGLSDVTLGEFLYQRWLDGKTTKLKIKESDDKATEGKNLYALRRQLVDEFEQIWQTQSVFYPILNSNHEGKPLKEIFHHTIFYQRPLKSVGGMVGQCSLEPTLARAPRAQLAFQHFRIEKTLADLRWGAGKRAEKLTAEQKAVIRQLCDEKDVVKFEAIYKALETAGHPKPETKGLNLDRLSRDEIPGNKTNHVFRKLDLGDTWSLLDKRVQIQVINFLADLGSPEQLDDPIWHTRFAKADGTMRQLPESFVEFVNLVKAHEKFDRLSKMGFEGGRASYSIKALNKLTDWLDTPWWPDGWQGDMRPDEDSAIRVCYPESFNKPVQLKGKLDFAPSTGNAVVDGALRQTRYVLNCMMTDLGGHAEQAVVEMAREMSVGVSKRNERESENNKNRRVRLDAEAEIRKHGATVTPSRVRRYILWVEQGKGHCPYCTKPITLSDALSGAETEYEHILPKSLTQVGLKRSEIVLAHRHCNQEKGNRTPYQAWGHDDHRWQVIQARAKYFTDNRQFRKAKLMLLEDFEAEVLTDESIDGFADRQFHQTSWIAKETAQWLQGVCKTPVSVSRGELTSMLRRKWKLETVIPQVRIEEGLPILDEEMQVVSVDDFERFRPVWEGHRAEDKANHTDRKLNKRIDHRHHLIDAIAIGLTSRALFQNMARQYKIDSEREARGQKARLEVAEPPIKNVRDIALAAVRECPLSIKPDRYPDGAIFQETAYGIAVKDGEDKARLVLRVKLADLIDRKKGTFEQARKAIQGIVSSIIRGIVSNEFERRIVAGKTAPEALALPIYHTLYGERVEIKKVKCFTSNYADDVAIISHTSKDGREHLKRLPNAGYAYLETEILDGRIGKQTLVNTHQAMKRKYKPKLEDMIRLHKGDTVLDSKDGKKYRIGYFKARGEIALAPITDPRAFDAIKEPYSGKKVVSFGQVMRLKRLD

SEQ ID NO: 648 - protein, 1037 aa, unidentified
  REGION 1..1037: note = Description of Unknown: Cas Enzyme sequence
MFGKMRYRLALDLGSTSLGWAMVRLDKENQPCAVIKAGARIFSDGRNPKDGSSLAVTRRAARAMRRRRDRLLKRKQRMMDALIKHGFFPATAAERKALETLNPYALRAKGLDKALTPAEFARALFHINQRRGFKSNRKTDKKENDSGALKTAIQKLRESLQGENCRTVGEWLNKRDNSGQTVRARYRQEKHIKEDGKSKIDKYYDLYIDRAMIEHEFDELWSKQAELDPARFNETARAELKDILLHQRPLKPVKPGRCTFLPEEERAPLALPSTQRFRMYQEVNNLRILRDGLKEEPLTLEQRDTLIFALEENNKCSFTRIKKLLGLSGAVQFNFEDPKRQELKGNTTSAILGKKDLFGPDWFKFDETKQDAIVMKLLTEESEETLVRWLQNETGVDEKTAEAIANAGLPEGYGSLSAQALARILPELRRDVVTYDKAVKAAGFEHHSKLGSDTEIPSITFKTERIDLDTGEIKAFHIHDKLPYYGEYLQRHVGFGSGKPEDTPEKRYGKITNPTVHIGLNQVRLVVNALIQRYGHPSEVIVEVARELKQNHEQRKEESKRQAENQDRNKRLRSNIAGILKISEEQVSRDDIEKMILWEELSHDVADRKCPYSGVPISASMLLSSEVEIEHILPFSQTLDDSLNNKTVSMRQANRIKGNRTPWEAKQDFEAQGWKFDDILARAGNMKKEKRYRFAEDGYKRWLKDDAGFLPRALNDTRHLSKVAREYLTLICPQATRVIPGRMTAMLRGKFGLNDVLGLNGEKNRNDHRHHAVDACVIAVTDQGLLQRFAKASASAREKQLNRLVESMPLPWENYREHVQRAVGNILVSHKPDHSHEGAMHNDTAYGLRDGGKVSFHKMVDGKRERTEESLKVIKISDAKAIERHGVLPTGEPKPYKGYKGDSNYCIEIVRNEKGKWEGEVISTFDAYQLVRQHGIERLRHPSLSVSGKPLAMRLMKNDCVKLQLDNEIITSRVCWVRTDTRIAFAPVSEANVDARDRDKGDQFSYIIKTASVLQKLCARQITITPIGELHDPGFKV

SEQ ID NO: 649 - protein, 1050 aa, unidentified
  REGION 1..1050: note = Description of Unknown: Cas Enzyme sequence
MPSAFRYRLGLDLGSTSIGWCVLRLDASFQPVALVRLGARIFSDGRNPKDGSSLAVTRRLARQMRRRRDRLLKRKARLMAALIRMEFFPEQPQARAQLAALDPYALRKRGLDEKLTPAEFARALFHLNQRRGFKSNRKADKKDSDSGLLKQAIGKMRERLAADGARTVGEWLAQRHVRRESVRARLRGTTIRDKAYDFYVDRGMIEAEFDAIWSKQAELQATLFTEPKRAELKDILLHQRPLKPVRPGRCTLIPEEERAPLALPSVQRFRIYQEVNNLRILTGSLQETTLTLEQRDTIAHLLENKGEASFTSIRRALKLSGATTFNLEDTKREKLKGNMTSALLSKPDYFGEAWRGFDHQKQEAIVDKLLDEASESALIEWLKAETGVDEAHAENIANARLPDGYGNLGRTAISRILPVLQAEVLTYDKAVVAAGFSSHSALSHAEGTGEIMAELPYYGEPLQRHVGFGTGVPEDPAEKRYGRIANPTVHIGLNQVRAVVNSLIKRYGHPAEVVVEVARELKQGREKRLELQKEQKARQDQNERWRAEIKAATGIDAKPLDLQRMRLWVELNPQDVASRCCPYTGEPIGIARLFSDEVEIEHILPFSRTLDDSLNNRTVAMRRANRDKCNQTPFEAFGHSPPGYDYAAILERAKCMSREKAKRFAADAYEKWLREDKDFLARALNDTAYLSRVAKEYLSLVCPPNRVRVIPGRLTAMLRGKFELNSALSGNSTKNRDDHRHHAIDAAVIAVTDQGLLQRFARANRDAQEKGLHRLVEDMPLPWPHYRMQVINAIERVLVSHKPDHGYQGGLHNDTAYGLREGGMVAHRVPLDRFASTEAIEKTVFADANAQQWLLDKTRGLSGKELASRLQELGRQSRHVRVLEKLKVLAFSSQKANGRHGTDDNGQPAAYKGYQGNSNYCIEIVRNEKGKWEGDVISTFDAYQIVAKHGETALRDPTRSRSGLPLIMRLMIDDAVVMESDGKCEVYRVVKIPQSGQMSFAPVNEANVNARNSEKAFAYTTKYPGSLMSAKGRRATISPIGLLNDPGFTG

SEQ ID NO: 650 - protein, 1240 aa, unidentified
  REGION 1..1240: note = Description of Unknown: Cas Enzyme sequence
MPNFWSIFTENLQTYLMKTRILGLDTGTNSLGWAVVDRDENNQYTPICRGDLIFTEGVKQEKGIEFSLAAERTSYHASRRHYFRRRLRKVEVLKVLVKHKLCPPLSDEALNRWHTKKEYPLDEDFILWQRTSEADNKNPYHDRHICLHRKLNLKDSQTDRYTLGRALYHLTQRRGFLSNRLDNNEEAEETGKVKSAISELSKEMKEAGCEFLGDYFYLLYRTEGNRVRIRSRYTDREKHYLQEFKEICRVQELDEDLAKALEKTIFFQRPLKSQRQGVGKCTMEKGHSRCAVSHPLYEEYRLLCYLNNIRIKTPSDDRLRPLNAEEREKITPLFYQKSNFDFKKIAKKLAGKTPFGWIRDEEDWPYQFNYRMTQEAPACPTTAQLIKVFGEDWKAALAETYTMSTKQDGTLKTEDEICTDIWNVLYSFSSKEKLKEFGLKKLQLDEVQAKAFSEIRLTRDFASLSLKAIRKILFFLRTGEDYSKAIFLANIPTIVGEEIWSNIERRSRLLYKVDLALRPQEENEAEEHRTIAERIKAAVAAEVPDAPIDLLYHPSMIEAYPDAKRNERFDCYQLGSPKTNAVRNPMAMRSLHMVRKVINHLLRKHIIDEKTEIHIEYARELNDANKRQAIADWQRELSKRHTEYAKNIQKLYKEETGSEIEPIKTDILKYQLWEEQKHVCLYTGKKIGIADFLGANPKFDIEHTIPRSRGGDSTQENLTLCESKFNRDIKRDKLPTELANYEEILARIEHWKKQCYALKLKRDGIRTHSGLEKSIKDSKIRRRHLVGLEYGYLKGKYDRFTMKEVPEGFSRRQGAGIGLISKYAGLFLKSLFKDPKNPNRSNVYVVKGAITAEFRKLWGLQQADEAKSRENHTHHCIDAYTIACIGPCEYAALAAYYRSDEEFKYGRRREKPQFEKPWPTFTEDLLKLQEELLIVHQTTDKLGKRDRRKVKTPRGKFLTGGDSARGRLHQETYYGAINYDGNIKYVVRKPLDSLTEKDLDKIVDETVKGIVKGAVEAKGSLKEALADGIYMNKEKGILIRRVRIFTRLTQPLTLRSLRDQSQKEHKRKVYVTNESNYMMAIYEGVVKGKTKREFDLVNNIEAAKFFRKGNNRAQGLPLLPEKSASDFPLKHTLKIGTLVLLYETSPSEIDFSDPKDIAKRLYKVVGLSTLHINKYIYGIISLRHHQEARPTGELKFKNGEFRNGEALRPAITMLHSQLNALVEGQDFDLDITGKITLKRP

SEQ ID NO: 651 - protein, 1042 aa, unidentified
  REGION 1..1042: note = Description of Unknown: Cas Enzyme sequence
MRTLGLDIGTASIGWTVLDDSGKTGTIIASGVRIFPEGVDRDQQGGEQSKTQARRESRGARRQIARRSRRKRFLIRYLQSVGLLPTDEAEFEEVIGMNPYPLRAKALDEHLSAYEIGRVLIHLNQRRGFLSNRKTDKAKASETKGMLAEISALAGRIEDTQCRTLGEYLYKIGTGEIESVEDEPKGIRNRHTRRDMYEHEFETVFEKQRAYHPKLLSDDVHDRIHRRIFFQRKMYWPKSVIGSCDLERRLKRCPIADRAAQRFRIVQEVNNLKIVDRSTGEERRLSPEERAITIDYLSTGKSRTFDQIRKKLKFAEDVRFNFEKDDGGGRDKLQGHFTDATLSGKNVLGKGYWDIDDRIKDRIVKILIEEDREDVAISALVNQCGLDHEQAERASGAHLPDSYANHSKYVIKKLLPYLEEGKFYMGNDESDSALHAAGYLRPDEQVIDQQTLLPESPDLPNPIVRQALVEVRKTVNAIIREHCKDRTQNDEKPFDRIHVELARETKNSFEKRKEIRFENAKRRKIREHAGDEIAKAGDKVTRSKINKYLLWDEQNRTCVYSGESISFKQMLSDATDVDHILPRWRSLDDSMANKVVVFRNENADKGDKTPYEWLADSDPEKYDEVCFRAWKLGNYKYRRFTQKELELDQFVARQLVDTQYISRCVTQYLQCLGAKMVMPRGSMTAELRRRWKLNNILSDDGEKTRADHRHHAVDAITIALITQARIQRFAKSRGDGQLCPWPDLRQQAEQSVKNITVSHRVLRRLSGALHEDTFYGPTQKFKGDDPEHRIKPGSVGHGINRMHAKDWTEDPGTFVRRKVIAEVKNAKHLAKVRDKGIREILANHLRGMDVDPFAKAAYPKGCFEGDNAPTMPSGVPIKRVRLLENKSTLRQVSNRREFHFTQPGNNHHITYRESTDKKGNPTWIGEVTTMWDAAVRGRTKINGKSLPLVDQSDTDAGKFVMSLSIGELFEIDDPKGELGRILCVVRKMDQGNCRLYYKLHTDARTAGDLKPLNLYVSPANMHKFNARKVTVTPVGQIRWAND

SEQ ID NO: 652 - protein, 1044 aa, unidentified
  REGION 1..1044: note = Description of Unknown: Cas Enzyme sequence
MLYWLGLDLGTNSIGWCLFDLDANGNPCDVRDIGVRIFPDGRNPKDKASNATTRRVARGMRRNRDRYLKRRNRLMGKLVEYGLMPADAEERKALERLDPYELRARGLDEALTPFELGRALFHLSQRRGFRSNRKADGGGEADDKEVGKIKGAVNKLRNAMEEEGDRTLGEYLNRLHRERRPVRARLTGEGARAEYELYADRGMVADEFDRLWAAQAAHHPDILTDAACEDIRDTLLFQRPLRPVTPGRCTFEPDDGRAPWALPIAQRFRVYQELNALRIAERAGASARPLSLKERDRLADKLLTTAKQDFPQLAKLLKLGGEAFFTHETETRKDFKGDQTAAVLAAGKRFGKAWRDLAPAAQGEIVEKLLAGEDEEVLVAWLRDSHGLDEAAALAVSGARLPQGHCRLGRKALARIVPHLEADVITYDEACRRAGYESHSAFDDGVVYDRLPYYAKVLERSVAFGTGEPADPNEKRLGKVANPTVHVCLNQLRRIVNAIVAKHGKPAAIHAEVARDLPLSAREKAIRKSDQTRNKKLNDDRRARRAEQGLADTYDNRLRLRLWEELNPDDPANRRCVYTGEPISITRLFSNYVEIEHILPFSRTLDDSAANKIVSLRRANRDKGRRTPFEAFGHSPLGYDWTTIAARADELRPNKKWRFAEDAMERYDNMERDFLDRQLVDTQYISRLAASYLSALRPDKGVTVTPGRLTGMLRYEWGLDSILWDHNLADPEHKNRADHRHHAIDAAVIAATDRGLLRGVATAAARAEEQELSRLVVGVPEPWAGFRDDLKRAVEDIIVSHKPDHGRQGRLHEDTAYGIVAAPETEGGATLVRRKPVTELTKKEIAWVRDPVLRGEIEAAVAGAASDRERRLALASFAERTGVRRVRVLKPEADFRVIRHGPGGEHAKAVIPGENHRIDIVEDAKGDWRGEAVTLFDANRPGFEPAWAKQYPKPRLVMSVRKGDLLKLEHDGNTRIMWVVRLNMSANRFYMVEHNQAGDFQKRHDNPDDPLRWAFVGFGSLKGRKARSVRIDAIGRVFDPDPPP

SEQ ID NO: 653 - protein, 1077 aa, unidentified
  REGION 1..1077: note = Description of Unknown: Cas Enzyme sequence
MQYRLGLDVGTNSLGWAAVQLKENEDLLMPGPLLDMGTRIFSDARHPKDKSSNAGQRRGPRSMRRNRARKIMRREFMLRALVKYGLMPGDKTERKALERDDPWMLRAWALDKRLTPYQIGRALFHLQQRRGFKSNRKTDGKDGGKLKDGIEQAEQMMAVSNARTLGELFGKRRLEREQENAKLPKGQRQPQRLSRVRSSGEGAKLTYDFYPQRDMILDEFELIWAAQSTHHPQIMTDGAKAHLYHILSHQRPLKPQKSGKCTFLPEEPRAPKALPTAQYVRILQEVNNLRVGATGEAQRELNLEERAEVIKHLTHNYPKKIPKTAKRTFKSIRSLLSLPESQIFSHETTKRDHLVGDLTAATMMQKDAYGPAWFDLSCAQQDDLISYLIESEQFDDWAHDGEEVQGFGPYAAETFGLSEDHARAVFDTHLKDGHGKLSKAALDRLMPHLEAGLRYDQAKEKEFKNSDLGDGEMHDEGLPYYGEILGRHTAFQKDDPKNTEEKYGKIANPTVHVALNEIGKLINDLIKRYGKPTQIVLELARDLPLSDRGLRELESRQKKNQDANDARRAELAGMGLADTYNNRLKLRLYEEAEKAFGGVIVCVFTGETINKTNLFSDNVEVEHILPLSRTLDDSIANKVLSVRRANREKKNRSPYEAFGESSDGYDWEMIAQYARDLPNNKRWRFDPDAMQKWEERGGGDFLARHLNDTRYIARLGKKYVEALYGGQVQRGQSRQVWVVPGRLTSDLRHFAGLNNLTGLTGGNRKDRTDHRHHAVDALVIALTDQAMIKRAADLAKREDKIAHYEIMQVMAEPLQRYRREAEDRLSKLVVSHKPDHGIQDAMHNETALGLTDAKDTKGQLIVVTRKPLEALGPKDIEKIVDPQLRWLFASATEGLTGKAFTTALSDTGKAQNPPVKRVRIHMPMNEKSLVTIKHGPNGEHVKAYKGDGNYCYDVWMGDKGKWVGEVITTYKAYQMAQGDPKWWQSLKGREGQNLIMRISKGDMLEIDWHGQREIVSVYKFSFGKINMAKHFEANASARVRNKELEPIQMSHGSLQKANAVRVTVSPSGKVKRHKHNS

SEQ ID NO: 654 - protein, 1081 aa, unidentified
  REGION 1..1081: note = Description of Unknown: Cas Enzyme sequence
MATFKPNPINYVLGLDIGIASVGWAMVEIDEEENPIRLIDLGVRVFERAEVPKTGDSLAAVRRLARSVRRLTRRRAHRLLRARRLLKREGVLQAADFDENGLIKSLPNTPWQLRAAALDRKLTPLEWSAVLLHLIKHRGYLSKRKNEEQTADKELGALRAGMKSNTQALKTGNFRTPAELALNKFEKESGHIRNQRGDYSHTFSREDLQVELVLLFEKQKEFGNPHVSDGLKEGIETLLMAQRPALSGDAIQKMLGHCTFEPTEPKAAKNTYTAERFIWLTKLNNLRILEQGSERPLTDTERTILINQPYKKKLTYAQARKLLGLEDTAFFKGLHYGKDNAETSTLMEIKAYHAISRALEKEGLKDKKSPLNLSPELQDEIGMAFSLFKTDEDITGRLKDRVQPEILEALLKHINFDKFVQISLKALRRIVPLMEQGKRYDEACAEIYGDHYGKKNTEEKIYLPPIPADEIRNPVVLRALSQARKVINAVVRRYGSPARIHIETAREVGKSFKDRKEIEKRQEENRKDREKAAAKFREYFPNFVGEPKSKDILKLRLYEQQHGKCLYSGKEINLGRLNEKGYVEIDHALPFSRTWDDSFNNKVLVLGSENQNKSNQTPYEYFNGKDNSREWQEFKARVETSRFPRSKKQRILLQKFDEDGFKERNLNDTRYVNRFLCQFIADRMRLTGKGKRRVFASNGQITNLLRGFWGLRKVRAENDRHHALDAVVVACSTVAMQQKITHFVHHKEMNAFDGKTIDKETGEVLHQKTHFPQPWEFFAQEVMLRVFGKPDGKPEFEEADTPEKLRALLAEKLSSRPEAVHEYVTPLFVSRAPNRKMSGAHKDTLRSAKRFVKHNEKISVKRVWLTEIKLADLENMVNYKNGREIELYEALKARLGAYGGNAKQAFDPKDNPFYKKGGQLVKAVRVEKTQESGVLLNKKNAYTIADNGDMVRVDVFCKVDKKGKNQYFIVPIYAWQVAENILPDIDCKGYRIDDSYTFCFSLHKYDLIAFQKDEKSKVEFAYYINCDSSNGRFYLAWHDKGSKEQQFRISTQNLVLMQKYQIDELGKEIRPCRLKKRPPVC

SEQ ID NO: 655 - protein, 1217 aa, unidentified
  REGION 1..1217: note = Description of Unknown: Cas Enzyme sequence
MKQRILGLDTGTNSLGWAVVDRDENNNYELIKKGVLIFQEGVKIEKGVESSKAAERTGYRLMRRQYFRRRLRKIEVLKVLIKYDFCPAISEEDLKLWHVRKIYPAKPEFMEWQRTNDDTDQNPYACRYVCTTRKLDLTKVGDRYTLGRALYHLSQRRGFLSNRLDKSGDNSEQSVVKKGISQLSQEIQSAGCNYLGEYFYKLYKEFGNKVRIRTKYTDRETHYLAEFNAICAKQNLPKEMRDELAKALYFQRPLKSQRMSVGKCVYEKNKSRVSTSHYAFEEFRMLSFVNNIRIKTPKDDAPRPLNQEEFQKIEKLFYRKSKPSFDFEDIAKEIAGKGQYMHRDDNADKPYVFNYRMSQGVPGCPTIAQLRSIFGTAWKTGIAELYTLNLKRNGVEKTLDEMADDVWNILFFFDSEEKLAEFATEKLQLDTELAKKFSKIDLNRDYASISLKALRKILPFLRCGMGYSHAVFLANIPTILKNDIWAFQPENSKVINKIADIVEHPKANCEKGQSLEDKVKDYLKMEYNLSDEEVAPLYHPSMMETYPEARANKDGVILLGSPLTNAVRNPMAMRSLHQLRKVVNSFIQDGTINRDTIVHIEYARELHDANQRAALYQWQREQERKRAGYAAAIRDINVEPTDTDILKYQLWEEQGHQCPYTGREIALTDFLGASPSFDIEHTIPRSVGGDSTQENLTLCDSRFNREIKKTKIPSQLSNHEEILECIKGWKKKIDDLSKQIDKLSHGRSADKKSNDARIQKKNKLKMERNYWQGKYNRFTMTEVPEGFARRQGAGIGLVSKYAALYLKSYFKDIEKPERNMVYSIKGTVTAEFRKMWGLQELYEKKSRDNHAHHCIDAIVIACVGKREMDASASYYRRAEERKWTGSSDKPHFAKPWPTFTEDVKHIAEDLLVVHHTSDNMPKKASRRVKVKGHGKKVAQGDAARNRLHNETYYGAIERNGEIRYVVRRDITSFESIKDLDKIVDDVVREKVIQAVKGKTFKEAIAQPIYMNEEKGVLIKRVRCYVPSVKSPLHIRRHRDQSPKEYKQQCHVVNDSNYCMAIYEGEVRGRLKREFKLVNMLDTAAKFKCSGGERGRALVEKQSANKLPWKQTIKVGTNVLLYEKNPSEIYKLDTKGLSDRLYKVVGLSSMFVTNSYYGVIFLRHSAESRPAKDIKSKNGAYKQGEMLRPAITMLHTQLNVLVEGQDFKMNPLGEIIFK

SEQ ID NO: 656 - protein, 1120 aa, unidentified
  REGION 1..1120: note = Description of Unknown: Cas Enzyme sequence
MAAYRIGLDVGTNSIGWSVLELNGAGEPCAARDTGVRIFNDGRDEKSKATLKADRSEARSARRRRDRFKQRQTFLLTFLTKSKLFPEDESKRKDLQLLNPLELRAKALSEKLEPYHIGRALFHLNQRRGFKSNRKDRSEETTSGKVSNSVRMLLEQMHLIDPPMPAEEYKGLSKTDKKQVRQEEAENRNLALKNLAMQSKLTYGSFLWQRQQEGKQTRARPGAGDNGKLYDVYPTRELYEDEFKKIWNAQTKHHPALMTDEVRERIRHIIFTQRPLKPQQRGQCQFLPEEKRTFRAMPSFQRYRIYQEINNLDWIGSSGKCFLKDYPAARDAIIGITERPTLKEKPTAQNAQVSFHKMKKLLKQMDLAEGNFAFNFETPKRNGLDGNQTSNIMQHEDYVGEAWHDWTLEQQDDFIALILDDTKTDEDVRCELINRYKLSEHAATSCMNAPLIEGMASLSLKAAGLLLQKMRDGYHIQSDAIIAVAKEVEKFVNPFIRAGKGEMLSELPYYGEAFSDGRHIIPGDRQEADRHDDLKYYGGVTNPTVHIALNQIRHVVNELIHRYGHPKSIAIELARDLPAGKEGRAAINKEQADNQEKNEKLDEILRDLGQTINSGNRLRLRLWQELDENDPNGRCCPFTGKKICKADLFGDSIEIEHLIPFSISLDDSRANKVLCTRQANRDKGNRAPFDAFGNSPDGYSWGDILERAKQLPKPKQWRFQEDALKIWKRDYSDFTERHLNDTRYIGRLAKEYLENICLFNKIDVLTGRLTALLRGYWGLNGILGDHNQAQETKKNRNDHRHHAVDAIVIGMTSRSMLQKVATAANRAEELHLDRLFERSANGKNPIDPWPGFRNHVKEIVNKILVSYKPKRKTLGKNTTDGQLHNDTAYGIISGPDKQGRYNVVVRCPIQEFKKRQHVEAVRDTQLRAEFLQAFDAEGPTGVARLAGDKKIRRLRRTETLSVIPIRDKFGKGYKAYKGDSNWGMEIYEYPKGHKKASQWQGVVISRYEANQDSFRLGYTQKPHPAARLVMRLQIDDCVEIEQGGLKQIMRVQKLSRNGSLDLAPHNEANVDARNRDNDDPFKYLNITASKLKESNGRKVHVSPAGRVSYEQRRKPRRKNE

SEQ ID NO: 657 - protein, 1423 aa, unidentified
  REGION 1..1423: note = Description of Unknown: Cas Enzyme sequence
MDDIVLGLDPGSNSLGTVVRDMSNDKLSDQIVYYSVDTFESTVIKGVSLAAQRSADSRQRRQHRVRRDRLWATLNVLIKYHLCPLKQEELDAWRIYDKRRGYFRKYPIESKEFAQWITLDFNGDGIPDYSTPFELRHLLVTEKLDFNLRHNRYLLGRAIYHIAQHRGFKSSRLGIGKSSDDVEEQEGDEEDIITQLERSETKKKGKLQAYMDNHIPIIKTVGSAFHLLLTEGENDGTGSPIRVRASEYEAVRSQLYEEIETIFDFQDCLHEETECLDRLLSDKKEYGSIFYINPPRINRKSIGTCILEPDKKRCLESHPEFEKFRAWSFVNTIRIRNSDGVMEPLPFMLREEIFRELFMGRVSDFHFKLIRKLIQKRLGIEKLVFSSEPNKRTINYPDDNLIPACKVTKRLIDLFGDNWETGGKAIEGKRRRGHGKNHPPRQIVYRPMDVWHQCLSIDTLEQLESYARQKLGWTDDDKIDKLKKLWSSISKNRCTLSHKALYNINYFLQQGLGYSDAVFFAKIPDIVGAEAWNSKKNDVFDYIKNGYQSLKDEIKSQSMIVAITNRLIADFKTQTEENQDSDKKRGYDTTLTSDYCEKVIDPFIQRHFGEVTWKSFTSVYRQAIKDSVYKEYTLFLQDPKRDFRKLPKLGEELAKIMVSNYFTDKSLADDFGKLYHPSQISRFRPVEVTGKGMRLGSPSLGNIRNPVYLRAMHILRRKVNALLDAGIIHLEDTRVVLEVPHEINDANMRRAYSLYQSRQEKEKQCILAALGKDQKYTNEEIEKVILLVHSNKNYIGEDTPIEDKSDSKSRNERRYKEWIKEGGICYYTGNPIKLEDLRLGERNSNSKVDVEHTIPRSLLPDNTRKNQTLCFSYYNRFDKGNILPALLPEFEAEISPRLQPIREKVERIKKEISFCQSKARGSSEKNWKDYWIVKRHVWEMELEYWQGKLTRFTAKDVPDDFRRSQLTDTALIAKYAALYLRSIFHRVDVQKGAVTALFRKLYSFQEKDRTSHCHHAIDAAVLSLIPPSAQRDRIIKLYYEREEAEQASEKRRITQEINKEIISARLGLSLTGLQKSVKYIERKIRESVLVNWNTTDRRLKPNKRGDSIRLDLHEKTLHGIVKTVKKETDKKDGTVNVTRIPRPVIRVTLSKLTTTDDIVSFLNNIVDGKLRNYLKAVYDRRKKEGVPLKDILKNIEYGSSKNGKHHPLRHVRCYKDSNLSYERLIPAHHHIFQRDNAPEYKKTTFVKSRENSLLLIYEHVNDKGVSSWIGRYITGFELSKVANIFRKHHIGIISTINDIPEEIGWHSYIDKTTPIEYRLKYVLKPGIRILISEKKQNWKKMSAVKLLKQLRIIVKFNEADGIWLCHHTQVKEYSVEQENGKMKTKRQMSKRKIGNIMSEDLLIEHVHFEINLNTSTDRLFTWL

SEQ ID NO: 658 - protein, 1234 aa, unidentified
  REGION 1..1234: note = Description of Unknown: Cas Enzyme sequence
MSGKKILGLDLGTNSIGWALIEVANNERKIIAMGTRIIPLSTDEKDEFDSGNSISKNQKRRQRRAQRRGYDRYQLRRKALTEVLMQNKMFDPQLFNLDKLTLWGIRAKACTEKIELTELGRILYHLNQKRGYKSVSKNENKKETEYVSEVKNRYQLLKESNLTIGQKFYQELSANPFYRIKEQVFPREAYMEEYDKIMACQKQFYPEILTDELITKIRDEIIYYQRGLKSQKDLVSVCDFEGKWIKHNNKEIFIGPKVAPRTSPLFQVAKIWETINNLEIKNKKGDKLFLTIEQKQKIFEYLDNNEKLTQTELFKILGIKKEEGWYGSRQLTNGLQGNITKTKILKILNNHKEYAHLIRFALNIDENEQKTYLYDRKTGEVLDERPQKVINASFEKEPFYQLWHTIYSIKDEKECAEALVKRFAIDENTAFELAAIDFVTPGFGNKSARAIRKILPYLMEGYKYSDACQLAGYNHSFSLTNSEIYQKQLKDKLELLPKNSLRQPVVEKILNQLINLINAIIDEKQGWVTREERLNNQFEIRIELARELKQSKDERYETYIRQRRRERENAEIVKELETSYGLRPTRNNIIKWRLFHEINNEDKKINAVCLYCGKTFGINDALSGEMVDVDHIIPRTLFFDDSQNNKILVHRACNASKGNLTAYDFMKLKGEQAFKEYTDRVEFLHNQKIISKVKRDRLLTPGNEIPDDFIERQLRETQYISRKSREILNQICYNVWSTSGGVTEKLRKLWGWDDILMQLQLPKYRELGLTEEIVIENSDGTLQKKEVIKGWTKRNDQRHHAIDALTIACTEQGFIQRINTLSSEKTRNELYNEVKDIKFNEKLTLLEKYLIAQRPFTTEYVKDKVSQILVSYKSGKRVATKGRRIIQINDRKIVAQDNILVPRGPLSEESVYGRIKIIEKDKPISYLFENPHLIVDLRIKELVETRLQQYQNDVKQALKSVKKEPIFIDDEKSKVLEKAHCYVEKYVIKYPVESIKQKEVDDIVDEKIRQIIRQRFLSVSKESDAFKEPVYFDEQKKIPIRSVRMFTGLTSVEPIRWDENNNPIAFVKPGNNHHIAIYMDENGNYQEHACTFWHAVERKKYGFPVIIENTAEIWNRILANPDKYPTSFVEKLPADKLQLVYSMQQNEMFIMGMQSDDFHMALQKKDYRLLSNHLYRVQKLSASYYVFRHHLETEIDDSKEALTSKRYIRIQSLKAYFEYNPYKVRINYLGQIVI

SEQ ID NO: 659 - protein, 1399 aa, unidentified
  REGION 1..1399: note = Description of Unknown: Cas Enzyme sequence
MKRKIIGIDLGVNSIGWAYTSTNENKINDTKIIDCGVRVIPLSADEIKNFEEGKKLTTNAERTSDRSARRNLQRYKLRRKELIKNLIDFGIINDNSILTEMGKNSTYELLELRAKACKSKIKLTEFARVLLKINKKRGYKSNRKLRSKDEGKAINSIEIAKIIYENNLTPGAYSLKLLNDGEKYIPDFYHSDLKKEFKKIWVKQSQYYTEIFTQDLYDNLIDKNQKQTWAILHKNFNITGKKRKGNKQEQRLENYQLRVKGLSEKLELEDVAIVLTDINNQLNKSNNYLGNISDRSKELYFKNLTIGEYLLNIIKKDRHKSLKNIVFYRQDYMDEFEKIWEMQAKYYPDILTEDRKKIIRDIIIFYQRKLKSQKSLISICELEGKEKEIEIDGIKKTKIIGPRVCPKSSPIFQEFKIWQNLNNLTITNKRNNESYELNKEQKDLLFEELNIKGKLKDNKILKILGLKTSLWKLNFKEVQGNETNKKLYEAYQKILLLSGHDAEKLFDYPASYIKEFVIKIFDLLKIDSELTKFKLIENNKKFVEQSSYRLWHLLYSFEGDNSKSGNEKLIEKLNKKFNIIPQYGKIIAEVVFENDYSNLSTKAIKKILPHLKEGHKYADACSLEGYNHSKSETKDEKENRKLSDKLELIPRNSLRNPVVEKILNQMVNLINQVIDKYGKPDEIRIEMARDLKRSAKERENLTKNIRNQTKLHEKIQEELKKIPPFNQGVRITRKDIIKYKLWKELEPLGYKTLYTNTYVSLDKLFTNNIEIEHIIPKERLFDDSFSNKTLSTKSFNTWKNTRTGIDAMIEKYGSESKETTRYIKNVKELYNNEKISKTKYRKLLWKEKDIPSDFIERDLRNTQYIAKKSLQLLKQISKDIVSTNGKITDKLRQEWGLTDILKELSFNTYMALGMVKTETTKDGKKIKIIENWTKRSDQRHHVIDAITIAFTTAGHVQYLNQLNTIAKLKDFDQIPHEYSNLYGLKNNLTEIVKYKNGKKKLRFKKPMDNLREVVKNKLQEILVSYKVKNKTVTKNTNFIKVKKSTKNPNKIKRKNGYYVVQNCLTPRGQLHNETIYSKYIKKEIKIEKINAYFDKEKINMVTKPSYRKALLKRLENYDFDPKKAFTGKNSLKNSPIYTSDGKVVPENVKVIYEVEKFSKREPINEKIKIEKVIDKKIRDILNLRLKEYGNDPKKAFSNLDKNPIWFNKKEGIQIKKVRYKAINNGQALHEKRNHFGKLIKSENKTIPNDWVSTSNNHHIAIYQDKDGNLQEKPVTFFEAVERKMQGLDVIDKNYNNDEWHFLFSLKQNEMFVFPNPKNGFYPNQIDLKDKKNYKKISKNLYRVQKISSKDYTFRHHLESSVNRNIKDLTFKRISSVNNLKGVVKVRINHIGEIVQIGEY

SEQ ID NO: 660 - protein, 1361 aa, unidentified
  REGION 1..1361: note = Description of Unknown: Cas Enzyme sequence
MKKILGLDLGTTSIGWAYVNEAENNDVKSSIERIGVRVIPISTDEEASFQKGKSITINADRTLKRGMRRNLQRYKQRREALREILNQVGFIYKSTQLTETGHNSTFETHRLRAKAASEKIEKEEFARVLLMINKKRGYKSSRKAKNEEEGSLIDGMAVAKQLYDDDMTPGQLVYKILNDGGKFVPEFYRSDLQNEFNSIWGYQKNYYSEILTDSVKNELLGKGKKASVFFFSKELNIETAEAKGKQNEKRLQYYKWRSDAISKQLSIEEVAFVLCEINNNINSSSGYLGAIGDRSKELYFNKETVGQYQYKQLADDPHTSLKNQVFYRQDYLDEFEQIWETQAKYYIELTPELKTIIRDIIIFYQRKLKSQKHLISNCEFEMHHKVIPKSSFLFQEFKIWQVLNNLELKNIETREKFVPSQEQKEELFTELNLKNSLSKSQILKLLVEKPKLFDLNYKEVEGNRTNASFFEAYQKIFDREGYEMDFSKMNAAKIMDAVSTLFKDLNINTEILEFDSSIMGERLFEQPSYHLWHLLYSFEDDNSKHGNEKLLEKLKEKYGFKHEHAKILANVSLQPDYGSLSAKAICKILPHLKEGNTYDVACTYANYNHSSSKTKEELANRILKDKLDLLPKNSLRNPVVEKILNQMVNLINAVINDEKLGKPDEIRIELARELKKSAKEREEMTKSINAAKADHLRIIKILQDEFGIQKVTRNDIIKYKLYRELEFNGYKTLYTNTYIPQEQLYSKDFDIEHIIPQARLFDDSFSNKTLASRQINIDKSNKTAYDFLKEKLSNEEFENYISRVKVLQKNGKISKAKFNKLIMKGEEIPDDFIERDLRDSQYIARKAMKMLEEVIREVTTTTGRITNRLREDWQLINVLKELNLPKYRAQGLTETIIGKNGQPEERIINWTKRNDHRHHAMDALTVAFTKRSIVQYLNNLNARSNKSSSIYGIEQKELYRDENNKLKFKPPMLISEFRTVSKTHIDSILVSFKAKNKVVTRNINKTKIKGNDKFNQQITLTPRGQLHKETVYGRIKRYVTKDEKIGTKFDVKKVNKVANKKYRLALLNRLAENNNNPKKAFSGSNSPAKNPVFIDETHTFIVPDKVKLVWLEDIYTIRKDITPDLKVNKVIDKKIKEVLQNRLKEYDNDPKKAFVNLDNEPIWIDKENRVSIKRVTITGVRNAEPLHDKKNHFGEQIIDKNGKPMPVDFVSSGNNHHVAIYCDEKGNLHDEVVSMFEAVHRVNQGMPIINKQHQLGWEFLFTMKQNEYFIFPDDDFSPKDVDLLNPENAAIISPHLFRVQKIGSLLSGFWFRHHLETTIENIKHLKGKSYKIIQSNNNLKGVVKVRLNHLGQIVHVGEPPH

SEQ ID NO: 661 - protein, 1452 aa, unidentified
  REGION 1..1452: note = Description of Unknown: Cas Enzyme sequence
MNKKILGLDLGTNSIGWAYVTEGETQNESEIKQIGVRVNPLTVDEQTNFEKGKPITTNADRTLKRGARRTLDRYQLRREELRKILLQHSIITQNTLLSEDGKGTTFSTWEYRSKAANEKITLEAFARVLFAINKKRGYKSSRKAKNEEDGKAVDGMGLAKKLYDEKITPGQLVFQRLMEGKKNVPDFYRSDLQAEFDKVSSFQKQFYPEILTDELYQALKNQGKENTRKRILAIAKVYTADIKELEDSLKNVNTIKLHARDQKKLQAYKWRSDAVSKQLEKEQMAYVLTEINNNLNNSSGYLGAISDRSKELYFNHQTVGQYLYQQLLTNRHTKLKNQVFYRQDYLDEFEKIWTTQASFHPQLTEALKEEIRDIIIFYQRKLKSQKGLISFCEFESKEIDVSTGSTSKKKTVGMRVTPKSSPLFQEFKIWQNLNNVLVRKKGSKKRVVKSQQQPELFETEQEIFNLSGEAKQAIFDELNIKGNLSSAAIISILGYKPTDWEMNYTQLEGNRTNQVLYNAYLKILEQEGYNEDLLKLSDKDEIDVKELKTPAAEIRQMVKAIFEVLEINTDILVFNPELEGKDFENQASYQLWHLLYSAEDDTKKYSHEDIQLYGNDNIGLKKQLCAKFGFKPDHTKILANVVFQDDYGSLSTKAMRKIYPYIKESKYSDACELAGYRHSKNSHTREELASRTLKPKLDLLKKNSLRNPVVEKILNQMVNVVNTIIDKENDVLEKERKEPNFQFDEIRIELARELKKNAKERAEMTTNINAAKSAHDSIVKLLQTEFGVPNPTRNDIIRYKLYEELKNTGYKDLYTNTYIPRDILFSKQIDIEHIIPQSRLFDDSFSNKTVVYRTDNLAKGNLTAYDFIAQKGADALKAYEERVENLFKQKENGISKAKYKKLLMPESEIGDGFIERDLRETQYIAKKAKEMLFEITRSVVSTSGQITDRLREDWDLVNIMKELNLPKYRALGLTEMEERKYGQQVEVIKDWTKRNDHRHHAMDALTIAFTKHGYIQYLNYLNARKNERHKLHGNIIAIETKETEMQIDDQGNRKRVFKLPIKNFRQIAKEHLENVIVSHKAKNKVVTKNKNKVRGSNKVQEALTPRGQLHKETVYGRYQFYEQKEEKVSGKFDKETIKKVSNPLFKQLLLQRLEENGNDPKKAFTGKNTLEKNPIYLNVEKTEVVPEKVKLVWLEEDFSIRKDVTPDLKIDKVIDKAVRTVLEDRLKDFGGDAKKAFVDLDKNPIWLNKEKGISIKRVTISGVSNAVALNNKKDHHGKEILDAKGKPTAVDFVQTGSNHHVAVYRDEHGNLQENVVSFFDTVERVNQGLPIIDKTYKLSEGWQFLFSMKQNELFVFPNEKTGFNPNEIDLFDSNNKKLISPNLFRVQKFSKVTYGNSAVREYVFRHHLETTVDDKKELKEFTYKNIKSLGYFEGIIKVRTNHLGDIIGVGEY

SEQ ID NO: 662 - protein, 1385 aa, unidentified
  REGION 1..1385: note = Description of Unknown: Cas Enzyme sequence
MKKILGLDLGTTSIGWAYVKEAENSNEKSEIIKLGVRIVPLTTDEETDFQKGKSISINADRRIKRGMRRNLDRYQMRRSALIEVLKKNNFISDSTLLNEDGKKSTFNTYEARAKAPHDKVSKEELARVFLMMNKKRGYKSSRKIKSDEEGNAIDSIHVAKDLYENNLTPGQYVYNLLSKNQKNIPDFYRSDLQNELNKIWDFQSQFYPDVLSDELKESIQGKNKTQTWAILREPFNIVGIKRNTKVTEQKKENYLWRIKALSEKLGLEELAIVLQEINNEINKSSGYLGAISDRSKTLMINRLTVGEYLFSQLKKNPHNSLKNQVFYRQDYLDEFNSIWEKQKEYYSELTEELKKEIRDIIIFYQRKLKSQKGLLSFCEFESWEQKFKDEATGDIKTRTVGHKVIPKSSPLFQEFKIWQIINNLEITEAISGTVYKNDSIDMELKEELFKELNINEKLKPQEVLKLLVDEPKKYELNYQNGVEGNRTNAALYRAYQEILEMEGYGFRWKNKTADEKLNELEAVFNDLGIDTGILRFNSDIEGNAFDKQPAMQLWHLLYSFEGDNSRTGIDKLIQALEKKFGFKPEQAKIIAKINFGNDYGNLSSKAIKKILPYLEAGQKYDVACAHAGYNHSFSQTKEDIQNKTLKEKLALLPKNSLRNPVVEKILNQMVNVVNAIFDDKELGKPDEIRVELARELKKSAKEREEMTKNINKSTARHEQIREILKTEFGITKVTRNDIIRYKLWEELKGNGYKTLYTNTYIPREKIFSKEFDIEHILPKALIFDDSFSNKTLTVRQVNIEKGNQTAYDYLKERLSEEEFSQYEARIEKLLKEGHIGKAKFNKLRMKAKDIPDGFIERDLRNSQYIAKKAMQMLSEVVRNVYTTSGSITSKLRDDWQLVNVMKEINLPKYEKLGLVEIIEGKNGQSEKIIKDWSKRNDHRHHAMDALTVAFTKPVFIQYLNYMNARYDEQHRQHKNILGIEKNYMHRNKSNKLIFNPPIPVDEFRTEAKKHLKSILISFKAKNKVVTRNKNKIKIKKGQKIQDALTPRGQLHKETVYGKLKRYYTKVEKVNTSFDRDKIEKVSDKLFREALLKRLAENNDDPKKAFGGKNAPSKHPVIISPDTKSVVPEKVKLTWFEETYTMRKEITPDLRIDKVVDNGIKEILQKRKEKYGNDAKKAFSNLEEEPIWLNKAKGISIKRVTITGVSHAIPIRYKKDHFGQYLLDTDGHKLPVDYVSTGNNHHVAIYKDEQGNLHEEVVSFFEAVIRKNEGLPVIWKKHPEHPTWEFLFSMKQNEYFVFPSEDFDPEEIDLLDPDNAAVISPHLYRVQKIGSLLSGFWFRHHLETSVEINNKLKGITYKVIQSASHLKRVQKVRINHIGKIVYVGEY

SEQ ID NO: 663 - protein, 1509 aa, unidentified
  REGION 1..1509: note = Description of Unknown: Cas Enzyme sequence
MKKILGLDLGTNSIGWALVDQNFEEKQGNILGLGSRIIPMSQDILGDFDKGNSISQTAERTGFRGVRRLRERHLQRRERLHRVLNLLGFLPQHYSDKIDFGKRMGKFLPETETKLVYNEQNDFIFKKSFEEMLHDFRKSQPDLVTNGRKVPFDWTIYYLRQKALTAKIEKEELAWLLLNFNQKRGYYQLRGDEEEENQNKLVEFHSLKVVDVTADAPQKGKSEIWYSIMLENGWIYRRASKNPMFDWKNKTKDFIVTTDLNDDKTVKTDKDGKEKRSFRAPNEDDWTLRKKKTESEIEKTRGTVGQFIYNTLLWNPNQKIKGKLIRTIERKFYKEELKQILTKQVEFHPELKNTDFYNACIEELYPHNESHKNSLQNKDFVHLFIEDILFYQRPLRSQKSLISNCSFEYRSYVVEGIKKSEPIKCVSKSHPVYQEFRLWQWIQNLKIYTRQMDENVTPEYLFSEDDYVRLFDFLNERKEVEQKILLKYFKISEKTHRWNFVEEKKYPCNETHSMIKSRLEKVENFSPGFLTPEIEEKLWHLIYSVNDKIEYEKALKSFAVKYKLNAESFLENFRKFPPFKNEYGAYSLKAVKKLLPLMRMGKYWNNENIDSNTKVRIQHLLTGEFDESIRERVRDKAITLTNESDFKGLPLWLTSYIVYDRHSENAEIGKWNSVKDLENHLASFRQHSLRNPIVEQVITETLRVVKDIWSQFGSGEKDFFNEIHIELGREMKNPADKRKKMTERIAENENTNLRIKALLMEMLNDSNVENVRPYSPMQQEILKIYEEGVLNSDTEIPEEIEKISKQAQPSGSDLMRYKLWLEQKYRSPYTGEIIPLNKLFTPAYEIEHIIPQSRYFDDSLSNKVICEAAVNKEKTNQTGLEFIKNHHGQIIETDSGKKVRIFSEDEYQEFVKLYYNKNRGKRNKLLLDDIPEKMIERQMNDTRYISKFVMQLLSNIVREETSKDDGVNSKNVLASNGQITSVLKTDWGLNNIWNDLIIPRFERLNELTKSQNFTTYNERYQKYLPAVPLELQKGFQKKRIDHRHHAMDALVIACATRNHINYLNNQNALDKKKSKDQKQVAREDLRAILCDKKYNNGSNSNYQWVFKQPWETFIPEAKQKLETTVVSFKQNLRVINKTTNKYEKYINKEGKWLKEKVEQTTGDSWAIRKPMHKDTVAGHVNLRERKRVNLSAAIDKWEMLVDKNLKTKIKQLINEGFDKKKIVKFFADIEYKWMSKDVSKPELYYFSDEKEMLVASRVSLDVSFNEAKINSITDTGIRKILLKHLEQKQNNPEVAFSPEGIEEMNQNLTDLNDGKPHQPIIKVRTFEPKGNKFSVGQSGNKKEKYVEAAKGTNLFFAIYLDKEGKRSYETIPLNIVIERQKQGLAPCPEVNADGLNLLFYLSPNDLVYVPTQDQLIQQGVILEDDILHNRIYKFMDSSDTIANFIPNSFATTIFKINKNEQLKLGIKYPIQNELGVGSPQSKNQKALTGEMIKDVCIKLRVDRLGNISL

SEQ ID NO: 664 - protein, 1034 aa, unidentified
  REGION 1..1034: note = Description of Unknown: Cas Enzyme sequence
MKKVLGLDLGSNSIGWALMGETNGEVNQIIDLGSRIFNKAVEEKIPTPKNQKRRNMRLGRRILQRRARRKQKMIHYLISLDLLPQELSNNFGQEKLLNELGNPYELRTIGLDEQLELFEFGRVLLHFVARRGFLSSKKQIAGDLVDDPDTQAYLAEIDRQEQQKRAEKEAKLLAQGKTVKSAKDDQSEGAFKTDIADVYKMIKDAGARTLGEYLFNLKVGKVKRNRSHDGGHLRTDRAMYKDELALIWQTQQQYFNLPDEFIDEIEKIIFYQRPLKLKKDRVGKCSLEPKHYRASTARLEVQHFRYLQKINDLKYFDVWQEKNVPLIDEQKQKLRSLFENNPKITVARIKKELGLERKLNFDTDETTFKGNITACDIRDVIGDSWDEYSNKEQTQLFEDLLTIKKKSALKARLITHWDFDKQTAVKLALCEFEPSHSNHSLKAIKRLLPHLEKGLTYDKARVECGYGYEIVGIEAQDKLPMPQETSNPIVNKGMHELRRVVNAVIKQYGKPDIVRIEMARDLEMNTKRYKENEARQIKNQKSNEEATEVFRQETGKKYPSHDEKIRYRLWRDQDERCAYSGNTIALGQVFSATCEIDHILPFKKSLDDSYMNKVLCFEKENRNKADRTPIDTWGGDNDRWNQITQAISRWDKFLKSKIDRFYMQEEDLKERDFISSQLNDTRYISRLAQDYMRELGCDVNVTKGFVVSKIRHQWGFNDLIGETDKKERTDHRHHAIDAVVIASTSRSLYQQAVNQIERSKLKIPQPYDNILQELGEKLKHMIVSHTPQYKLSGGLHKETGAGYIKKHSALVYRKALSSELNIDKILDKTVKNIIEQHLEDFGGNAKAAFADGVTIYHKDGKTPIKRVRVEQSKIKTTKNKTAKDILNQSKFGVKDKSGKVFKYMSYGNTHHVEIIQNTKTGKIKGEFVTMMQASHRAKGINIPKQPIIKTNHGGEWEFLMALHINDTVSIEKDGGERVFYRVQKLDVSGGLTLRLNTASTISNKKEEIRTSISSLFKEYIAKHKVNAIGGLIDD

SEQ ID NO: 665 - protein, 1327 aa, unidentified
  REGION 1..1327: note = Description of Unknown: Cas Enzyme sequence
LDIKTIGWALAELENAGNRIRENWTPVRQQYENEIRYIFEFQNLLSVESDFFRVIHKAIFYKRPLRSQKGLVGKCTLEPTKERSPVSHPEFEMFRAWSFLNNIQYRDKNAEKSDWINLDMEVKKALFDQCFMRTKANFKFEEIKEFLTKHFNHHYAYNYKDKTNVAGCPISARLKNIFGDNWQNVLFTTIKTKTDKKGNNHAINYTIEDIWHVLFSFEDEENIIDFAENKLILTDKTKAFLNLWLAMPQGYSMLSLKAIKNINRFLQKGLIYTDATLLAKLPEILGEDLWNKNEKLILNNIKEITENNRKEKRILNIANNLISQYKAKSIEHNEQFAYKNTDYKLDNTDLIEVEKYCIESYGEKTWNEKLTEEKRISIKNEVFNLYQAFFASSKREYYKLPKLGDTLKSFLFDNFDFFHRFNTEKNEDNICTCNACKRLNQLYYPSEIEIYVPAKEKRIEYNSRLLSLKLLESPKTGSFKNPMAMRTLHELRKLINYFLLEGVINEETRIVVETARELNDANMRWAIAEYQKQREAENDEYEIAIMEMLNDPDFNGNANPKREEDIDRVRLFVDQYDVLEKGIEIINEELNNKSKKKEKKKIEKVDSFKKAPAFLQQIMQEKDFVKKYRLWKEQDFRCIYTGNIIKITDLFADNIIDFEHTIPRSISFDNSLENLTVCYADFNRNVKKKRIPYQLSNYQDILPRIENWKRKIERLQDNIEFWKQKSKKATDKTYKDIAIRQRHLWQMELNYWKGKYDRFTMKEVTSGFKNSQLVDTQLISKYALHYLKSVFSSVDVQKGIITSNFRKIIGIQGEYEKKNRDQHSHHAIDASVLTLIPKSATRDRMLKLHYEKLEKKELIRGNYNSTEVQNLELDIKKIESDLQFEIRKCKIGSAKSIVETIESNIVVNAITNDKTLCPAKKIIRRRGKPVPITDINNQPIYQTDDKGNIKYRTHKDGNLIYKRDENSNYVLDAEGNKIAIPIVNPKIAKGDCIRGQLHEESFFGAVKKVKRDDNNKPIIKNGKFEFEDGLFYVIRKDLKFKKNDNDTGFKTLSDIEKDIVDTHLFEAIKKQVEEADGSLKDAIDKGIYMLGKNNEPKKFDKHGNPINKIRHIRVFVRSTEPLKIKKQTYISGKPIKHLENRDHKQFYYANNATTPYYALYQGTVKNKTERKFEIINLFDASGLKKNNKLEVPEYVFLDKKETTKLYLHEVLKIGQRVLFFKKSPEDLYDLDNIELSKRLYHIRKFKKDGRIFFQYHKEARDDNHLKAYFLNSPNKTFAIDGASSINFENPEHRLILSIGNLDMLIEHKDFEIKPDGEIVFKETNKYL

SEQ ID NO: 666 - protein, 1638 aa, unidentified
  REGION 1..1638: note = Description of Unknown: Cas Enzyme sequence
MNKKILGLDLGTNSIGWALVEQDAENKQGKILGMGSRIIPMSQDILGKFDSGQSISQTAERTRLRGIRRLRERNLLRRERLHRVLNVLKFLPEHYSKEIDFENRLGQFFPEKEPKLAYKLTAGNTNEFIFKDSFHEMITDFKKFQPKLFYLKNSGEETKFPYDWTIYYLRKKALSERIEKEELAWILLNFNQKRGYYQLRGEEEEVQEGKEKTYEVLKVGQVIDSGEKINGKNLKLYDVIFENGWKYDKQIVKTEEWIGKTKEFIVTTSFQSSGEIKRTYKAVDSEQDWIAIKKKAEQDVLKSNKTVGLYIYDTLLQNPNQKIRGKLIRTIERIFYKKELFQILEKQKEYHPELKDLHLYKICLNELYKQNESHKNNIAQRDFTYLFLEDIIFYQRPLKSKKSLISDCSLEHRFYTNQHGVSVKSSIKCIAKSHPLYQEFRLLQWLKNLKIFKKTEKEDIEITDVLIQNEEDKKKLYQWLNDKTEIDQNGLLKYPDFDLESKLLTEIGVEQFRIFKKDKELGLSTYYRWNYVEDKKYPLNETRGEILKRLNKNKIDISFLTKENEESLWHLLYSVVDKKEVESALTKFAHKHRLPADFIESFKNFPQFKKDYGTFSAKAIKKLLPLMRFGEFWNASSIDTNTLNRIEKIITGEYDAAIRKRVREKSIHLNDIHNFKDLPQWLASYIIYDRHSEIGEITYWKKAEEIQFLKQHALRNPIVEQVINETLQVIKDIWQHYGNGAEGFFDEIHVELGREMKNPADQRAKMTKQISENENTNLRIKALLAELAQDQNIENVRPHSPMQQEILKIFEEGVYQNEQNDKEKEEIEKIRKKTQPSSSELKKYKLWLEQGYKSPYTGAMIPLSKLFTPSYEIEHIIPQSRYFDDSLSNKIICEAEVNKLKDNQLAYEFIKNNQGLKIELSHGKYVQLYNLPSYELNVKQYFMKNKSKMTKLLLEEIPESFIQRQLNDSRYISKVVKSLLSNLVREEGESEGVAKNVISSNGSITSRLKQDWGLHDVWNELISPRFERLNKITGTQDFGKINENTGKFLPQVPLELSKGFNKKRIDHRHHAVDALVVACTTRNHINYLNNESASENKKSERFDLRNKLRHLEEYNDRTGKKRVIAKDFIKPWPGFTKDAKDLLNKIIVSFKSNHRVINKTVNRYQNWENKPDGTIRKVIKKQTKGDSWAIRKPIHKDTVSGLVNLQFKKSVNFSSAIDNWESIANKALRFKIKEMVKAGLDKKKILSHFKSENYIFNGENIAKVEIYYFTNENQNTRVAASRVKLDESFTSTKIESITDSGIQKILLRHLENYIGRMDENSKPVAPEVLAFSADGIEALNSNLRVLNNGKYHAPIYKVRTYETFGNKFCIGTIGNKKAKYVEAAKGTNLFFAIYIDEKGKRSYETIPLNVVIERQKQGLPSVPEQDENGNPLLFHLSPNDLVYVPTEEEKENPNLVDFENLSSEKINRIYKFTDASGTTMNFMNCNISDLLFNINFKDQEKKEIKYSIQNELGVGSPQSKNQKSFDGEMIKDICWKLHVDRLGNIKPIFPIKRNQNFEDQIDNRIQAFSEPSASYITNPKLSFFSDLPSMSEAESGVIAALSMEERLKLGLELIRRVYGDKDISPDFPGKITIKKYPI

SEQ ID NO: 667 - protein, 1308 aa, unidentified
  REGION 1..1308: note = Description of Unknown: Cas Enzyme sequence
MPKTLGLDLGTNSIGWAIVNTDFPEKILDKGVHIFSEGVKIEKGVESSRAAERTAYRSARKLIARRRQRKQQTLKVLADHNMCPLKPAEVRIWVMDKKQYPKKPEFIEWLRTDEAEGINPYALRDKASRGKIGQMELGRALYHLAQRRGFKSNRLDQTDEDELGPVKESKKRLSEKISDAKCNTMGQYFHSVYLKNQSGSIGNNLENIRKVWIPDREEHYLAEFEVICEVQKLDERLRDQLRSAIFYQRPLKSQKHQIGRCTLEPDKLRCSVSHPDFEEFRARQFINSIKKQDENGKFKQLNEEERENLWPKFTRLSKPTFEFKDLMKEITPGGQEVRFNYKPYEVISGCPFHALIENLFGADWKQTITGRYQRSTKKDGSIKSPEEIIHDIWHVLFSFDDKDKVKAFGSDKLGLGVKQQDKLADFRPKREYGRLSLKAIRKILPHLRNGHIFSYAVFMANLPEGLEDKQQREIGQQLSHILDTHRSHTKEVEIVNRLIGRFREDGLASHGAYQLDTQDKKEVVAVIHEVIGEAVLEGWPVEKQQELISDIEASFEKQLRLQPQGKFVQPQRLDERIKTYLSEVGLTDNQLDKLYHPSIIDPFEAPKVDPKDGKRYLASPAIPSIKNPMAMRTLYQLRHLINALIREGKLDENYTVNIELTRQLKDANERAAIRRYQQELRREREAHRNEIIKLFKTEHGKNIEPSVDELLKYKLWEEQGHQCIYTGLTINVSDFVGGVPIFDIEHTLPFSLSQDNSQANKTLAHQAYNRKVKGQKLPVECPNYNEEKTLSLEGKAVSCPPITRVFEKWQKTLDELEKQYNRRKLPPRGRLETKLQKDRRLQDKHYFRLKRDYWREKIARFKMTEVKTGFKNSQLVDTGFITRHARAYLNMYFDKVYSIKGDVTAAFRVHWGLQKEGEPKERDYHTHHAEDAITLACITKDLYDRLARATRYEEEGNPREGRKHIAATKPWPTFTEDVKAIRQEVLISHHTPDQTHKQTRRKLRKRGKLVRDSKGQKIYARGDTARGSLHKDTYYGAISDSEGEVRYVVRRAIATLKPGDIANIVDPVIREIIEKEVAAKGFKEAIDAGFSMASGVPVKKVRCYAKTVTDPIHLKPHTFVRSVKPRLPHKEEYHVVNDENFALAVYAGEDARGKKHRQYEVVNMMEAAEYYKLSNQLSQDQPLIPGATTVGKKQEVILPYQYMIKKGTMVLFYQNELEELLHLSSRELNRRLYKVTKFDKEGRVFFRFHTEARQASTLKPAYAIDLQDPPPLVRLPSKSVDKFKIAVEGVHFDLHITGRIKWRPIMDR

SEQ ID NO: 668 - protein, 996 aa, unidentified
  REGION 1..996: note = Description of Unknown: Cas Enzyme sequence
MYTLGLDIGSNSVGWAVLNPEKELVINAGVRVFQEGVDRDTKGAEVSKNAARRAARSARRTRKRRNYRKDKLFRLLVRSGLLPQNPAEQQILFQKDPYYLRAKGLDEKLEPYEIGRVLYHFSQRRGFWSNRKSEKKKEEGIVAKSASELQKQIVESGCRTLGEFFAKLNPHEQRIRGRYTFRAMYEDEFEKVWQTQSCYYQAVLTDTLKTEIKDRTIFYQRPLKPSDELIGNCELEPNEKRCPKADWYARRFRILQTLNNLEIHNPDGTDVKLNETQRQIVLQELLSSEKVKFDTLRKKLGLLETQTFNLEEGPKDQKKESIQGDEFNAHLRKSLGKKLFEQLAEQDLIEINDLLLDDALQDEEVVEKLMERYGFTQEQAQKILEVPLPQKYMSFSRLAVRKLLPHMEKGLLTHEAIQAVYGSPQGRRPVQTADQLPFPEDLRNPIVNRALWEVRKVVNALVRVYGKPQKIKLEMARELKGTKREREEIQLRQRQNEEENKKAREELMRMGILSPSRDDIIKYKLWQECGQVCPYTGRPISQNALFGPHPEFQVEHILPYSRTLDDSFMNKTLCAVDENRRKGDRTPYEFYGETEQFEQILHRIAKLPYPKRRRFWQKEVELDNFIQRQLNDTRYISRKAEEYLRVLGCTVQGTRGQVTAELRHQWGLNSILDDSELGEKKRDDLRHHAIDAAVVAVTENRHLRDLARSRYVPAGQAAVRFAPPWEGFRQQLQEVVSRINVSHRVTRKVSGPLHEETSYGPTGLKDDKGQDIYVYRKPLDGLTLAMVPKIVDPVVRQIVVERLEQFGLKPGGDGKITKEVWKEPLRMKTKSGQPGPQIRSVRIRDVFNNLIPIKDKDGRPYRYVAPGSNHHIEIFEYTDAKGRTKRQGRVVSMFEAVQRSRRKEPVICRDYGDGGKFVCSLSRNESFMLELDDGKHVLHRVQKIDQNERIILRPHTFGGKLQDSDKPPLIQRKSPNTLNGYKVTVDPIGRIFPAKD

SEQ ID NO: 669 - protein, 1178 aa, unidentified
  REGION 1..1178: note = Description of Unknown: Cas Enzyme sequence
MSKILGLDLGTNSIGWALINTEGEKIEGIGSHIFPAGVNYEKGKEISKNATRREKRQIRRQTFRRKRRKRKLAQILIKHKMFPDIIDLEMEITKENLDKNLKDFFAINPYESRAKAYNNEKLSLYELGRIFYQFAQRRGYKESLKTSSQEDEGKIYDGKPKEGIIGINQTRERIKEFGTLGNYLNNEDPHKTRLRNRYTTRNMYLNEFDIIWESQRKYYPEILTDELKNLLGNQENGILFYQRPLRSQKHLIGHCTFEPDKPRCPASAIPFEEFRMYQFINSIKHGESILNENDKQIAVELINSKDKKFDFKEFKKKLKLEKGTFNYKDDYKITGNRTISNFRKIFGKKRWDSMSDEEKGKVWHIKLFATNKEWLSKYARENWNLDEKATEKLLKFRYADDYANLSRKAINNILPYLKEGKLYNESVLLGGLQKVFGTKRWKTLPDEEKKTIEDTVTAIVGQKSEPGKETDKVKNFLREQFNLTDERLNKLYHHSFLERQENDIEKLPEPENLRNPIVQQALYELRKIVNEIIKDSGKPDIIKVELARELKLPKKIRDKIKFENMENEKRNDEVKKILDEYNKPHSRSNIQKVLLWKESNHTCPYTGEKIGVQELFDDGYVQIEHIIPYSISLNDSLQNKTLCLADENRAKGDRTPFQFYGSNDKKWNEVKNRAYKLFRDNYPKYKRFISKQNPDADEFISSQLNDTRYIAKAAKNYLKSVCSDVHVTQGTATALLRHYWGLDTILNEPINVEKIKDGEYYGAVNENNQFIEILKWDFENKEKDIENLKKKGKLLKGKVKDGMFYSYKTRNDHRHHAVDALTVALAKKSYLQKISTLKGRGLQNKDIVHKYEVPKPWKMFWEDANNAVQNILVSHKKADRVITKIKKPLFDFNGKPRKDKNGKIIFSRGEAARGELHKESVYGKHIGKDGKEYFHITKPLEGINTSSHINKIIDDGIKRIIINRLNELGVDTNKKKFSVPNNAFFDYDESGKKIPKIFLPNKNGKPVPVKKVRLKEFISKPERLKEINQYVNPRNNHHVAVYKNEDGKLFEKVVTFWEAVERVKQGLPVINKQPKDGSKFITSLQRNDMFLLGLDGDEYENYKVDTKMLGKYLYKVEALSSKYYEFRLHISADTKDENRPSYIRIQGFGTGITGWQSFNPIKVELSILGKIFSVMDND

SEQ ID NO: 670 - protein, 1162 aa, unidentified
  REGION 1..1162: note = Description of Unknown: Cas Enzyme sequence
MATILGLDLGTNSIGWAVIENNNKILGTGVRIFPEGVNRDTKGKEESKNATRREKRQMRRQAYRRKMRKMILVKKLMQHGMFPKVDNIKEAIQDVVLLEELKHYFSFNPYELRAKAYKGERLSLMELGRVFYQFAQRRGYKEDLQSDDSTKESKNPEYKFKKDIYEETKEEIDKTTLGNYLNLLNPHKERIRNRYLVRSMYLKEFEIIWDNQKNYYPKILTEELKQKIGDATDGILFFKRDLRSQKHLLGKCTFELTKTRCANSSILYEQFRMFQFTNSIKYGENTLNKEQREIVIELLNSKEKVEFTEIKKKLNLLKENFNYEDGQKIIGSKTISNFRKIFGKKYWDSKPIEEQEEVWHIKATAKDREWIQKYTRVKWGFDNEQINKFCDLKLAKDYSNLSRKAISNILPFLKEGKMSHEAILLGGVKNAFGKEWESMDENQKDFIETNIEEIANNVDGKTKENISNWLKEDFKFSEKQLKKLYHHSDVQQTKQQIDALPEPENIRNPIVQQALYELKRLVNGIIKEYGKPNEIRVELARELKSAKKERDKIRFKNWENETENDKIKARLDDYKKPHTKHFIQKLKLFQELEREQGIASCPYTGETISISKLFNDSYVQIEHIIPLSVSLDDSLANKTLCIVSENQKKGDQTPFQFYGKDKSHWEIVKNRAKQLLPYKKYQRFISEKPAVLDEFIQRQLNDTRYISKSAKEYLKYVCANVTVAQGQVTAMLRHWWGLDGILNEKFEMPSLENGEYIAALDENNKVIETSKWTKDHKKEEERLAKLGKVISGNVNKGMFYPYKSRDDHRHHAIDAITIACSKTSYLQQISKLSGHGFYEEEIKKLSNIEMPWNRFWTDANDAINNILISYKNKSKVLTTSTKTVKKNGVKYTGKGIAARGQLHDAGMFGKYESKNGEVFYHKREKLESITKKAQVDKIADRTIKELIKKAIKKADESIDLNAKKYDVPDNAFFKTDEKGVKHPLVFLPNTNGEPIPIKKVRLKYVSSNAVQLKTVREINQWVEPGENHHIIIYEKEDGKRDGIVVPFWTAVETKKEKLPVINQNIPEGRFIMALSKKDMVLLDIDETDIDWNRPNYSILSNHLYTVRKLSITGQTKVIVFTLHKRANVDADRDKAPLVLRKTPNSLIGIKVKISATGQISKA

SEQ ID NO: 671 - protein, 947 aa, unidentified
  REGION 1..947: note = Description of Unknown: Cas Enzyme sequence
YNKEKTSTWRCQGVLFSQRKAYWNLGTLGRCDLEPTDRKCPKADMYAQEFLVLTSVNNIRITPPGETSRKLTNEERDKVVKDVRKQKTASESTIRKALGIDKGANKTLYTLNTEGDKFAVNGDWFYSQIVCGVFGEEAWQAIDSNMKESVNIAILKFDPNDEDDEKKIKTGCKEWWKLDDAQTEKFLDVWKKRQKIDSRVNLSRKAIKNLLPFLREGWSVTEARNMYAEDASNGADDLTRKRYSTKGVVVDKRVRHFQQKHANQLPPVSEGISNPVVRKSIHEVRKHIMEYIKHNGQPDRVVIELAREARQTERIIAKRIRKNKAINELRKEIIETHNLKDSSITITQRERAIQRVRLCRQQREMCAYSGDTITDKTAAEGTGLEVDHIIPRSKGGDNSMGNLVLCYSTANQGKGNRTPIDWLSKEDFRQLEKRFKHLEVDKKDKSAITKDNVDMVDNAKWKNLHHKTPKEGFTEEQLRSAAYAATQTTDWINKVLYGSEDRDKRYVFASRGDYTGILRRDWGLYFDESGERSEKGRKLRGDHRHHAVDAAIIAMTTQFLPKIKKSFIDFEKQKENKNIEPKWKAVEQPWEGFSEQIAEEYKNLKVSHRAYNRQIAGYLHKDSLYGPAVIYERYKQDDRKNGIKKGEIKKEKDGNPILKKGMYIKSIPAIGIKPNHLRMPGGWDKLKNEYKKASAKTQKKAIRRKMLALDDVPPKKSGIVRDIELRDKIRDWLKNQNFKDIKEAKEYIKKHGLIINGTPVRKVRILWKLKEVKEIQRKSFNFETGKNVKENKIKSLRVYQTQNNHHIEIREKINTKGGVKWNGEVITNFDAAKRIRIDKKPIVDRNENKNGKFVMSLARGEIVYMKDPEDNQMNYFVVFKIDSSKTIHLTPHTDANPASSKQKNIKLRKDIALVPDDLRKNIIFDENDVPLKVKISPLGEVKILVND

SEQ ID NO: 672 - protein, 1131 aa, unidentified
  REGION 1..1131: note = Description of Unknown: Cas Enzyme sequence
MAKILGLDLGTNSIGWAIIENDHNKILGMGSRIFPVGVNEFGQGEKELSKNASRTIARSTRRQFFRRRLRKIYLLKILAKHSLCPLGTNEIKSYEPQIFTNKKLVEWFRLNPYELRAKALKNKIELEELGRIFYHMIQRRGFQSNSRSAGKEDGKIYDGNPKEGKAGILETQRELNGKTLGAALYDIYPKEGKPFINQLKRIRNRYTTRQMYIDEFEAIWESQKQYHKELTEQLKTLIGGRKKEGYPDDGVLFFQRPLRSQKHLIGNCTFEPKKTKCPKSAIPFELFRIYQWVNTVEYNGKKLSPEERDIVVKLLLSKDKIAFKLIRKALNRLDSYYQFNYKDEDKIVGSYTISHLSNKKFFGSRWFEFSEKEQEDIWHVLFFFEDKDKLKQYAKTKWGFNEEKAEGISKFHLKDGYANLSRKAINNILPFLKKGYTYDAAAVLGGVKNAFGKKWQPLNDEQIQFIEDNIISIISVKYSGGFIEKVKEFLTDEFNLTEKELKKLYHHSANIGTRKILNKLPVGTEADKEIQNIRNPIVVTALFELRKLVNEIIELYGKPDEIKIELARDLKISKTERRKVRLEQQRLEKENDRIKAELDAIGQNHTHENILKYKLWEECNRTCPYTGRKINIRQLFSGEVQIEHIQSWSKSLNDSFNNKTLCFADENRAKGDKTPYEYYFKDFGPEKWELVKAQALSCFKNKEHYPNAYNKFKHFVKQSYDSDFINRQLNDTRYISREAKTYLSKICDKVMVAPGQMTANLRHKWGLNSILNNDNNKSRDDHRHHAIDALVMACSTVSHLQELSRWNRYRRSAELKSFPMPWDGFLEEARQTVNCVLVSHKKSDRILTSKNHTTKKNGQVFKNKGIAARGHLHKETVYGKRKAPGEEEYAFHVRKPIEALSTRKQIEKIVDPTIRKIILERVKKLGGFEKDDKIPHETFFSLDEKGRKQPQIFLPNKNGDPVPVKKVRLREHKRNLVNLKENVNQFVDLQNNHHVLIYKDREGHLKEDVVTFWSAVKRKMQGEDVFQLPQDGVQIVTTLQINDMFLLGVNKEDINWNNPDLEFLERHLYRVQKLSSKFYEFRLNSEAQLDKNYAPYYIRIQSFGDGKTGWNTFNPIKVKLTPAGRIEPLKQ

SEQ ID NO: 673 - protein, 1036 aa, unidentified
  REGION 1..1036: note = Description of Unknown: Cas Enzyme sequence
LCVWAFDLGKGSIGEAVRVGATFKHKASLLIPGDFAETRTARDRRRMWRTRQAHLAREQWLREVFQAAGLPVLYGRNYDAKTGDWKPGELGDPRLEREFPPRGEATCYTSCLLRIKLLRGEKLEPWQVFKAFHSAIQRRGYDPDIPWKTREARRKNERDAEDDEAGTEQRMRDFEKALHEMAPSQPDYRFPAYFDAWKMGLWNPAQPAADPKLRVDCNAETTRNQIVPRKLVEAEIRRMVDGAAKHYPALAGKAEHLLYGPAQKPYASYNTNPNKTPFLREGAATDWQGVVGQKIPRFDNRIIAKCAVIPRLNVCKLREGEKGQPHPQSLVAVEVAFLMKLKNLRFQRAHQQQSLSAAEIRAIHDDPRRKNWAITRAAWKKYCAGIGAVPLPGHEEIESPRFSGRSRFCRPALEILKRLILSGQKPSAFLCDELVRLNGNKDPHKGLVESDLKFLREMAESNDTWDGLYIPNQQLDALAQSSADPDEAIQRLIGQQNDPVVRHRLDTFAKRLKALDVHGRPDHVVLEFVREDFMGKKAKIELSKFMRDRAEERKKAREEAAKAGATEKSAGFKLELLRAQGGRCLYTDAGLEPSRLDEYEIEHIVPESRGGPDSLINKVLTTKAANREKADRTPYEWLSATAGWDAYVNRVRSRSLALRNKKVQLLISPNAEDLAERYTALAETAWIAKLAQTIVGLHFGWRNGVDYSGPQAIKRVLVVSGGLTGRIRRRYGLNRILNPNAADEEEAEKKNRNDDRHHALDAMVISFLNPQKVEPKLPDGVHREFFAKAIADVMPQNLCYEKPALAETIYGARGADAERVIVQRVELFKLAMKGIAPGKTKFDPDYLAKQIQWVRDGHVQRKLAEFHATSPDEAKWKAFCENFRLAGKNGSPGSLVRRVLMRVGSPTEFKDLSKDGTGAWRKRKKDHRGQIVVAESGDSWRVLPVYVFESSTQKLASFKQAYPDGKTLGFFQSGCLVTVSSEVLHRKKPLPAGTYKLRTLRDDGYVQIEDQQGRTYPDWPLYGLANMIAAGFRRAD

SEQ ID NO: 674 - protein, 1020 aa, unidentified
  REGION 1..1020: note = Description of Unknown: Cas Enzyme sequence
MLPKMRYRLGLDIGVTSIGWCMVRLNTHDEPIAVIRAGVRIFPDGRNPKDGSSLAVTRRQARQMRRRRDRLLKRKTRLVQALTAHGFFPDNKAERKALVNLDPYALRKKGLHAPLTGAEFARALFHINLRRGFLSNRKTDPKDTESGLMRKAINDLYQRLQEEDCQTLGEWLAKRHTQGLSVRARLRGKTQRDKAYDYYADRAMIEQEFDTLWTRQSEFNPGLFTEAARAELKDILLYQRPLKPVKPGRCTLLPEEERAPLALPSSQRFRIYQEANNLRLLSQNLTEQPLTLDQRDHVVSLLEKGNATFSALRKALKLPSHTQFNLEDIKRDRLQGNHTSIILSKNEHFGPLWSEFGLAVQDEIVDKLLNEASESAIVAWLQQRTGVDEAAAERIAKAQLREGYGNLGRTALARIIPELTKNVVPYSTAVVLAGFESHSALSHAEQTGEVMAALPYYGEPLQRHVGFGTGNPADVPEIRFGRIANPTVHIGLNELRKVVNALIRRYGHPSEVIVEVARDLKQSREQKLNIQKKQSRRQDLNADYVKEACRALGRDPATLDKAKRRELSQKIQLWVELNPNDPANRRCPYTGETMSITRLLSSEVEIEHILPFAMTLDDSLNNKTVALRRANRDKGNLTPYEAFGKQLVSGYDYEAILKRATLMPRAKAMRFAPDGHAQWLRDHKDFLARALNDTAYLARIAKEYLSLICPSNKVRAIPGRLTAMLRGTFGLNFLLSGTNTKNRDDHRHHAIDAGVVAVTDQGLLQRFATASARAREQQLSRLVEEMPLPWPSYREHMARAIGNITVSFKPDHGYQGAMHEGTAWGITDDGRGTQRVRQENGLRKREYKNRTLIAISSTQDPNRHGRNESGQPKPYKGYVGGNNYCIEIWRDEHNKWNGDVISTFQAYQTIRAHGERDGLAQLRNPLLSQSGAPLVMRLMINDLVRLKVDDTQATMRVVKISGNGQIFFAPHHEANVDARNKDKENAFNYISKVAGTLQKASGRRIAVSEIGDLRDPGFRG

SEQ ID NO: 675 - protein, 1062 aa, unidentified
  REGION 1..1062: note = Description of Unknown: Cas Enzyme sequence
VGRMKYRLALDLGTNSIGWALIRLVGNPAGQMEPSAIIRAGVRIFGDGKDPKSGASLAVDRRLARGARRNRDRKLKRKQRLLQSLIDSGFMPNDKTERSALVHLDPYILRSRGLSEELTPFEFGRAIFHLNQRRGFKSNRKTDSVDSDSSLMKNTINQVQQMLASEGYVTVGQWLAERHEKRESVRARLRGSGVKDKTYDLYFDRAMIETEFNVLWSAQAAFNPVFFTPAKREMLHETLFFQRNLLPVRPGRCTFEPNQERAAKALPSSQLFRIYQEVNNLGIEDGNFTYRPLTLSERDAIVEKLCSQKTVSFDAMRKLLKLAGAPRFNLESEKRKDLKGSSTAVSLSKPEMFGAAWSSLTLDEQDEVTSQILNVEDDDKIIAWLIESFGLTDEAANAVSQSRSEITKQATGYANLSSTAIHKVLPHLQSDVRKYSDAVVAAGYQSHSGLTHMEQTGEILDRLPYYGEYLQRHVGHGTGLVTDDPSTRFGRIANPTVHIALNELAKVINALIDCYGPPDQVIVEVTRDLKRTKEQKDEESKKQAENQKANERWSQEILEATGITATRKDLQKMKLWVELNPKDPTNRCCIYTGEVIGIARLFSPEVEIEHILPFSRTLDDSLNNKTVSMVKANRDKGNQTPFEAFGSSPKGYDYDEILVRARNSNRYRAARFGPEGFSNWLKNDADFLARALTDTAYLSRMAREYLQLVSPSPVVAVPGRMTASLRRHWGLNNLLSDDGVKNRSDHRHHAVDAITIGLMDRGSLQRYARESGRGTTVEEQLSKTSHESPLVHLREKAQGVIGAIKVSHRPNHSYQRQMNNDTNYGFRPDGFVATRKALDEFATLKSVMDTHFADAYLKEKILRFVGDCSDTDLKSRLAEFTAETGTRKITFWQKLDVIPIPPNPAVPERAPKGTKAREDNSPRGVKGDSNYCLEIFVNDKGKWVGEVVSSYEAYRIAITQSPARLRDPHLTQSGKPLVIRLMRDDVVQVDVDSPDDRQLMRVCKFGSSGQIQLAPISEANVDARVRLKEITYLSASAGTLQTRRAKKVTITPDGRVSYRNIS

SEQ ID NO: 676 - protein, 1119 aa, unidentified
  REGION 1..1119: note = Description of Unknown: Cas Enzyme sequence
MKQQGCVWAFDLGKGSIGEAVRQGNAFLHKATLLIPADFAETKPAATRRRMWRTRIAHRERERWLEQVWAAAGLPVLYGRNRDKQTGDWKAGEKADTRLEQEFPKAGEDTCYTSCLLRIKLLRGDTDLEEWQIFKALRSAIQKRGYGKIPWADKEARRAGKRPEDLEKEEQKKDPNYVAALNKWREFKAKHAAEFHAPCYYDAWRMGLWEPVNPKAIERRVTCNAESTRNVRFDRDDVEKEIKALANNAAKLVPALATTFTRIQKQGWEQTNPETAGRKHFPVRAISFGDFLCYGPAGSAFASFTRENRDELDLHLGSADDWMGALGQKIPRFDNRILDDCVLIPRYHVCKVDIRKDGKTGTPFPETLLPSEVTFLMKLKNTLVADEKDQRKLTVDEVRRIFDTVSADVLKVKPDAKDWPRKIANCLALTKADWGRTKGIKELELRPLAGHEEIKPPKESGRAGFSRPALRLLKDLILSGKSPRAFQAEQLVKLGGNTDRTKGLVPDDFKFLEDMGDSWADIHIPAQKLDALAARHTEDGKLDAKKAVADLLGSVNDPVVRHRLGVFAERLQTLRKQFGMPEEVVLEFVREDFMGPKRKAELLRFQRERETARKEAREKAKEAGAEEKSAALKYELCKAQGCICLYCGQAFAATRLDEYEIEHIVPRSQGGPDAMVNYVLAHRECNDAKDEQTPFQWKHGKAGWDAYKQIVERHASTLRNKKVQLLLREDAPKLVSRYTALAETAWISKLAQTIVSLFFGWKNGNDAEGRKRVTIISGGLTGRVRRNYRLNSVLNPCPPGEDPLLWEEKCEKNRTDDRHHALDAMVISFIPGWARDERKQHFFRFPDPIHKNAKGYFEREIADVTPRYIAWMKPALEETLYGARRIGKADYIVKRRPVADLATKEVKGKLELKPSKDIKPQKIVDGAIRRLVEDYFRGHPQLTLNEWLDWCKNARLTAGGPRIEQVLMTETEADALEEYGDFNKSGDGSRGQYRRAASHAGYFIVTLPAPTKKEPGHRKIEVRPVFAFQSRKAIEEELKTETGLEIADYFWSNCQVMLARPWPFKGETFPAGEYTLKTLWAQGNAILKHASRGLLGAKPKHNAPIGVRVLVEAGIKRVR

SEQ ID NO: 677 - protein, 1021 aa, unidentified
  REGION 1..1021: note = Description of Unknown: Cas Enzyme sequence
MLPKMTYRLALDIGTTSIGWCLIRLSSDELPVAIIRAGVRIFSDGRNPKDGTSLAVTRRNARQMRRSRDRVLKRKQRMLESLVKLNFFPADSSQRHGLANLDPYALRKKGLYEALTGPEFARALFHINQRRGFLSNRKTDKKDNESGALKKAIRDLREKLTEENCQTLGEWLAKRHEARLSVRARLRGKTQKDKAYDFYADRAMVEDEFDLLWRIQSAFNPSLFTNAARDELKDVLLFQRNLKPVRPGRCTLLPDEERAPLALPSTQLFRVYQELNNLRLLGSNLTEAALTKVQRDKLAHLLERQGQVSFTAMIKALSLPGVTKFNLEDVKRDRLKGNITASILAKTQHFGDRWHAFDLLLQDKIVNKLLNEASESTLAAWLQENTSIDEASAERIANVSLPEGYGSLSRAALARILPELINDVVVYSEAVTRAGFDTHSALSHALQTGEVMEALPYYGDPLRRHVAFAKENPRNDEERYGKIANPTVHIGLNELRKVVNALIKRYGHPSEVIVEVTRDLKLGRERKREIELEQKERQDLNQKHVVEACAVLDLDPDNIDRSKRRELSQKMQLWAELNIKNAADRACPYTGEQIGIERLLSSEVEIEHILPYSMTLDDSMNNKTVAMRRANRDKGNQTPYQAFGERLLPGYDYEAILHRAALMPREKAKRFAPDGYQRWLKEDKDFLARALNDTAYLSRIAKEYLSLICPPNKVRAIPGRMTAMLRGKFGLNQLLSGSDKKTRNDHRHHAIDAAVIGVTDQGLLQRFSKASASARERQLDRLVEDMPLPWPTYHKHVARALDHIIISFRPDHGYQGGMMEDTAWGLRDDGVVVRHVRPEGGGPREQEVKNKNVVPISSTRNPERHGLDENGQPRPYKGYVGGSNYCIEIWCDEKGKWNGDIISTFQAYQVIRQYGVAQALKKLRNPNQSQSGMPLVMRLMINDMVRLDIGSELQTMRVVKISGNGQIYLCNHNEANVDARNRDIDDLFAYTSKSPGSLQKAQARHITVSEIGDVRDPGFKS

SEQ ID NO: 678 - protein, 1013 aa, unidentified
  REGION 1..1013: note = Description of Unknown: Cas Enzyme sequence
MNKMNYRLALDLGSTSLGWAMVRLKNSEPCAVIKAGVRIFSDGRNPKDGASLAVSRREARAMRRRRDRLLKRKARMMKTLVHHGFFPDDPLKRKVFETLDPYQLRARGLTEPLKPEEFGRALFHINQRRGFKSNRKTDKNASDDGALKTAISILKKAIFDENCKTVGEWLHKRNTQGLTVRARYRQTKVEKDDGKSKIFKSYDLYVDRGMIETEFDTLWEAQSGFNPSLFNETARKELKDCLLHQRPLRPVKPGRCTLMPEEERAPLALPSQQRFRIFQEVNNLRIIGKDLEDIPLSIEQRNTLADALETNSKRTFTQIRKLLTLSGASKFNLEDVKRTELKGNTTSAILSKKESFGDRWFEFNQDKQDQIVSQLVSEENEAKLISWLVKETKVNENTAEYIANQGLPEGYGNLCLRALDRILPVLQKEVITYDKAVIAAGFDHHSNISHASTGEILPELPYYGEYLQRHVGFGTGNPDDVPEKRFGKIANPTVHIGLNQVRTVVNALIKRYGHPSEVIVELARDLKQSQDQKKEENQRQAENKKRNDRIRTTISDVLQIDEEQVRIADTQKVILWEELSNDVSMRLCPYSGKQISISMLLSDQVEIEHILPFSRTLDDSLNNKTVATRQANRIKGNRTPWEAVADFNAQGWPVEGMLNRAELMPRNKRYRFGPDGYSKWLKEDKSFLARALNDTRHLSRVAKEYLSLICPQNTRTIPGQMTAMLRAKFGLNDILGLNGEKNRNDHRHHAVDACVIAVTDQGMLQRFAKASESTRERQLNRLVEVMPLPWDTYRESVSRAVNNIWVSHKPDHGYEGAMHNDTAYSLLSDGKVGVHKMVDGVRTFFESALKVIPITYPKATNRHGTLPNGEPKPYKGYKGDSNYCIEIIINEKGEWEGEVISTFEAYQVVREHGLKRLGHPSLSISGKALKMRLFRNDFIRLTHEGVTRTLRLCKLSGTGTLSFSELNESNVDARVRLKELSYIFKTAGSLQKSFARKITISPIGELKNSRYDA

SEQ ID NO: 679 - protein, 1144 aa, unidentified
  REGION 1..1144: note = Description of Unknown: Cas Enzyme sequence
MKTYPLEKIPATQNSRDLQLAFDVGHSSIGWAVLQVPAPDAPSLLGCGTVIFQADDCLASRRRAFRRQRRHIRSTRQRIARMKTLLSHLGVLSPDALDKVSSSSPWFHAARVLLARDREKLTWPLLWDVLRWYAHNRGYDGNKTWSRHGQDAVAEKEDTEKVENARSLYNRYKTHTMAETWCAVCGIDPLGTKTSCHLPGDKRPKALNAAFPREDVEREVAAILSAHIGHLPHVDESLLTALLSDWHAIPCPEIRLPARYQGGLLFGQLVPRFDNRIIATCPITYERHYQRLLAETGNEESSKDEALKLSKVPSAACPEFFRYRWAMQLANIQITSPAGLRRLSVEERKLLHQQIRARGYFTKGDLKKAVRTLTGGVPDNLDQMLLHPDADKALVLDPVQRLLTSSDLAPALATLPEPLKKRLLGRLRREDRLTLTAIREWLGADTAAFDAALETRLNVAATRRSKKAAPVTREILLATELHVAPPSGRAPHSRALMTEVFDFVLSTDRHPAEDGGPLFRSEAIRSAQLQRAIDEQTNNHLVRHRLKILDRLHADLLKEFAHEDTSRVKKITIEVNRDVREMSGKSTQEIAKELGQQLANFKSVVKKLEAAFEGKGIKIGPGLIRKARIAEDLGWKCPYTGQDYDAFDLLNRRVDLDHIIPRSLRPSDSLDSLVVTFVNKMKGKRTAVQFIEEEQGKPVEGLAQLHIKTLSRFLKDVENLKPSSDPRKLKKHGIYKGPIDDLLRCWLRKQRLQLRDYVDKEFTPGDLTKTSQLVRLGAQGLQKNYPENPPVITSLPGSVTGAVRKSWRLLGCLGAANPAVTDETTKTEVRSITHLHHALDACVLAFASHFIPRDGGIWELLVKRSLSEPEQARLLAVGHLFQRDAGKRVSLTDLPKNFKEQIRKRLAERRVVQHLPKDLSGMESKETLWRIFDPEDIHPNSRRLATWLAEKKISIPPFESSTALIICRKRRGAVDDDSTGGKIFRETKTWRWVYEIKDKSALIGLTPEGNPSHAKLNKIKAVKVLGKNFGVALDPEPKLIRPHKVWHQLTSLHKRNQNHPVRVLRIGSVIQIHKKDGLSDYRGIWTVRGVFFKQKGGFMVDLSPSDYVQYRRVRGAFEGVRISTLMKCDLELLNPPLSGRISSH

SEQ ID NO: 680 - protein, 1038 aa, unidentified
  REGION 1..1038: note = Description of Unknown: Cas Enzyme sequence
MTKMRYRLALDLGSTSLGWAMVRLNDANEPHAIIKAGVRIFSDGRNPKDGSSLAVTRREARAMRRRRDRLLKRKSRMMANLVEHGFFPADPLARKEFELLDPYELRARGLNEALQPGEFARALFHINQRRGFKSNRKTDKKEGDAGALKTALKNLRAALVSDGSRTVGEWLYKRHANGQTVRARYRQTPVKQENGKTKIDKSYDLYIDRAMIEAEFDMLWNVQTRFNSSLYTEVARVALKDCLLHQRPLKPVRPGRCTLLPDEERAPLALPSTQQFRMYQEVNNLRILGDGLSEGPLTLDQRNLLVAALEQHSKRSFTQIKRLLDLSGGAQFNFEDPKRQELKGNTTSAILSKSDYFGATWFDLSLERQDEIVSKLVNEENETVLIIWLQNEFGFDENQAERIANAPLPDGYGSLGTKALSRILPELKKEVITYDKAVVLAGFEHHSRLNMFTEILGKTFDTGLERIDPQTGEVQRIHAFKELPYYGEYLQRHVGFGTGVPEDHPEKRFGKIANPTVHIGLNQIRVVVNALLKRYGHPSEVIVELARDLKQSQEQRREDNKRQAENQSRNYRLRQEIAAALNISMERVSRDDIQKMLLWEELSHDAADRRCPYSGVQISVQMLLSDQVEIEHILPFSQTLDDGLNNKTVAMRQANRVKGNRTPWEARNDFAAQGWQYEDMLVRAEKMPKNKRYRFGNDGYQRWLREDKTFLARALNDTRHLSRVAREYLSLICPQNTRVIPGQMTAMLRNKFGLNDILGLHGEKNRNDHRHHAVDACVIAVTDQVMLQRFAKASASAREQHLTRLVESMPLPWDTYRDHVTRAINAIYVSHKPDHGYEGAMHNDTAYGLLGGGVVRIHKVVDGIRQREDLNLKVIEMSSSKVPERHGTLPDGSPRPYKGYKGDSNHCMEIYRTEGGKWASEVISTFQAYQVVRSEGVDRLRNPHLSLSGKPLVMRLMAGVMVRLKINDALLTLRVVKLSTTGTIALAPHQEANVDARNRDSDDGFKYIYKSASSMRTNEARHVTISPIGEVKDKGFVD

SEQ ID NO: 681 - protein, 1301 aa, unidentified
  REGION 1..1301: note = Description of Unknown: Cas Enzyme sequence
MKDYVLKAANQSPTNNDSFLTGLVFGFDVGTGSIGYAVRKKDKFLDAGVLICPEGINDLSGRNGLRRGRRTLDHRQNRRDWFAENLAKVLGLSLHKGTRLPNTAWTQNEKAGWIPVSPKFANPVSLRIDALGGKPLTAEQLFTALAHLIKHRGPSEKVPWSKTIAEEQRDLDEKESVSDTIPADQVRAEFEKARKEFTLSNADASGFHPAHYLQQLGEERKLQRKRAWPRDLVETEAAAILEAQANHHQKLKEEIKFVDVSGENRKATVAEWLLHGNSSIKSVREGDAEMSFHVFDRNYPNRERAPFTFQAARIHNRKPGLDLVEPRDEFGRPRYVMSRERPEYGQWQVEVALLNFKVLDLTSLKKDKAKIVPSAEALAELREIITRTGRLSVEDLQTWIKPYKENGIYDLVKEQPALVGEGKGRGRFSRVGLQRATEIIRPLQTEHNAMSKLTPKGQRAKKKLKTPEDKADAYVRQYVNYTPKLRYAWKNPATQITEPEPLPRALRRYILEIRDPVVRHRVELFDRMLDDLLGKYRSDGNPTHIVIECVRELEQDAEAAQDAWERRKKDREENQTARATLKDMGVKAPTDKDVRKFRLLQECKWRCPYTLERFMQTEFDDLVIQRIVPPAGDPRRSAYLEAARSAMQGTQVEHMVPQAAIVCDEWFNVTVTRPTTNTTKGDRTPYDFVLRDGDKDRRKQLLENAEQCFGKDSLKFKIFSSDNARSLIQERDKLQRTAYIARCLRYVCLLKFGWLSPEDRDPGHEKANDATRSYLVTNGGTTRRLRQAWNLDELLRETVSPEKWAGMTDVEKERALAQGARIPTEEWKKLDKAKQDDVLRARRTKNRQDVRHHALDAMVVACTLPWAANLTVWASGWCNLDTDDGSVSSVRCPIFGENDFGEGIYAAIEAKLSELKTALPEATSNAITHYRSHERHKQVFDSGLYGKRTTYGGKPLEKDEPVFFVIAKQLSRLTPAVLSYPAKGGGDSIFSPKLREHIASAWKTYTADNANWQHLLTRSEEDLQRELQDAENSKDNQYKFKTIKALKDRLRRVSQWRVAIPNETLWAELQEYLQQEKARRLKKPEARNNVFPDHFIEGLRHPNYNTPIHSVKVIALTKDEDAYVELRTGSKTFWKYKGGYEAMRVYGSPPKTRTGKGKFICWLVRRFYKRKKKENGQLQTVKEAHAAAMPAVCQGQKLLATFHNGQVVRFKQLAKDMDISHNWIICETNADTRNPRNSKIVVMPAHLAKIVADPENPKRTISLKETEGVPLFLNEFMWALGYETPTKDNELPHPTSVKPQS

SEQ ID NO: 682 - protein, 1048 aa, unidentified
  REGION 1..1048: note = Description of Unknown: Cas Enzyme sequence
MKTYVLKDANPSSPNKDSFLNGLVFGFDVGTGSIGYAVRKGSEFKDVGVLICDSEGSDLSKRRDLRRQRRTLRSKKYRRQWFAKELAKLGLPKPENPPNDPISLRLRALNGETLKPEELHAALTHLFKRRGYSKVPWANVEKAAKESAKQKKDDSDEGVKEKAEEIRAKLGSKHPCQFLAEEKARVGNSPTDKWARKIYWPREVLRDEFLAIAKAQKKNFPKLAEKTDWLLYGDSQPKTKAGETYHVFFKTTEARNPGVLGLRWPRFDNRGPALDSLQPVDEKGRALHVVRKNKEAFGMAQWELALMNFRVLDFKTRQKLDPRIDFPIFIENLRNEWNKKGKVTEARLKKLSEPFKEKFLLIEDQKPLTPETGAGRARYSSPTLELIRKEIGEGRRVDTPQPILRRTGENAEQALNRYLADIKHPLVRHRLVLFRRLLIQLVSRYGQPDMIVLEAVRSLALGQKAKNELNKRNEQFRKERENAREQLSSNNESFSRKAIQRYRLWQEAKGRCPFCLQTIERTDLGHGADIEHLVPRSVVDCNEFYNLTVAHIKCNRELKGDRTPLAAFGGTSQWEGIKANAENCFIGRKLEIFLSPNAEELIEQKSDLQHTAYIARVIRHISLIQLGWLNDEGRDPTPEKQNPALNFQVTNGQLTSRLRKAWGLNQILHPLPPDKRWDELTEAEQNQFTEKNRGDLRHHALDAVVIACTLPWLAHRTHGATDKFGRHGWWTQDEKQRSKAANPIFPNDGQMHDVVKKEIEKVVVRHHVSRSNHQQAYATTLYAKKAKDTYVAREVFTSLTPKNLGSIWPETFASYCEAAWRRYSDESADLAAELKKTKGCVPENFTKKLCFSHFQKWRQDDCPEFYWPKEIKIPIRNVRLISVKDDTAVVPFSPGTHAYVKRTGFKEVHIYPTADKKGFVRVFIPFWKNDKPISDKPIPENVKPIAIIRRGMIIELQKKPGGKHPSGKYRVVTTMQGQIQLIPAHIKKDKQALLAAGFLENGVNFSWDTFINALNRESPAAIEAIRKAKSGQGQYYPLSSLDEKERPN

SEQ ID NO: 683 - protein, 1043 aa, unidentified
  REGION 1..1043: note = Description of Unknown: Cas Enzyme sequence
VQEKTNYRLALDLGSTSLGWAVFRLNDAKEPTAIIRAGVRIFSDGRHPKDGSSLAVVRRQARAMRRRRDRLLQRKTQMLHRLVKFGFFPDDEKERKLLERLNPYELRAKGLDEVLTPAEFGRALFHLNQRRGFQSNRKTDRNADDSGALKQAISGLRSQMQATGMRTVGEWLWKQRMQEDVGGIKGKGVRARYREEKIQTETGKNRIDKSYDLYIDRVMVAQEFDALWRVQTQKNPSLFSQDAYEALRHTLLFQRPLKPIKSGRCTFFPDQERALLALPSMQRFRIYQEVNNLRILQDGLSEQALTLEQRNAVVDLLEHSGKVTFKTIVKTLGLPSNTQFNLEDAKRSELKGNATSAVLGKKNLLGAKWWALSEAMQEAVVLQLLTQESEDELLVWLQSELGMDEATAQQLANAKLPEGYGRLSRQAIDVILPQLYQAVVTYDKAVLAAGLGSHSDLGFDFPFTADEVVTLGERIHPSTGEITQRFAFKQLPYYGRVLQRFVSFGSGNPQDPEEKRFGKIANPTVHIGLNQVRVVVNALIRRYGLPQEVVIELARNLKQSSEQKQEAQREQADNQKRNERIRQAIAEVLDIAPDRVRTMDIQKWRLWEELNPQDALARLCPYSGVRINTQMLLSDEVEIEHILPFSQTLDDSMNNRTVSMRRANRVKGNRTPWQAREDFAVQGWAYTDIQARVQSMPARKRYRFAADGLQRWQGEDQGFLARALNDTRYLSLISVQYLRLVCPGTATRAIPGQMTALLRERFGLNSVLGLDGIKNRNDHRHHAVDACVIGVTDQGLLQRISQVSAQAREQGLSRLLQNMPLPWPTYRDHVQRAVQHIWVSHRPDHSYEAGLMEDTAYGIAKDGTIKQRRQADGSEGRIVSNVIRISAPQQAQRHGTDAAGQPLPYKGYIGGSNYCIEITADDKGKWQGHIVSTFDAYQIVRKHGVKQLRHPHRSQTGQPLVMRLNKGDVLRILHEECWMTLRIGQMKTAGTLMLVPIQEANFDARARAKEVSYVSKTAGSLQKAQAQAVRISPIGDLKVIPTS

SEQ ID NO: 684 - protein, 1067 aa, unidentified
  REGION 1..1067: note = Description of Unknown: Cas Enzyme sequence
MQYRLALDIGTNSIGWAVFRLDKQGNPAELVRIGSRIYPDGRHPKTGESLGTNRREPRSQRRRRDRYLQRRDALLKYLQQYGLFPALHSAEASLLRQKNPYQLRARGLDEALTPHELGRAIFHLNQRRGFKSNRKTDRAAANESGKIRQAVQSFENAMQEGKVRTVGEALYQRLQENPDAGTRARLRGAGAKATYDFYISRQMIEDEFDALWQAQQAWHPDLLTEQKRDSLRNIIFHQRKLKEPPVGRCTLLPDEPRAPKALPSSQHFRLYQEINHLKFIDLQTGEECPLNQEQRDQLAAYLERRGTAKYVDLRKQLFGKEQYEKYQFTIEATALARKNLYGNTTAYKLKSNKAFGTAWHQFGLAVQDQIVHQLLETEDEAKLIDWLIAEHGLSPEAAAYVADVSLEEGHLRFSEQAVNRVLPHLVNGWNTDEDKPLTYDQAVRAAGFDDHRIQSPDNLLEQLPYYGEILWRHCQDMPTATDPREREYGRITNPTVHIGLNQLRRLINTLIRQYGRPDQVHIELARELKLSREGKTEMMRQNRLNQERNKRLNEELSDLGEKQNAANRLRLKLFKELDTLNPQCVYSGERICFKKLFTNAYQIDHILPFSKTLDDGYNNKVLVAGKANREKGNRSVYELGQLPGYDWDAIKERAARLPYAKRKRFAPDALEQWAGNIGDFAKDGAGFLQRQLTDTAYLARVTREYLQTICPANKIVTSPGRLTAQLRAKWGWNKLLNDDNSKNRDDHRHHAVDAVAVGLIDRSLLQRVSTRAARAKEQDAENLLKGVHEDLPWDNLREQIENALSRCVVSHKPDHNPQAQLHEATAYGIVSGPDDKGVYQVHNKVTLADLTRKDFPALQNPHLAERLQRLTEGLTDAEIKECLAELPGKPGWPRKTYILRKISGVAVELKGTALSPDPEKRPIHPAKLYRGGANYCYEIYRTENGKWDGELISTFVANQTPYQHFMRDKHRFAQYTFDRKPLVMRLINNDMIAVGEPGQRRILRVQKMSKGMIALCDHFEANVDSRNRDTEDPFSYIYKSPNALRAMQARKIRIDMLGRVKDPGFNS

SEQ ID NO: 685 - protein, 1017 aa, unidentified
  REGION 1..1017: note = Description of Unknown: Cas Enzyme sequence
MLHKMRYRLALDLGSTSLGWAMFRLNNNDEPVAVIKAGVRIFSDGRNPKDGSSLAVTRREARAMRRRRDRLLKRKARMMKTLITHGFFPKDETSRKALENLDPYELRTKGLDEALKPEEFARALFHINQRRGFKSNRKTDKKDNDSGALKTAINKLCAAINNDQARTVGEWLHIRHLAGDTVRARFRQKQILNEDGKNKIEKSYDLYIDRAMVEAEFDALWEKQSSINPNLFNESARIELKDCLLFQRQLKPVKPGRCTLIPEEERAPLALPSQQRFRIYQEVNNLRILRDGLKDEPLTIKQRDLIVAALEKSSKQTFTQIKKILGLSGSVQFNFEDPKRQEFKGNSTSAILAKPAHFGDAWYGYSEAKQDEIVLQLLKEENEEKLIKWLQTETGIEEQNAEAIANVGLSEGYGSLCQKALAKILPQLRNDLITYDKAVIAAGFDHHSNISHSATGEILERLPYYGEYLQRHVGFGTGNPEDPAEKRFGKIANPTVHIGLNQVRTVVNALIKRYGHPSEVIVEVARDLKQSQEQRREENQRQAKNQARNNRLREFIAAKLQVSQENVKMADIQKMILWEELSFDIADRKCPYSGAQISADMVLSDEVEIEHILPFSQTLDDSLNNKTVALRRANRVKGNRTPWDARNDFDAQGWDTESMLARATQMPKNKRYRFAEDGYTKWLKEDKGFLARALNDTRHLSRVAKEYLSLICPHNTRAIPGQMTAMLRAKFGLNDVLGVNGIKNRNDHRHHAVDACVIGVTDQGLLQRFSQASASAREKQLNRLVETMPLPWPTYREHVEKAIQSIWVSHKPDHGHEGAMHNDTAYSLVGDGKVSVHKIVDGVRTRFEDNLKVIEFTAPQSNDRHGVLPNGESRPYKGYKGDSNYCIEIVKNEKGKWEGEVVSTFEAYQLVRKYGLDRLHQKLLSISEKPLVMRLTINDTVRLMIEGILQTMRIAKISGNGQVFMVNTSEANVDARDRNKDDPFKYVSKTSGSLYNAQARKITISPIGELRDSGFRR

SEQ ID NO: 686 - protein, 996 aa, unidentified
  REGION 1..996: note = Description of Unknown: Cas Enzyme sequence
MSPHKNVLGLDIGVTSVGWSLLQFETDADDKIVRNEDGQNATTIIDCGVRIFPATTEGTKSEPKNAKRRSARGQRRLVMRKAKRRNELRDLLIRRGLLPSIESSTSAAVFHTIGDPYELRTRGLDERLDPYEVGRALYHLSKRRGFLSNRKSTKSKEDGVVYDGIAQVRSEMEAGHFRTLGEYLKTKDKKRRHFTQRAMAESEFELIWQKQSAFHPSLLTNDLKAMASSIIFYQRPLRSQRGLIGKCTFEKDKKRCDLARQEAQRLRYWQDINNLQLQDPATLNWRPLTLEEKGRVAVKLENTKELTYKGLRKLLKVGEDVRINLEANDKKFYGNKSAYTFRKAIGERWDAFNDEEQNRLVEELFRIENETALEHRLASYWQFNNEDVEKLKAVWHQLEDGYSRLSLKAIRKVLPKMIDGLRYDEAVREIYGDHRKQFGGEEFQKLQLPSKELRNPIVFKALCEVRKVVNAIIREYGLPAEIRVEMARDLKLTKLQKERSMKQANANKRANEEAEDFFKRKFNLENISGTDKLKYRLWKESGERCPYTGNPIPPESLLDDGLVDLEHIIPYSRCFDDSYMNKTICDAKYNREVKRNRAPGEYLDRESEEYAQLMQRVSLLPFGKQRKFKLTSQELEINDWAGRQLSDTRYICREVRGYLRQLYPHSPDENRYVSVVAGGATANLRHVWHVNAILSDGDIEVKNRWDHRHHAIDAIVVALCDRGLFQRISNLAGRNRQLMKRFLSGFSEPWPGFLTDVETAMNSLVVSHAPTRRIRGQLLEETAYGPTSTPGIYVVKKALEGITDKQIKNIADRAIKEIVELRLSQFNGDSKKAFIEPLFHRDGKTQIRNVRVFVTMSEDTVVGIKDESGKVYKYYSIAGNHHVDIYENADGERKAELVPRFYAAQRNWKPKDLGPEWRKLFSLCANDYVEFRGDDGELTVYRIQKMSIGPRIDARPLNDARSEYIAGTVKQIQNHLKRITRKLQVDPIGRLSKASD

SEQ ID NO: 687 - protein, 1000 aa, unidentified
  REGION 1..1000: note = Description of Unknown: Cas Enzyme sequence
MPLFTHTLGLDVGVTSVGWALIRTECDDNGKVLRDTDGLILNGSIVDSGVRIFPATTEGAKNEPKNSKRRSARGQRRLIMRKAKRRNELRELLVDSGLLPQIEDTTSAGQFHSLGDPYQLRTRALDDRLEQFEVGRAIYHLSKRRGFLSNRKSAKSKEDGIVYDGINQVRKELADGGFRTLGELLNTKDKKRKHFTHRLMAEDEFEAIWETQKAHYPAIMNDHLKSQVRNVIFYQRPLKLQRNLIGKCTFETDKKRCDLARQDAQRLRYWQDINNLQLQDPSTLNWRVLTDAEKNLLASEFEKSKEINYKKLRKLLRVGEDVRINLEANEKKLYGNKTAYAFRKAIGTKWDDLNNEEQDRLTEELFRIENEVGLKRRLTEFWGFDSEEVEKLADAWHQLEDGYSRLSLKAIRKVLPKMKEGLRYDEAVTAVYGDHRKKVGGEELLKLALPPKELRNPIVFKALCEIRKVVNAIIREYGRPDEIRIELARDLKLTKLQKERAMKQANENKRANEQAEMFFKEKFGLENISGTDKLKYRLWKESGERCPYTGNPIPPESLLDDGLVDIEHIIPYSRCFDDSYMNKTICDAKFNREVKRNQAPGAIYDPESTEYFEMMQRVSYLPFGKQRKFKMTPAELEMNDWAGRMLSDTRYISREVRGYLRQLYPYSPDENKYVQVVAGGATANLRHVWHVNAILSDGDIEEKNRWDHRHHAIDAIVVALCDRGLYQYISRLAGRNKDLMKRILSGFSEPWPGFLDDVNAALQKIIVSHAPTRRRRGQLLEDTAYGPTNTPGVYVVKKSLEGITLPAVKKIVDPVVKELVELRLSQFNDDVKKAFAEPLLHRDGKTPIRNVRIFVNMSPETLVGLKDAAGKEYKYYPLAGNHHVDIYENADSGERRAELVPRFYANQRDWKPADLGPEWNKLFSLCANDYVEFLGEGGELRFYRIQKMSGGGTVVIIARPLEDARSEYVSGVVQQLQAHLKKITRKLQVDPLGRLSQASD

SEQ ID NO: 688 - protein, 1015 aa, unidentified
  REGION 1..1015: note = Description of Unknown: Cas Enzyme sequence
MLGKMSYRLALDLGSTSLGWAMIRLNQEEQPCAVIKAGARIFSDGRNPKDGSSLAVTRRDARAMRRRRDRLLKRKNRMLHALIEHGFFPADKLERKALETLDPYELRAKGLDEALEPEEFARALFHINQRRGFKSNRKTDKKDNDSGALKTAIKNLHTAIQAENCRTVGEWLHKRKCSGGTVRARLRENKVINADGKTKIEKNYDLYIDRAMIESEFEALWTKQSALNPTLFNQEAKKNLKDVLLFQRNLKPVTPGRCTFLPDEPRAALALPSVQRFRIFQEVNNLRILNADLKEQVLTLSQRNTIVQALEENSKRTFTQISKLLGLGTITFSIEDEKRQDLKGNSTNATLGKSDYFGKAWFLFDENKQDEIVLQLITEENLAKLVDWLVTQTGVDEKRAELIANVSLPEGYGRLSTQAVQRILPALREKVITYDKAVIAAGFDHHSHISAAATGEILPNLPYYGEPLQRHVGFGSGKLTDTDEKRYGRIANPTVHIGLNQVRLVVNALIKRYGHPTEVIVEVARELKQSKQQRDEDSKRQAQNQKRNARMRTDIAKILQISEERVRNADIQKMILWEELSFDPADRCCPYSGVQISAHMLFSDEVEIEHILPFSTTLDDSLNNKTVALRQANRVKGNRTPWEAFGAQSTTGFDYEGILARAEQMPKAKRYRFAEDGHQRWLKEDAGFLARALNDTRYLSKVAREYVQLICPKTRVIPGQMTAMLRQKFGLNDVLGLHGEKNRNDHRHHAVDACVIGVTDQALMQRFAIASASAREKQLNRLVENMPLPWETYFDHVKRAVSRIWVSHKPDHSHEGAMHNDTAYSLNGDGKVSVHKMIDGKRTRIEEKLKVIEFSDVTANERHGVLPSGEAKPYKGYKGDSNYCIEIIRNEKNKWEGEVVSTFDAYQIARQFGVKRLHDSTQSISGKPLVMRLMINDAIRLVVNEVTCTVRITKISTNGQIYLADMIEANVDARNRSVDDNFSYISKTASSLQKSKGRKITISPIGELRDPGFKD

SEQ ID NO: 689 - protein, 1016 aa, unidentified
  REGION 1..1016: note = Description of Unknown: Cas Enzyme sequence
MLHKMRYRLALDLGSTSLGWAMIRLNADNQPCAVIKAGVRIFSNGRNPKDGSSLAVTRRDARAMRRRRDRLLKRKARMMRTLIEYGFFPAEETQRKMLETMNPFALRAKGLDAALTPAEFGRALFHINQRRGFKSNRKTDKKDNDSGALKTAINKVRATIEAEGCRTVGEWLNKRDVAGQTVRARYRQNKIIKDDGKTKIDKSYDLYIDRAMIEHEFDVLWAKQAELNPTLFTEAARADLKDVLLHQRPLKPVKPGRCTFMPDEERAPLALPSTQRFRMYQEVNNLRILRDGLKEEPLTLKQRDDLIASLEENSKRSFTQIKKLLGVGGAVQFNFEDPKRQELKGNTTSAILSKDEYFGSAWFKFDEAKQDTIVLQLVKEENEAKLVRWLQDETGVDEKRAEAIANVGLPEGYGSLCALALARILPELRRDVVTYDKAVQAAGFDHHSHISPSATGEVLLELPYYGEPLQRHVGFGSNDPKDNEEKRYGKIANPTVHIGLNQVRLVVNALIKRYGHPSEVIVEVARDLKQSKDQRDEDSKRQAENQKRNERLRKDIAGVLKISEERVRRDDIEKMILWEELSFDIADRKCPYSGTPIGATMLLSDEVEVEHILPRSKTLDDSLNNKTVALRKANRVKGDRTPWEAFGAQSTAGFDYAGILARAEQMPKGKRYRFGEDGYQRWLKDDKDFLSRALNDTRHMSKVAFEYMKLICPNTRVIPGRMTAMLRAKFGLNDVLGLNGEKNRNDHRHHAVDACVIAVTDQGLLQRFAKASASAREKQLNRLVENMPLPWGSYRDHVQRAIEAIWVSHKPDHSHEGAMHNDTAYGLHGDGMVSVHKMVEGKRERIEESLKVIEFTNAKANDRHGVLPDGEPRPYKGYKGDSNYCIEIVRNEKGKWEGEVISTFDAYQLVREHGVARLRHPALSVSGKPLVMRLMIDDAVRLDVDGQTRTMRIATLSGNGQIFMADTSEANVDARNRSKEDAFAYVSKMAGSLQKANASRVSISPIGELRAPGFKG

SEQ ID NO: 690 - protein, 1042 aa, unidentified
  REGION 1..1042: note = Description of Unknown: Cas Enzyme sequence
MLHKMRYRLALDLGSTSLGWAMIRLNSNNEPCAVIKAGVRIFSNGRNPKDGSSLAVTRREARAMRRRRDRLLKRKARMMRTLIEYGFFPDEDSERKALLTMNPFALRAKGLDAALTPAEFGRALFHINQRRGFKSNRKTDKKDNDSGALKTAINKVRATIEADGCRTVGEWLNKRDVTGQTVRARYRQNKIIKDDGKTKIDKSYDLYIDRAMIEYEFDELWKKQSELNPTQFCEKAREKLREVLLHQRPLKPVKPGRCTFMPDEERAPLALPSTQRFRMYQEINNLRILRAGLKEEPLTLKQRDDLIAALEENSKRTFTQIKKLLGVGGAVQFNFEDPKREELKGNTTSAILSKDEHFGSAWFKFDEAKQDAIVLRLVKDESESELVRWLKDETGVDEKHAEAIAKVGLPEGYGSLCALALARILPELRRDVVTYDKAVQAAGFDHHSRMWNFDEISGRTFDSGKEWTDPQTGEIKKIHIFCNLPFYGEFLQRHVGFGSNDPKDSDEKRYGKIANPTVHIGLNQVRLVVNALIKRYGHPSEVIVEVARDLKQSKDQRDEDSKRQTENQKRNQRLRVDIARVLGISEERVRRDDIEKMILWEELSFDPADRRCPYSGVQISVTMLLSDEVEVEHILPFSQTLDDSLNNKTVALRQANRVKGNRTPWDAFGAQSTAGFDYAGILGRAEQMPRGKRYRFGEDGYQRWLKDDAGFLPRALNDTRHMSKVAFEYMKLICPNTRVIPGRMTAMLRGKFGLNDVLGLNGEKNRNDHRHHAVDACVIAVTDQGLLKKFADASASAREQQLNRLVENMPLPWESYRDHVRRAIDAIWVSHKPDHGYERVMHEATAYRPPHLDKQGMWRTRGIGGNNPNEKKGNSEAIVEINSTRDSKRHATDEQGQVLPYKGYLGGNNYCIEIVRNEKEKWEGEIISTFDAYHLVREHGVARLRHPALSISGKPLVMRLMIDDVVRLDVDGQIRTMRITTLSGNGQIFMADTNEANVDARNRSKEETFAYVSKYAGSLQKANARRVTISPIGELHNPGFKE

SEQ ID NO: 691 - protein, 1041 aa, unidentified
  REGION 1..1041: note = Description of Unknown: Cas Enzyme sequence
MSHKMKYRLALDLGTTSLGWAMLRLDKNNQPCAVIKAGVRIFSDGRNPKDGSSLAVTRREARATRRRRDRLLMRKASMMRTLIEHGFFPTDEAQRKALEKLNPYTLRAKGLDEALTPAEFARALFHINQRRGFKSNRKTDKKDNDSGALKTAIKKLRDTLDTENCRTVGEWLHKRDAAGQTVRARYRQEKELKEDGKPKINKYYDLYIDRAMIEHEFDELWKKQSELNPTLFNEKACADLKHVLLYQRPLKPVQAGRCTFMPEEERAPRALPSSQRFRIYQEVNNLRILREGLKETPLTLQQRVDLAAELETKNKLTFTKMKKLLGLGGNVQFNFEDPKRTELKGNTTSATLSKADHFGKAWFAFDEAKQDAIVMQLLKEENESKLIRWLQDETSIDEQRAEAIANVALPEGYGSLCEKALERILPELKREVVTYDKAALAAGFHHSQLNDNQAIEGRTFSVERVNTETGEIQTFHLFHELPYYGEALQRHVGFGTGKPEDKKDRPEKYYGKIANPTVHIGLNQVRMVVNALIKRHGHPNEIIVELARDLKQNREQRKEETKRQADNQKRNTRMRTDIANTLKISEERVSRDDIVKMILWEELSDNVADRRCPYSGVQISMAMLLSDEVEIEHILPFSQTLDDSLNNKTVAMRQANRIKGNRTPWDASNDFANQGWQYEEIIARAEKMPKSKRYRFGEDGYQRWLKDDKGFLARALNDTRYLSKIAFEYLKLICPDTRVIPGRMTAMLRGKFGLNDVLSLQGEKNRNDHRHHAVDACVIGVTDQGLLQRFAKASASAREQQLNRLVDNMPFPWGNYRDHVQRAVGRICVSHKPDHSHEGAMHNDTAYGLRENGKVVTHKIVEGVRVRDESNLKVIEMTSAEKMTAEKAISRHGENTDGQPKPYKGYKGDSNYCIEIVRNDKGKWDGEVVSTFDAYQIVKQQGVKRLRHPSLSISDKPLVMRLTRNDCIRLSDNSNTRTLRVCKIRKGQIAFAEVYEANVDARTRTKELAYLLKSASSLQKSKARRITVSPVGELRDPGFRA

SEQ ID NO: 692 - protein, 1037 aa, unidentified
  REGION 1..1037: note = Description of Unknown: Cas Enzyme sequence
MFGKMRYRLALDLGPTSLGWAMVRLDKQGKPCAIIKAGVRIFSDGRNPKDGSSLAVTRRIARAMRRRRDRLLKRKQRMMDALVKHGFFPADVAQRKKLETLNPYALRAKGLDEALTPAEFARALFHINQRRGFKSNRKTDKKENDASALKAAIKKLYELLQTENCRTVGEWLNKRNEAKQTVRARYREKRTVTEEGKTKVDKYYDLYIDRAMIEHEFDALWKKQAELNPTTFNEAARTELKDILLYQRKLKPVKPGRCTLLPEEERAPLALPSTQRFRMYQEVNNLRILREGLKEEPLTREQRDVLIAALEENSKCSFTKIKKLLGLRGAVQFNFEDPKRQELKGNATSAILSKKDLFGPAWFRFDEARQDAIVMKLLTEESEDALVRWLQNETGVDEKTAEAIANVGLPEGYGSLSAKALARILPELRRDVVTYDKAVQAAGFEHHSKLGANAEIPGVTFKAECIDQDTGEIKVFHIHHKLPYYGEYLQRHVGFGSGKPEDAPEKRYGKIANPTVHIGLNQVRLVVNALIQRYGHPSEVIVELARELKQNQEQRKEEQERQAENQERNKRLRKDAANILQISEEQVSRDDIEKMILWEELSKDVADRKCPYSGVPISANMLFSPEVEIEHILPFSQTLDDSLNNKTVSTRQANRIKGNRTPWEARLDFEAQGWKYEDILARAGNMKKEKRYRFAEDGYQRWLKEDKGFLARALNDTRHLSKVAREYLTLICPQATRVIPGRMTAMLRGKFGLNDVLGLHGEKNRNDHRHHAVDACVIAVTDQGLLQRFAQASASAREKQLNRLVESMPLPWDTYREHVQRAVENIWVSHKPDHSHEGAMHNDTAYGLREGGKVSFHKMVNGKRERIEESLKVIEISNAKAAARHGLLPTGEPRPYKGYKGDSNYCIEIVRNEKGKWEGEVISTFDAYQLVRQHGIERLRHPSLSMSGKPLVMRLMIGDSVRLTIDGIVRTMRVAKLSGNGQIFMSDVHEANVDARNRSKEDAFAYISKMAGSLQKAQGRRITITPIGELHDPGFKG

SEQ ID NO: 693 - protein, 1166 aa, unidentified
  REGION 1..1166: note = Description of Unknown: Cas Enzyme sequence
MPKYYRYNLGIDLGIASIGTALVLTDEAGNPTKPLDLGVRTFSVPEGAATRRAKRLERKHIRRRRQRITKLRLFLQQHGLLPQDAAQLPSLMRKPPYILRAQGTSAAYQTLYDLGRSLLHMAKFRGAGFLTQSEETADDGLADETEKKKDRQKTANVYRNLEKIINDSGKTLSHFFAQRLEDKRPVRRREHHVKTLAVDYAVPRFLVKDEFRKIWAKQSQHHKNLTPELEQEIYTLIFGDHPHAPYATGNCTLIPAQKRLPKMHRLAEQRRIYEQLANVRYITAKGEYALSREMRDHLALLAFGEGNNLTTAAIKKYIAQTAGQTVVRVNLGDDDKTIRGFCQIRAFADIPTWQTLSQQERDNIIDFIANPSVKPEEENSVLLPEDEMIAEVCKRLGLAAANKEKTVSIALARLTPDRSKLGIKATQRILEKLIEGQQVETADPITGEVTSAWRPHTHRTAADACGFESEEQALSKKYGTFSQLPYYGEVLRQDVTPIHPWHTKQAAQEEAAHGRIPNPVVHTALNQLRKVVNEIVGLYGKPQRIHIELARELGMSAVKREELQRDMQKRERENATIDEALAKLGLSPTRTNRTKYRLWEEQGKRSLFSYTEIKQSDIAACEIEHLIPQSHGGSDSYMNLALVHSNENFAKGNSFPYQFIQKTAPDAWQHIAKVIADKSYPKAKAWRFSADACNRFEEQGDENATDSRLSNTSYMARIAARYLRMLCADVVAVKGGATAKLRHLWGLDGVEYDLLGLPIRKHEYDPITGEVQLNNFGYPVRNPLWVAKPRIDHRHHAIDAFVAACTTRSMVSRMVREEKETWRNKDDRLVFPSPFGSDIGWFRQQLLEALRKVVVSPKKEHGKPGQLHDATKYRILQQDTRRDSGMTLIRYNRKIDLLKDKKSVAGILPGATIPHDLPAVQTAHAQCKAIIYAIESRYIAASDNLEARRQQALKEGGRVRNFTPQAREATIVAEAITMAQQAGAIGATYPALEYKTLVAVNEALQFGFEPKNNYCMDFYETPNGKVGWECITRIDANTPAFVPEWKSNGGRFIWNLCIDDVIEVELTPELKANIKAPCPVGKCYMVVQKMSGGRLQCNLLNDARPLDGKISTVKSGTAAIEEYKRWKSGELGLDKWCQLKARKVDISPFGKILHKHKKLWHGKKTQ

SEQ ID NO: 694 - protein, 1083 aa, unidentified
  REGION 1..1083: note = Description of Unknown: Cas Enzyme sequence
MKPANARPFRLGLDLGTNSLGWFTVWLDREGERWHPTGLGPGGVRVFPDGRDPQSGTSNAVDRRTARGARKRRDRFADRYFGRRTELMEALIRHELMPGDAQERKALEPLDPHELRSNALNGSLPAHHIGRALFQLNQRRGFLSNRKAERKEDDKGAIKQAANKLKAAMQVEEARTLGEFLWRRQQKREDVRARAHLQGTKASYDFYPTRDLLKTEFDAVWGAQAPHHPQMTDAARDEIAHIIFYQRPLKQPSVGKCSLEPATAPFEQDPEGYRCPWAHPLAQRFRIYQEARNLQVGETGRTSKKLAKEQGDQVALALLQNKEVKFDKLRTLLKLPAEAKFNLESERRTALDGDETAARLSHKSLFGKSWRGLDVERQTAIVEKLLNEADEVDLVAWLRGKCDLDPATAERIADTALPDSHCRLGLRAIKKLLPHMEAGLGYHDAAAAAGYDHAKLPTGEILDKLPYYGKWLSDAVVGTGDARDKKEKQFGQFPNPTVHIGLGQLRRLVNELIDKYGPPTEIAIEFTRSLKLSPEDKRRKQAEQRKNQELNQKRVEKIRETLNNPHFDPSPRDLLKMRLWEVLGAPDDRHCPYTGEVIGISRLLSEEVDIDHILPFKMTLDDSAANKIVCMRYANRFKRKQTPFEAFGSSPDSFRWDDIAARAALLPKNKRWRFDADAREQFEKRGGFLSRQLNETGWLARLAKQYLGAVTNPYDIWVVPGRLTAMIRGKWGLNSLLPDHNYPGVQNKTEDFIAATDDMEFTGVKNRADHRHHAIDGFVAALTDRSLLWKMANAYDEDREKIEIPTPWSKEKLREDLKSALDRMVVSHKPDHGTQGKLHEDTAYGFVKEPEREGANLVYRKPIEALNENEIERIRDRRLRDTVRDHVTVEKANGVALVDALRKLRDKSDDPHIKNGLRRVRLLKPEKPEYLVPVRDRQTGTPYKAYSAGENFCVEIFEMVDGRWNGEAVRRFDANQKDYHSRWRQENPDAKLVMRIHKGDLIRLDHDGKTQIMVVHRLDAAARRFKLAAHNETGNLDRRHAMDNEIDPFRWLMASYGTLRDKSAVRVRVDELGRVWRVPLTKH

SEQ ID NO: 695 - protein, 1336 aa, unidentified
  REGION 1..1336: note = Description of Unknown: Cas Enzyme sequence
MGKDYYVGLDSGTGSLGWSVTNETYEIQRSHGKALWGVRLFDAAETAEERRGFRTNRRRLDRRNWRLELLQEIFAEKINQVDDGFFLRMKESRYLPEDKRGKDGNCPELPYAIFADHDYTDKNYHKQFPTIYHLRKWLMETSDTPDIRLVYLAMHHLVKHRGHFLFSGSIDEIREFHTAFDAFLDLVRGEELGFERTFDENCYQETERILKDEHLTRSMKKSHLVKCLDAGTAAEKELIGAISGCTVKLSSIFADGELDACARPKFSFSDISYDEYAGELQDILGEQYVIIESAKAVYDWAILADVLGSYRSISEAKTALYEKHKKDLRYLKKLVKKHLSAEAYKEIFVRSSEKVSNYPAYIGMTKKNGRKVPIQGKQCSQGELYVYLKKSVIDQIADENAAQYLRDEMEHGTFLPKLVSKENSVIPYQIHLYELNRILENLQDRIPLLKQEGEHIRQIFAFRIPYYVGPLNGVRKDGKETNWVCRRQDGKIYPWNFSEIIDTEASAERFIRRMTNKCTYLPAEDVLPKNSLLYGKFMVLDELNNLRLNGEPISVELKQAIYQDVFKRYRKVTQKKLLAYLIREGIAGRETDITGIDGDFKSSLTAYHDFKEKLSGIELSPSEKETIILNITLFGEDKKLLQKRLKKLFPDMTEKQRIAVSNLSYKGWGRLSGKFLEGITAPDPETGEVWTIIRTMWETNDNLMQVLSSKYQFAEAIERENDADEKKEISYRLIENLMVSPAVRRQIWQMLLVLKELCKVQGAPPKRIFIEMAREKADSGRTHSRKKMLIDLYKKCKSEERDWINELEQTEDSRLRSDRLYLYYTQNGRCMYSGDPIELKDLWDNTKYDIDHIYPQSKVMDDSLDNRVLVKRVYNGEKEDRYPIEKSIRDARHGFWKSLLDKGFISREKYKRLTRTTEFEEAELTGFIARQLVETRQGTKAAASILKQVFPDTDIVYVKAPVVSRFRQDFKFIKVREMNDLHHAKDAYLNIVVGNTYFVKFTKDAGWFVRKNPGRTYNLKKMFLSGKVERNGETAWISGDCGTIGTVRRFMAKNNIIVTRRPYEVTGGFYDQMLMKKGKGQIPIKTGDVRLQDIAKYGGYNKETGAYFVLAESDGKKDTRIRTIEYVPVRLKKELGDEKKLCSYLEQRGLKNPKILLKKIKIDTLFRVDGFYMWLSGRTGNQLIFKGANQLILSQEDSAVLKKIQKFITRRKQDKSVQIYDTDGLSEENLSHLYDTFLEKLRTTVYAKRLGTQEKTLSEKKKDFLALGKEDKCIVLNEILHLFQCQSGSANLKLIGGPGSAGILVLNSDITKCQDICIINQSPAGIHEQIVDLKAL

SEQ ID NO: 696 - protein, 385 aa, unidentified
  REGION 1..385: note = Description of Unknown: Cas Enzyme sequence
LRKSFKTEINPTEEQKIKIRKTIGTCRYIYNFYLTHNKELYDNGKKFMSGKSFSVWLNNEYLPNHPEYSWVKEVSSKSVKHSIECGCTAFTRFFKHQSAFPNYKKKGKSDVKMYFVKNNPKDCICERHRINIPTLGWVRIKEKGYIPTTKDGYIIKSGSVSIKVDKFYVSVLVEIPDGQIANNSNDGIGIDLGLKDFAIVSNGKTYKNINKSARLKKLEKQLIREQRCLSRKYDENLKKGEVTQRANIQKQKRKVQKLHHKIDNVRTDYINKTIAEIVKTKPSYITIENLNVKGMMKNRHLSKAVASQKFYEFRAKLQSKCNENGIELRVVARWYPSSKMCHRCGCIKRDLKLSDRIYRCECGYVEDRDFNAALNLRDAITYEVA

SEQ ID NO: 697 - protein, 1039 aa, unidentified
  REGION 1..1039: note = Description of Unknown: Cas Enzyme sequence
VLHKNKMGYRLALDLGSTSLGWAMIRLDVNQQPCAVIKAGVRIFSNGRNPKDGSSLAVTRREARTMRRRRDRLLKRKARMMRTLIEYGFFPAEEIQRKALETLNPYALRAKGLDEALTPSEFGRALFHINQRRGFKSNRKTDKKDNDSGALKTAINKLRETLRAENCRTVSEWLHKRNEANQTVRARYRQNKTIKDDGKTKIDKYYDLYIDRAMIEHEFDQLWKKQAELNPTLFTETARADLKDVLLHQRPLKPVKPGRCTFMPDEERAPLALPSTQRFRMYQEVNNLRILREGLKEESLMLQQRDELIAALEKNSKRTFTQIKKLLGVGGAVQFNFEDPKREELKGNTTSAILSKKEHFGDAWFAFDETKQDAIVLQLIKEENEAKLVRWLQDETGIDEKCAESIANVGLPEGYGSLCIKALARILPELRQDVVTYDKAVQAAGFEHHSRLGSNTEIPDITCKIESIDQDSGEIKEFHVHKKLPYYGEYLQRHVGFGSGKPEDSAEKRYGKIANPTVHIGLNQVRLVVNALIKRYGHPSEVIVEVARDLKQSKEQRDEESKRQTENQNRNKRLRTTIAETLQISEERVRRDDIEKMILWEELNPRNAADRRCPYSGTQISAVMLLSDEVEIEHILPFSQTLDDSLNNKTLALRQANRIKGNRTPWDARNDFAAQGWDYANILARAEQMSKAKRYRFGEDGYQHWLKDDAGFLARALNDTRHLSKVAREYMSLVCPNTRVIPGRMTAMLRAKFGLNDILGLNGEKNRNDHRHHAVDACVIAVTDQGLLQRFAKASASARERQLNRLVERMPLPWESYKEHVQRAIDAIWVSHKPDHSHEGAMHNDTAYGLRENGKVSFHKMVDGKRECIEDNLKVIEISDARAIDRHGLLSTGKPKPYKGYKGDSNYCIEIIRNEKGKWESEVISTFDAYQLVREHGAAQLRRPNLGVSGKPLVMRLMIDDVVRLDVDGESRTMRIAKLSGNGQVFMADVSEANVDARNRSMEDSFAYISKMAGSLQKARARQVSISPIGELRDPGFKG

SEQ ID NO: 698 - protein, 1037 aa, unidentified
  REGION 1..1037: note = Description of Unknown: Cas Enzyme sequence
MEYRLGLDLGTNSLGWWLYEIDGDKRPVRSLGGGVRIFSDGRNPKDKESLAVARRLGRGQRRRRDRYLRRRAKLLRALIEFGLLPREDATRRALVVHDPYRLRARALDAALTPYEIGRAIFHLNQRRGFQSNRKTNSKDKEGGVVKEGVKRLKALMEETKARTLGEFLWQRQDKGDWVRARKRPFTNDKGKEVERYDIYPERAMVREEFNAIWAAQAPHHPALMTDAAKEKIADIIFFQRNLKPVEVGNCTFNPEEKRLPWADPLSQRRRIFETANQLRIVTPGADTRELTRAERDAVANALLSNGKRTFVQLRKLLKLAPDQVFNLESEKRTELKGDETAARLSKDEYFDKAWREFPLERQREIVSQLLEEEDERKLVPWLMENCGIDQKRAENIADAGLPEGYGSLGETATKKILAELERDVVVYSEAANRAGYHHSDFRDGEIHDALPYYGEKVPGSVMGATGDPKDDEAKRHGRVANPTVHIGLGQVRRVVNAIIERHGHPAQIVIELARELKANKEQRDRTERNHTASKKQADIHRQILADLGQPDTGENRLRLRLYDELKPLEHCCPYSGAPISLRALFSSEVEIDHILPFSLTLDNSVNNRLLVSRDSNRGKGQQTPHQAFGHLPTWPDIVARAAKLPSEKTWRFQPDAMAQYLRKHADFLDRHLTDTQHLSRMAREYLTAICDPNQVYAVPGGLTALLRGRWFRDKNVKDRNDHRHHARDAAVIGLIDRWLLQKIARASAEAENQDALKKVWLPMPWDSWKPEVEAQLRDIVVSHKPEHGDRPKPGQPMGTVGQFFKDTAYGIVGDPDKRGVPLVAHRVPLESLKSAKDLEKIYNPELKAALEDATRDTEGADFKKALLAFREKDGPFKGLRRVRIAERLSVITVKDKNGKPYKGYASEGNFSFTIWRLPDGKWESEIVTLYDAARGQAESEIRKKYPTAKKMMTLKQRDLIALEKDGERKIMRVVKFTVIGQITLVEHYEAGNLDQRSKDEDDPLTFWGPGASALQKAKARKLRVDAGGRLFDPGPLE

SEQ ID NO: 699 - protein, 1083 aa, unidentified
  REGION 1..1083: note = Description of Unknown: Cas Enzyme sequence
MRYRLGLDLGTNSIGWWMVELDGEGRACGSLGGGVRIFGDGRNPKDGTSLAVQRRVPRGMRRRRDRYLDRRSDLMNHLIAFGLMPGDEAGRKMLEALDPYALRAAALDRPLLPHELGRALFHLNQRRGFKSNRKTDSGDDDKETGVVKERIGELRRLIDKSGARTLGEFLHKRHRKGRMVRARPEAGFYPERAMYEDEFRLIREQQQTHQTLTDEQWEALQDIVFFQRPLKPVDPGWCLFETGEKRAHRALPLTQEFRMVQEANNLRVTSPGETARRLMMEERDRVLGHLRKKKELKLDSMLKLLKLPSGSSVNLFDDHRTTIKGEETAARLSHKDIFGESWFSFSFEKRTEIVRTLLDIEKPEEIERIAQAEWRLSEAAAKKLAGKSLPEGYSRLSEKAIAKLLPIMEDQGLNYAEAVEQVPEYAHHSDFRPDEARDALPYYGEVLAWHCVGADPSKPKEDEVAHWGRLANPTVHIGLNQIRRVVNRLIEMHGKPEEIVIELARELKMNKEEKDKARKANSENEAANRRREEQLRSAGTAPSPHLLRKLRLWEEQKVGTAHLCPFTGDPISFEMAISEATEIEHILPFSKTLDDSMANKVVCLREANRAKRDRAPHDAFHTDPTIGRRKYVYSDILFRADSLPANKRWRFHPDAMDRFENEERDFLDRQLNETKYLSRIARSYLANLYNEKAEARMRVRAIPGKLTAMLRGKWGLSALLPGHNMAGGEDAPRKNRNDHRHHALDAFVIANTTQGLLKRVAELNADADRKRLVDAVPDPWEGFDREELRTQLARLTVAHKADHGTPGHKGKTTGALHNDTAYGIVGPGKNSNTIVVSRTPLSRFASPKDMDKGLTAIRDKALREALTAAWEAFKAAPPELSNSDDEDSRRKPKNPAMAFAEMAATQGIELGGRRVKVRRARMCEELGVVPIKDRKTGKAYKAYKPDGNAFNEVYELPNGNWVSVVIRRFDANQAGFNSGDFRPHPAARKVMRLHIDDMVAVDDGGQRRVLRVVKLSGQKITLADHFEGGALKTRDADKEDPFKYLEKSANVLKGMGLRKVGVNEIGRLTDSGPRDSASGGRAG

SEQ ID NO: 700 - protein, 1095 aa, unidentified
  REGION 1..1095: note = Description of Unknown: Cas Enzyme sequence
MTEARMRWRLGLDLGSNSLGWAVVRLDSEGSPCELTNLGPRIFPDGRNPKDGTSLAVQRRVPRGMRRRRDRYLGRRHDLMQALVALGLMPPDEAGRKGLEILDPYALRARAVHAPLTPHELGRALFHLNQRRGFKSNRKADSKDNESGLIKEGIGKLAALMEKEKARTLGEYLFMRLRKGGMARARPEAGFYTSRAMYEKEFDVIREHQQPHHTLSDAQWDGLKDIIFYQRPLKPVDPGWCLLEDGERRAARALPCAQEFRMVQEVANLRITEKPGAPALPLTLEQRDKVLGELRTQKELKLDRLIKLLKLPPEATVNLLDENRDKLKGDETSARLSHKDLFGKGWHRKSFDDRTAIVRVLLDTEKPEDVVRIAREQWGLKEEAAQKLANTGLPDGFARLSEKAITKLLPIMEDQGLNYSEAVAEIGHHSDFRPDRALDELPYYGAVLTRQVVGGDPSQPVTDEVAHYGRIANPTVHIGLNQVRRVVNDLVKVYGKPEQIVIELARDLKMNKEEKDKERRKNRDNEAANRRREDEIRAAGGVPTPHIMRKLRLWEEQKYGSVNVCPFTGEPISFEMAVDERTEIEHILPFSKTLDDSMANKVLALRKANRAKRDRTPYDAFGADPVIGGQQYDYDAILLRAAALPPNKRWRFQPDAMDKFKGEFAFLERQLNETKYLSRIARTYLANLYDEKGEGRQRVRAIPGRLTAMLRGRWGLNTLLRGHNVDGGDSDEPARKNRDDHRHHAIDAFVIAMTDQRLLQKVAEQNSDADRKRLIDSVPLPWPGFTPNELRPHLDRLVVAHKPDHGSYPWQTARNGRGHASTSGALHNETAYGLVAEGKNGNWQVVSRTALSSFATPEKMDAGLATIRDPALREALIAQWQAFQRKPPAPDVPDDPEAAPKKSKNAAAAFASFVATEGFVFKGRTVKVRRVRVVEELSVVAIRDRKTGKPYKAYKPDGNAFSDIYELPNGRWTAVTIRRFDANQPDFDPVKFRPHPRARRIMRLHIDDMVAVGEGADRRILRIVKMSGQTITMADHFEAGALKARDADKSDPFKYFQKSAGELRKIGFRKIGVDPIGRITDPGPRRAAQPGASPR

SEQ ID NO: 701 - protein, 1072 aa, unidentified
  REGION 1..1072: note = Description of Unknown: Cas Enzyme sequence
MQTYRLGIDLGVNSLGWCALTLDRDGNPNGILDIGVRLFTDGRAPKTGTSLAADRRIARQMRRRRDRYLKRRTRLMTLLVRHGLMPADPDERKKLEALDPYELRARGLDERLEPFAFGRALFHLNQRRGFKSSRKTDKGDDKERGKIDAGARKLKEALVESGLRTLGEYLYKRHVAREAVRVRPIGKGAKAEYPFYPLRALVEDEFERLWSKQAEFHPDLLTADAKAAIKEAIFFQRPLRPVDPGRCTLDPTDERAPWALPLAQRFRMLQEINHLEIIGRDLKPRKLTLAQRDKIYAKLRTARTDPTFDQIRRLLGLDSDQRFNLENERRTALKGDAVGRALSDKSRFGKAWWTYSDSEQDEIVETILAADDEEELAAIARRDWRLDDDHARAVARVGLPHGYCRLGRKALSRIVDELVAGFVEVTDPATGEVYRAPLTYDQAVRRAGYHHADFRGDGAAPELDYYGKPLQRHMISATGAPDDPDEKRYGRFPNPTVHIGLNELRRVVNALIRQYGKPAEIAIELARDLKLSREERRRVEEKIKENTERNEALRKELVALGQKVNRENLQRLKLYHELPPQQRCCIYTGKPISVEMLFSDEVVIDHILPFKDTLDDSLANKVLCLRSANHDKGKRTPYDAFRHHPGYDWTGILLRTELLPKNKRWRFAEDALQRFADNADFIARHLTDTAYVARVAKEYLGQICPSDRVWAIPGKLTSLLRGKWGLNGILSDSNLKNRADHRHHAIDAFVVACTDRALLQRMSTAAGEARLDRTLEDLPDPWDGFDRDAFRDRIRSVVVSLKPDYGRQGRLHEATAYGLVADPAKEDGATVVYRKSFADLNENEIARIRDRDLRARVQAHVAAAAKGTKLSQAQLSQALAAFAANDEKYRGIRHVRLLKTEDPSTLIRLKDRQGRLYKALIPGENWCVDVYEQCKGKRAGKWIGVPVTMFEANQPQFAEERLNRLRRNGTLDAGARKIMRLHKGDYLRLEIDGEPRVMRIVRLEVENQRLRLAEHKESGNLEERHKDPDDPFRWTFVSFDQLRKRNARRVSVDLLGRVSDPGSPQLRRAAGA

SEQ ID NO: 702 - protein, 1058 aa, unidentified
  REGION 1..1058: note = Description of Unknown: Cas Enzyme sequence
MHTQYRLGLDLGSNSIGWCALALEQDGKPSRLLAMGVRVYPDGRNPKDGSSLATQRRGPRSMRRNRDRYLQRRAKLLNALTRFGLMPEDAAKRARVAELDPYQLRAEALRRRLAPEELGRVLFHLNQHRGFKSNRRADLNSNESGLVSDAETRTRAELARSEHLTIGSWLAERHIARTGVRVRLAGSGKAAAYPFYPSREMVADEFDTLWAAQAGWNASLSDDIRGKLKEIIFFQRPLERPVVGRCWLEPDESRASRALPTAQRFRIAQSLAHLRLSRPGVPEAPLSDQQRAELAGPLYRGRDLTLDRVRTMLKLPAETDFNTRDDKLTGCPTAAKLGNGKKAAIGDTWHALSLQIQDAAIMALLESETDTQAIAALVQLGIPPAAAERAANSVLVDGHAALSAHAMSRILPHLEKGLVFSAAVQAAGYRHHSDRRTGEVRASLPYYGELLCQRMGTGTAKPDDPTEKRFGRAPNPTVHVALNEVRRVVNAIIAQHGPPTEIVVETLRDLGRSKKQREDYQKKQNADRAANDERRAMLAEMGVRVNGRNLMRLRLWQEQASDPKNRVCPYSGRLITARTAVSDEIQEDHILPFAVTLDDSAANRVLVTREANQAKARQSPFSAFGHTSEWPAIVERAALLPPQKRWRFQPDAMDKLAENADFLARQLGDSATIARWAKDYLEILAPERVWSIPGRLTAMLRDALGLNSATVLGKGGAFKDRKDHRHHAIDAVVVGLTDRGLLQRMTAAAKRADEAGRRLLLDLEAPWSGFVEQVAEHARSITVSYKPDTGWQNALHNDTAYGRIAGAAKAEPNVVVRRPLLALADKGVAAEKEAGPQDEDDGGRDAGRKVAITLRSDDSFVVRQIEAALRIKDKALRREALSEVKDAAGRSVRRIRTAERQDSVVEIRDRRTHAPYKYFKRDSNHRFELWRLPDGNLKWDVVSTFDAAREAEAVRLRMPLPPRRPHREAKRLIRLHKNDVVGTGTGAERRILVVKQLSVQGLTLAEHHEGGNLRNRDRDPGDPFKFVLVKSVMKFQELGLRKLWVRPDGSIVDPGPVA

SEQ ID NO: 703 - protein, 1106 aa, unidentified
  REGION 1..1106: note = Description of Unknown: Cas Enzyme sequence
MLTLPYFAIGRRGRIKVQPYRLSIDLGTNSIGWCLLNLSRPDTPGPKERIRALGSRLFSDGRDPKDGSSLAVARRLARQMRRRRDRYLVRRARLMAALVRFGLMPADRDARKSLEVEVDPYSARERGARERIEPFELGRALFHLNQRRGFKAVRMAAKKEGEEDGKIKVAVERLELEIKEAGKPTLGAWFAWRRMKNESIRARLTGKGKDAKYPFYPSRRMLEDEFDALWAEQARHHPDLLTEDRRKTLRRRIFFQRPLKPQLVGRCALYPDDQRAPRALPSVQRLRLYQELGNLRITFLDLTERPLTPGERDLIAGTILGFPVKPARKAPKIHADFSFDKLRALLDLPVGARFSLESEKRSKLLGDETGACLSGKFGPGWGALPLSEQDAIVEVLLSETDPDKVLETLTARWGVDETTAAALAGVRLSEFHHQYSRRAVSELLPVMERETRADPGGRIRPIRIDEAVKDLRGGKDHSDYSRDDDTLLDALPYYGEALERHVSFGSGKPTDPAERRFGRIANPTVHVALNQLRLLVNAVIARHGHPKEIVVELARDLKRSAEERRKEDKRQADNQKRNEERKRLILSLGERPTGRNILKLRLWEEQGPIEARLCPYTGAHINVSMLLSARVDIDHILPFSRTLDDSAGNKVVCLSEANRGKTNKSPWEAFGHDETLWAEIVARAEVLPKNKRWRFAPDAMEKADAEGGFLARHLNDTRYLSRLAREYLELVAPTVRVSPGRLTALLRRRWGVDAILAVEDERPADETTDAPDVKKNRGDQRHHALDAVVIGCIDQGMVQRLHTAAAKTEREAAAREGNIGRVLAECEVPWDGFRDELKRRAASIIVSHKPEHGVSGALHKETAYGPVDPAEDGYNLVARKPIDALSKDEIAAVRDVKLRAALVERLEARRRDANDPATALLKAAADLGAMPASKNIRRVRVLKKESNPVRIVHGKDFHHEDRPHEKLVLTGDVHHVDLVLSADGRKWVGRWSTLYEAHKTRTADGRAAPPRLNAGERFVTRLHKGDYLSLEHLGCRRVMLVVTLELTNNSVVLIEPHHVRTDRSKQVKVSCDRLRVRGAKRVTVDVLGRVRVHAPGSRTGVPRANE

SEQ ID NO: 704 - protein, 910 aa, unidentified
  REGION 1..910: note = Description of Unknown: Cas Enzyme sequence
RANEAEQGKIKIASDRLKAKIAREGQPTLGAWLAERHDRRAGVRARLMGAGAKAEYPFYPTRDLIRAEFDAIWVAQAGWNPTLTAAMRDEIAGILFHQRPLKDPPVGRCWLEPSEYRAAKALPSSQAFRIAQDLAHLAIRRVGEPDILLTPEQRVSLSAVLNAGSDLSFHQMRRTLGLSGGETFNLESKAREKLKGAETAARLAGKKGPLAAIWPNLELAARDAIAAALLEAAKPEDAIDSLVALGIPADAAELAELVALPEGHASLSTKAILALLPHMAAGARYSDAVIAGGYAHHSDDRDGVIHDRLPYYGVALADRIGTGSGVLDDPEEKRFGRAPNPTVHVALNQLRHVVNTLIARHGHPTQIVVEVLRELNQSAFERRRIEKEQAENAKRREEWAKELVALGQRVNGRNLAFMRLWSEQAGDPKERICPYTGERISLRRLFSGEVEEDHILPYAVTLDDSFANRVIVVREANRRKSRQSPYDAFHASPEWPDIQARAALLPPSKAWRFAPDALKKWKGEHQDFLARHLTDSAYLARLARLYLRAVCDPDKVWCIPGRLTSMLRDAHGLNSATLLGKGGTRKDRDDHRHHAIDALTIGLVDRSLLQRVATAAARAEERGRRLLDDLPEPWPGFIAEASQKVQGIVVSFKPDTAPSGRLHNETAYAELPDAGPKAPNVAHRVPVQTLAGKGPQEVREAIADPELAKRIVAALAKAEGKPGQAAALGAVAHDAEGRTVRRVRVRERLDTEEIADRRSGRPYKRVKLDANHRVEFWRLPPQGGKPGKVQMVVVPMLHAAADAEAARLQRPLPDRRPHPAAKLMMRLHKDDVVAFGEGPARRLLRVVKFSERQLALADLHESGALKARDADRGDRFKYVYPGISRLRDEGARKAFVDPSGRVLDPGPLSW

SEQ ID NO: 705 - protein, 1042 aa, unidentified
  REGION 1..1042: note = Description of Unknown: Cas Enzyme sequence
MKYRLGLDLGTNSIGWCALKLDGEGKPNGVLASGVRLLTPNQEAGRDPQSKVSLAADRRVARSMRRRRDRFLRRQKRLMELLVESGLMPDAETARKELEKIDPYMLRARALDGRIEAHELGRALFHINQRRGFKSNRIADSDDDEKGATKQGIKALREALAAEDCRTLGQFLAKRHEKRQQVRFRPTTEGTKILYDFYPSRDLVEHEIDEIWKVQAAHHPQLTDELLARLKHIAIEQRPLKKPVVGRCTFRPEEEERSPRALPDFQRFRILQDLSSLVVERPGAASRKLSITERDALAALLGAQASPVTFEKMRKAIKLNDGERFNYEATNRKGFDPDLTAAKLGAKNAFGKTWRSLERARQNEIVEKLLTEQDEDALADWLEADAGLAPENTEYVAGKLRLPQGYGNLGRTMLADIIDAMTHESVEATDPATGEVYPAPITYDQAVERLGLHHSSLREGEKLARLPYYGDLLKRHVIERPDAPEGSQERRGKVTNPTVHIALNQTGKLVNALIDAYGPPEQIVVELARELKQNQKQKDEHNKRIRENTDANEIRAEKLKELKVENNGENRLRMRLYAELPPDERVCVYSGKPIGIEKLYSADIEIDHILPFSATLDDGIANKVLCTRESNRKKGNRAPADAFDANRLTEMAERAERLFKNKAWRFAPDAMARFAENGGWSARHLTDTQHIARLTKAYLEHVCEPGQVWAVPGRMTAMLRGLWGLNQLLPGHNLPDGKKDRGDHRHHAIDAFVVACTERSLLQRIANAAGKGEALDVQRLFGSEGVPKPWDGFRDELGASLNALVVAHKRDHGIQGQLHEETAYGIVDAEIDGKKFNLVTRKPIDRLTAKEITQVQSTSLRAELMRVAEAAETTGTKLNVALAEFGRASGVRRVRVLKTEQSFITVRHGPGGQFEKALVPGDNHRIEIFEHDGNWLCEAVTVFDANKDGWTPEWTRRYRGARLVMTLHKGDMIEADLGTADRYWTVYRLNAASNRVWVAPHQDAHGQDERAWQRPTMTTLQKAGAKLAQLDMLGRPRRPGGG

SEQ ID NO: 706 - protein, 1110 aa, unidentified
  REGION 1..1110: note = Description of Unknown: Cas Enzyme sequence
VEKFPTLKTLGIDLGTNSLGWCLIETVGEPGQNDGGRIVDLGARIFSQSEMAGRDPKSQASLAVARREARGMRRRRDRYLKRRARLLDLLTRNGLMPADEAERKALLAETSDGKGGNLETSVYALRAKALDEALTPYELGRVLFQLNQRRGFKSNHKTDSNDAEQGKIAEAVTRLETEMLEEGARSFGEWLHKRRLAGLSVRARMTSDGKAYTFYPSRAVLEREYDRIVKTQREFHPGLLSDELVGDLRETIFFQRPLRPVKPGKCSYNSAENRLPKAHPLFQSFRLMKEVNELEYAGEDQKWHKLTPDERNALVLHLRTKLNKQGKAPFSKLRQTLKLGKEARFNKESDNRKDLEGDVVAFRLSQPACFGNAWSMLSLNRQAEIVERLRTEPDRENLVDWLRTECRLERENAWAVVDTAVPEGYGRLGRTALASLLDEMTRGQDEDGFVITEAEAAKRIYGRTNSESDPNRKGLDFLPKYQALLERHIPPGTGDRVDEKDPAWDEAMGRITNPTVHIALNQLRRVVNAVIRKHGKPDRIAIELGRELKLNEQKRNDVNRRIGENTRAAQARSKELQETYKQTDNGYNRLRLKLWEELNPDQPLNRVCVYCGTPITPAKLFSGEVDVDHILPYSKTLDDSQGNKILCCAACNRTKGDRPPAGVPQWQASYGELLARVTALPKNKQWRFAEDAMARFGDEEGFLARQVTDMQYISRLSLTYLAHLYNYEEPDIDGVFRKHKRVRALPGRMTEMLRRNWALNDILHDHNYTDPAKPKNRMDHRHHAIDAAVIACTSRALIQRLARASAQTEAEGAERLAGQVLVPWPGFRDELRDKIQSVIVSHKPDHGTVSRAGYDRGRGQTAGKLHNDTAYGQTGEKDEKGNDLVMRRVGLSHFKKPSDFRSIRANEHGHSELRDRLIAATQGCKGKAFEAAVQHFVETDAKFKGIRHIRIVEPEKPVWIVHGNGKHKKGYLPGSNHRFDVWQLPDGKWEAEVVSAFDAHRPDYVPEMRLKHHNARKILSLTKGDMVAYDDPESGERIVAKVRKFDQRNKQLYLDPHNEAGNLEERERQKTYKPFRPMPNPLKKVRPRQVRIDEIGQVFDPGPWWEQLDG

SEQ ID NO: 707 - protein, 1089 aa, unidentified
  REGION 1..1089: note = Description of Unknown: Cas Enzyme sequence
MKNGTNLVSAPYRLALDLGTNSIGWCALTLDDRGEPNGILDLGVRVMTPNDEAGRDPKSKASLAADRRAARSARKRRDRFIRRQKRLIDLLIQAGLMPADETERKQLELLDPYGLRRRALDEALTPHELGRALFHLNQRRGFKSNRVADSDDNEKGATKLGIAQLNEKLAEADARTLGEFLARRHAHNQNPDRQGTQPVRFRPKREGNKTLYDLYPARQMTAHEFDLIWQAQQPHHPDILTPTLKEELKWVILEQRPLKPPVVGNCSLRPDEKRAPRAMPVFQRFRMLTELANLEIEKDGKGQRKLTIAERDALLLKLSSAKSTVPFKTLHKALKLEPDERFNLATGGRKGLDPDQLNTALGKAFGDGWPALSHDRRTVLVDKLVHEPEVGTLLDWLETEFPELDAARYEALSNARLPRDYASLGLSALTDLVAIMERDGVETHDPATGEVYAAPITYDEAVKRLGEASGEDLHHSDRRPKGDLLSRLPYYGDLPALKGNVVQNQAPNIAKTSMEYRGRVPNPTVHIAMNQLRRVVNEVMELYGSPAEIVLELGRELKLNREAKDKRNREMRENEAANNKRRDTLKNQQFADTPGNMLLLRLYDELPADEKVCAYSGQPISLQMLFDGSVEIDHILPFSRTLDDGFGNKVLCTRQANRDKGNGSPYEAFANSSVYDYAAMVDRARRILPKKAWRFQPDAMERFAGDSGFISRQLTDSQHMARLARRYLAHICPDNKVWAVTGQQTARLRGFWGLNSLLPGHNLPESENGKRRNVKNRDDHRHHAIDAFVIACTDRGLLKRFADASARAEEQFDQRLVLKGEIPQPFDGYREQLREALDRVIISHRPDHAINGQLHEETAFGPANDEIDGKAYNLVTRKEIAELSEREIGRIRDRRLRDELTGVAAAAKGAGQKLEEALAAYGKAHDIRRVRILDMSDAVTIRHGANGQHRKAYKTGSNYSIEIFETPDGKWRGEGITLFNAMLQQRKDTPDDAGIRWPTDYPDARLIMRLRKGDTIALDEEDGSRGYYIVRKLNPLNTRIEVVPHTKAGKIESSDYLRLAYSRLKERNCTLVHINPAGRPFVIGQQSTA

SEQ ID NO: 708 - protein, 1069 aa, unidentified
  REGION 1..1069: note = Description of Unknown: Cas Enzyme sequence
MKNTASLPLDSEISIGLDIGIGSAAIAVLKPGSLEHLYVHCFPVPEDAKTKELLNAQRRQHRLARRQTHRRRRRRNDVARLLVKHLGLRLEDIKGRDQVDPWSVRARGLGEELSALEFAAALMHIVKRRGFQSNSKELASGNDAEGGKALRGIASMTEKSQRYATVGEMMFGDAEFADKKRNKPNDYSHTVSRQSMREEAEALFAAQRRHNSSRITANLEEEFLAAAFFQRPLQASEHLLGTCPFEPAQKRSSSFAPGFERFRYLAKLNSLRLREPESEPRAFSDAELAAAAALFGTRQSITYKHVRKAAGLSDGTVFEGIPRDKPLKGALWEGADICRSAGSCVGTMALKKAIADHTGKSEWARILDDSELLDDIAFTITFREQIRSEPRAFGPGGGGPLVSRPGGDGQDNEESIERGLRERGIPDDLIEPLLVATEAGVFKKFKGAGQISALAARRINGGLAKGLVYSAACEQAGYDHAAQAETKISDIANPVVRTVLRESKRLLKTVLHDLGARPGRITIEMARDVGKPVDVRGKIAKANNERHGERLKFRQQYADDVGKDPTSEELLAYQLWKEQNHCCVYSGQVIHPRDLDLSRRAVEIDHVLPRSRSQDNSYHNKVLCLTELNQAKKNRSPFEWMQQEPHAKSLPWEEFEVWVQSLPAYRGMKKRGLLMRNFADREQGFVSRNLNDTRYACKVLRAELETLYRGESVEAKTGSRKRRVFTRPGSMTAVVRRSWGLENLKKDADGSRTGDLHHAVDAAVVAALGADEGLTQQLTNIYQHLEGTGRAYNIDGIKLPWPTFRDEVRDRLDKVFVTRLERRKKVGEGHEATIRRLRKQRDDDGVEQRVVFERKDIAKVTAPDLEKLDPVRQRNLIVAVGSWLDQDKKTRPVYPCMPSTGDANGPEIRKIRLPIGKASGIELQGGLVKNGSMIRTDVFRDDEGFWLVPVYAHQIADHVRYLRPPHMASIAYKPPEEWHDVSDATFLFSLYPWSFVRLTSRKGEFFEGYYRGMNISVASLSLSGHANSGRTESRGVKSLAVLEKRTVSLLGGHRPSEMEVRQWPGAVSI

SEQ ID NO: 709 - protein, 1037 aa, unidentified
  REGION 1..1037: note = Description of Unknown: Cas Enzyme sequence
MMRLGLDLGTNSIGWALYRLDAEGEPEALITGGVLIHSDGRNPRDQSSNASERREKRGPRRNRDRMLRRRKRAAQRLHKLDLLPSDKQDRAASRKLDPLRLRAEALDRPLTPHELGRALLSFVDRRGFKSNRKADGGEDGQIRSEVDKLRMRMAQSGARSLGEFLWKRRRRGKTIRARLGNGLYPDRDMIKHELDKIREAQTAHHAQVSDRDWDTIIETILFQRELKPVERGSCTLIESQPRIYKAEPLFQLFRIWQDVLNLEFSPPREGYRPLDERQRGLVVRKLLEVKSRKFEQLATLAGLPEGSRFNFHTTARDKLDGDQTADVLGAPKCFGKRHWANLGAERQQEVVERLVDEKDHGALTQWLRDEFGLSAEAANAVAEAKLPPGTGHLSKAAIERLLPYMEEEGLPYVQAVISAGLGHHSDIHGDGKAKRLPYYGAVLTRDVVGGTSKNDDPDVKRYGRIGNPTVHIALGQVRRLFNAIADQYGKPDEVVVELARDLKQNEKQRLAHQRQQNDNRKRNEKLREMAANAGVPEPSQLEMRKLRLWDEQGPENGKLCPFTGTTLSIGRVLSEETEIEHILPYSRTLDDSMDNTVVAMRDANREKGRRTPHEAWGHDPVRYEQILARAELLPQKKRRRFHADAMEQFEERGGFLDRQLNETRYLSRAIKQYLEAVVEPNRIWVTPGQLTAMLRVAWGLNSILSDTDQKERNDHRHHLIDAAVVGMTSRSLLQRISRDSARGVDDLSQRVAKSVADPWENFRQDAKDLCERVVVRHRPDHFQPKPGCTTGSLHKETAYGPIFDTDGKLQYDERGNVLLVETKPLDALDEKKLETVRDPALRERLQAIWRQVESEAGEGKLNERFADRARRDLGVRRARVLVRLKEDSLAFIHDKAGKIYKAYKTDGNAYMDVWLLPNGKTTGETVSRFDAHQPGFRSQVKAKHPTAKKLMRLHRDDMIAIGEGDERNILRVKELSGQRIISVDHNQGGKAKEMTLISKRATRVFQEGLRKVSVNILGQVHDGGPFDQSGRGTYGRR

SEQ ID NO: 710 - protein, 1059 aa, unidentified
  REGION 1..1059: note = Description of Unknown: Cas Enzyme sequence
MSSGNRPYRLGLDLGSNSIGWFVIWLDDNGQPCGLGPGGVRIFPDGRDPQSKASNAASRRVARGMRRRRDRYLKRRARLMDQLVGFGLMPADEAEREKLEECDPYELRASALDLRLPLHHVGRALFHLNQRRGFRSNRKTDGGDNESGPIKEGVGKLERALETESARTLGEFLWRRHRERRGVRIRNSGTATKTAYDHYPSRAMLEKEFDAIWKAQARHHPEMTDEACGALHETIFHQRPLREQPVGKCGLDPAKEPGDADGFRLSRAHPLAQRFRILQEVNNLEYSEIGRGSTRLSDEQRMTLVLALTGKNKLSFDRMRALLKLPQGAHFNLESDKRKDLKGDETAARLSHKDLFGKQWRALDRMRQWTIVEKLLATQDDDAMVDWLMAETGLNKAAARRVSGATLPEGHARLGLRAIGRLLPHMEAGLRYDEAATLEYHSHSEKRTGEVVERLPYYGAWMPNAVTGTGDQRDGNQKRWGRLPNPTVHIGLSQLRRIANAIVKELGPPTEAVVEMTRSFKLRPDRVRELEREQAANQEKNDKRDRDIAGLGHVANARNRLKMRLWEELDPNDPIDRCCPFTGEKISCRRLFSEEVEIEHLIPFSTSWDDSAANKVVAMRYANRAKGQNTPFEAFGHSPTISGRRYDWDAIAQRAANLPKNKNWRFAPDAMDRFGDENGFLSRQLNETGWFARLAKDYIEGLTGPYNVWVVPGRLTEMIRAKWGLNSLLPDHNFTDRKNRADHRHHAIDALVAGLTDRSLLQAMASAYDDERDRISVPEPWETLRKELGRALDTMTVSHRPDHAASGKLHEATAYGTVKCPDREGANLVYRKPLTGPKGLTRPEIGRIRDVRLRSMVEAHVAAVLAKGKNLKEALESFNTAHEGHPHVKEGLRRVRILKSEKPEYLVAVSHGERPHGKAYSAGENAFVDIFETPDSKWHGEATTVFQANEPCHRPSWHGLDATFVMRVRKGDLIALDHDGARQVMVVHRLDASNSRFKLAAHNETGNLDNRHAEPNDTDPFRWLMASYGTLKERCAERVRVDELGRVWRIPPKEASRSL

SEQ ID NO: 711 - protein, 1055 aa, unidentified
  REGION 1..1055: note = Description of Unknown: Cas Enzyme sequence
MSSHFRAYRLGLDLGSNSIGWFVIWLDEDGKPCGLGPGGVRIFPDGRDPQSKTSNAASRRVARSMRRRRDRYLKRRTRLMDQLCEFGLMPLDETERKSLEQCDPYELRAAALDRPLPLHHVGRALFHLNQRRGFKSNRKTDGGDAESGPIKEAVSKLERTMEAEGARTLGEFLWRRQRERRGIRARSNGTATKVAYDHYPSRAMLVNEFDALWTAQAPHHPEMTDDARDALRETIFHQRPLREQPVGKCALDPARDLEDVDGFRLPRAHPLAQRFRILQEVNNLEYGEVGRESIKLDNEQCRMLVLALSERNKLSFDRARTLLNLPEGARFNLESDKRKDLKGDETAAKLSHRDLFGRQWRSMERARQCTVVERLLAAQDENELVAWLRVETGLDKARAQRVSDAALPNGHSRLGHRAIARLLRHMETGLRYDEAARLEYGSHSERRTGEVVDRLPYYGAWMPDAVTGSGDVRDGNLKRWGRLPNPTVHIGLGQLRRVVNALAKGYGQPTEAVVEMTRGFKLSPDEVRRIEREQAENQVKNQERDDIIQSHGHAPNARNRLKMRLWEELNTDDPLDRRCPLTGEMISIRRLFSEEVEIEHLIPFSKSWDDSAANKVVAMRFANRAKDQRAPFEAFGDSPTINGCRYVWEAIAERAANLSRNKSWRFAPDAMQRFEERGGFLARQLNETGWFARLAKGYVEGLTGPDKVWVVPGRLTEMIRAKWDLNSLLPDHNFTDRKNRADHRHHAIDALVAGLTDRSLLQAMANAYDGQRERIMVPEPWEGLREDLGRTLDAMTVSHRPDHAASDKLHEATAYGLVKDPCREDGNLVYRKDLARLSKREVGLIRDLRLRGMVEHHVKRERAKGKSHADALASFNVAHEGHPHVRQGVGRVRILKPEKPEYLVTVGDPEGRAYKAYSAGENAFVDIFETPDGKWHGEATTVFQANRPDHLPRWQDRDEVTFVMRIRKGDFVALDYEGRRQAMVVHRLDASSGRFKLAAQNEAGNLDKRHTDPADPFRWLMASYNPLKKHGAERVRVDDLGRVWRILPEEAVRAL

SEQ ID NO: 712 - protein, 1066 aa, unidentified
  REGION 1..1066: note = Description of Unknown: Cas Enzyme sequence
MSYRLALDLGSTSLGWAMVRLDANARPCAIIKTGVRIFSDGRDPQKGASLAVHRREKRAMRRRRDRLLKRKNRMMRLLLQHGFISTDAKSLESFLTHGLIPAEAKVLETINPYELRARGLDETLTPADFARALLHINQRRGFKSNRKTDKNDNDSSALKTAISALRQQLDPNGAGGKARTVGELLWRRMQQGLEVRSKNKSAKPNKVEYDLYIDRTMIEAEFDALWIKQSALNPTVFTVAAGKELKDCLLHQRPLKPVKPGRCMLEPNEERAPLALPSQQRFRIYQEVNNLRILEKDLQDKPLTPEQRDRIVAMLEHPRKDKKTAHEVTFDQIRTALNLGGTTKFNLEDDKRKSLKGNATSSNLSKKNLFGPEWIKLPLERQNEIVMRLLTEESETVLTAWLQTEFGFDEVRAKAIANTGLAEGYGSLSAKALAKILPELQAQVITYDKAVQAAGYVHHSRLNTHSEVLGLTFDTGIERVNPSTGEIEKLHAHKQLPYYGEYLERHVGFGTGRLEDPPEKRFGKIANPTVHIGLNQVRVVVNALIRRYGHPTEIIVEVARELKQSHEQRLEDQRRQADNQNRNKKLRDEAARILEISPERVKHADIQKLILWKELSFDVADRKCPYSGVQISERMALSDEVEIEHILPFSQTLDDSLNNKTVATRRANRVKGNRTPAQAREDFEHEGWPYEDILQRAERMPKNKRYRFGSDGYEKWLREDKDFLARALNDTRHLSRVAYEYLSLICPQNTRVIPGQMTGMLRAKFGLNDVLGLNGEKNRNDHRHHAVDACVIAVTDQGMLQKFAQASASAREKQLNKLIETMPLPWDTYREHVKRAVHNIWVSHKPDHGYENAMMEATAYGIRKDGSIKQKVKANGEEGREIKNVVRISEQKQPQRHGVDAEGKPLPYIGYIGGSNYCIEIVRNDKGKWEGEVITTFSVYQRVAAEIKNLRKQGLSYENARIQAEAQLRSDKSSSGRPLVMRLISGDSVRIEVDGQTRLLRVVKIDPSTNIVFAEINEAGELKKRHDADDDAFRYVNLRGESLRKAKTRRVTISPIGELRDIGFKD

SEQ ID NO: 713 - protein, 1048 aa, unidentified
  REGION 1..1048: note = Description of Unknown: Cas Enzyme sequence
MAWRLGLDIGTNSIGWAALSLIGEKGAWQPSGIIASGVRIFSDGRNPKDRQSLAVARRLPRQHRRMRDRYLKRRTHFMNALVKHGLMPGDSEHRKALEHEDPWTLRVKGLDEQLSLHQLGRALFHLQQRRGFKSNRKTDTGGDDDSGKIKSAAAAVTAAMDKTGARTLGELLATPRVEDPKRAHDHPVRTRLKGSGAKAHYDYYPTRDLIEQEFNCLWAAQQNFHDGALSDIARDELHDILFFQRKLKAQPVGKCSLDPTEERAPKALPSVQRLRIYQEINHLTVSLPGEAARPLSLAERDILADKALAVKQLTFDAARTALKLPELALFNLESKKRKHLDGDKTAAVLAGAKRWGTGWRGLPVDDQERIVEDLLNEEDESVLLDWLMSNFGLTVETAEAVASSSLPDGHGQLGPTATKRVLAELEKNVISYDKAVAAAGYPSHSQLDFDGEAFTALPYYGEVLERHVSFGSGEPADLPEKRYGKIANPTVHVALNQIRRVINDLIDRFGAPDQIVVELARDLPLSAKGKSDLDKTQRQNQNANDARRKILAEMGQSDSYDNRMRLRLWEELNPDNPLDRRCPYTGEQIAQNRVFSAEVEIEHILPFSRTLDDGVGNKTLSVRRANRFKGQQTPFEAFAASPEGYDWAGISARATNLPKNKSWRFNPDAMDRYDNDERDFLARQLTDTQYMSRLATLYLRRTGADVWVTPGRFTSDLRWAWGLDSVLAGHNREEAGDLEKNRNDHRHHAIDAVVVALTDRGLLKHVATVAGRAEERFDKRYLADINDPWADFRDTVRASVEQIVASHKPDHGVQGALHNDTAYGIVEPADASGRSQVVHRVPLNGLKPKQLDIIRDPLIREHLKRQTAGLEGKDFTDALIMAGEAMEPPVRKVRIVETLSVIPTITDTSGKIRKAYKGDANYCYDIFRDEKGKWTGNVVSRFAANQKEFNPNARALPDGTPLIMRIRGDDMIAVNEAGKRHILRVVKISTGEITLADHREGGSLKSRNADKEDPFKYARIRPSSLQKLKARLVHVSPAGRVFDPGPGE

SEQ ID NO: 714 - protein, 1048 aa, unidentified
  REGION 1..1048: note = Description of Unknown: Cas Enzyme sequence
MAWRLGLDIGTNSIGWANLSLEGENGEKKPSGIISTGVRIFSDGRNPKDKQSLAVARRLPRQQRRIRDRYLRRRKHFMDALARRELMPHDIEARKIIEKEDPWTLRVKGLDEKLSLHQLGRALFHLQQRRGFKSNRKTNARDDDESGKIKLAAAAAHKAMLETGARTYGELLATPRIKDPKNAHIHLVRTRLQGSGVKAHYDYYPTRDLIKQEFNSLWSAQKAFHKGLLTDEAREELHDILFFQRNLKAQPIGKCSLAPSEERVPKALPSVQRLRIYQELNNLTVSLPGQTARPVTLEERDILVDKALRTKRLTFDAARKAIKISQDARFNLESEKRQHLDGDKTAAIIATDKRWGKKWREICFIDQERIVEKLLEEENEIVLIEWLMSNYQLSEQVALMVASAPLPDGHGQLGKTATSKILTELAKGVISFDKAVVAGGYQSHAQLDFDGEVSDKLPYYGEVLERHVTFGTGEPNDLPEKRYGKIANPTVHVALNQIRKVVNNLVKMHGCPSEIVVELSRDLPLSSKGKSELERVQRDNQKANDGRRKVLAELGQVDTYENRLRLRLWEELNAQDPLDRRCPYTGEQISLSKVFSDEVEIEHILPFSRTLDDGIGNKTLSMRYANRFKGQRTPHEAFASSPERYDWEAISARAANLLKNRSWRFNPDAMDRYNNDERDFLARQLTDTQYISRLATIYLKRTGADVWVTPGRFTSDLRWAWGLNSVLAGHNRDEAVDPAKNRNDHRHHALDAIVIALTDRGLLNHVATIAGRAEEKFNKRYLSNISDPWDNFRDTVRESMKQIIVSHKPDHGVQGALHNDTAYGVIEKPNSKGRSIVVHRVPLENLKSKQLDIIRDPLVREHLKSNTKGLEGKNFTEKLVLTGEAMTPPVRKVRIIETLSVIPISANEGGKILKAYKGDANYCYDIYLDGREIWTGHVVSRFNAIKTNFRPDSKVLEDGTPLIMRIRGNDMIALDVGEKQRILRVVKFSTGQIALAEHFESGSLKARDADKEDNFKYLVASPSRLQKLNARLVSVSPAGRVFNLGSIQ

SEQ ID NO: 715 - protein, 1059 aa, unidentified
  REGION 1..1059: note = Description of Unknown: Cas Enzyme sequence
MAWRLGLDLGTNSLGWAALKLDGQGRPTGLIASGVRIFSDGRNPKDKQSLAVMRRLPRQQRRRRDRYLKRRSEFMERLIEHGLMPKDPAERKRLEKFDPWYLRVRGLDEKLSLHELGRALFHLQQRRGFKSNRKTDKGAEDEKGKIKSAAENVKTVMKNAGARTLGEYLAKPRVKNPKDFETRKAARKAAHEAAQEHPVRARLQGSGAKAFYDFYPTRDMIAQEFDTLWKAQKKFHDAALSDAARDALRNTLLFQRKLKSQPVGKCSLDPSEKRAPHALPSVQRIRIYQEVNHLNVRLPGEAERNLTLEERDSLVAWALAHQKLEFQKARKLLKLPDEARFNLESERRKHLDGDKTAAVLANNNRWGPGWRKIPAEAQEEIVKRLLEEENEKTLVDWLMAEHSLSAEAAEKVANAPLPAGHGRLGRTATRRVLAELERAVITYDAAKEAAGYDDLDFDGEVFDALPYYGEVLERHVAFGTGEPADLPEKRVGKIANPTVHVALNQLRRVINTLIKALIKRYGRPTEIVVELARNLPLSAKGKSELERQQRDNQDANDKRRAILEEQKLSDTYENRLRLRLWEELNPANPLTRRCPYTGEQIGIERLFTDEVEIDHILPFSRTLDDGIGNKTVSMRIANRVKGQKTPYEAFASSPEGFDWPAIKARAANLPNNKSWRFGPDAMARYDNEERDFLARQLNETRYLSLLAKTYLLRTGADVWVTPGRLTADLRWTWGLNSVLAGHNLEEAADPAKNRNDHRHHAIDAIVVALTDRGLLQRVATEAARAEENFDRRLLAGLKEPWRNFREDVRTSINRITISHKPDHGVEGALHEETAYGIVRDPLTGEPRLATRKPVTSLTAAEVKRIGDLGIRKTLMERTKGLEKKELQAELERCVKETGTHRVRVHKVEADYKVIRHGKNGEYKAVIPGENYCIDIIETPDGKWRGYGVTRFDANRKDWTPPWKRDHPDARPIMRVRKNDLLRLEKDGREQVMRVIRLAPSANCFYLALHKEGGELEKRHKDSEDSFRWDFANFSKLKDRCARLVHVDPAGRVFDPGPPR

SEQ ID NO: 716 - protein, 1082 aa, unidentified
  REGION 1..1082: note = Description of Unknown: Cas Enzyme sequence
MHTRLGLDIGTNSIGWWLYETDGDRIISVLDGGVRIFSDGRDPKSGASLAVDRRAARSMRRRRDRYLRRRSALMRKLAEAGLMPKDSAEAKTLEARDPYALRAQGLDEALPLHHLGRVLFHLNQRRGFKSNRKTDRGDNESGKIKDATARLDQAIMTKGARSYGEFLHMRRAAAPDPRQTPSVRTRLTVARRDHAEKEESGYDFYPDRRHLEEEFHKLWDAQAAFHPEALTDDLKDALFEIIFYQRPLKAPAIGLCLFAGIGDVPDGERRLPKAHPLTQRRTLYETVNNLRITSDGRERRPLTLEERDQVIGLLDTKKPTKTLTSMAMKLPALAKALKLPPGARFTLETANRDAIACDPVRASLIHPDRFGPNWSKLNPDQQWEVVRRIQAVESDAEHIALVDWLCETHGLDRDHAEATAHAPLPEGYGRLGETATRMIHSILENDTDDDGNPLTYDKAATRCFGHHSDMRTGEVLDALPYYGEILERHVIPGTGDRNDDDITRFGRITNPTVHIGLNQLRRLVNGIIIVHGKPDQIVVELARELKMSEKQKTEVNKKNRDNRAAAEKRSEKLAELGQADTGANRMILRLWEDLGHDVMTRNCPYTGQRISAGMLFDGSCDVDHILPYSRTLDDSFANRTLCLREANREKRNPTPWEAWGETDRWHAIEANLKNLPDNKRWRFAPDAMERFEGENDFLDRALVDTQYLSRIAKTYLEALYTEGGHVWVVPGRLTEMLRRHWGLNSLLPDHNKGAGKAKNRTDHRHHAIDAAVIAGTDRGLINRISKAAGREEADGKSAEDIARDTPEPWEHFRSDIRTQLDKITVSHRADHGRIDPQARKQGRDSTTGRLHNDTAYGIVDDQSVVSRVPLLALKPGDIEVTSRGKNIRDPFLQKHLARVTRGKTTPKEIEAALVAFASAETLPDGKDNPYRGLRHVRLIESLQASARVVPPSQPFKAYKGDSNHCFEIWRMPDGKPKAQVITTFEAHGINSRKPHPAAKRLLRIFKRDMVAIERDGKTLICYVQTMHLKNGLFLAPHTEARDRDKGDPFRLIQMATGPLLKAGIRRVHVDEMGGLRDPGPAC

SEQ ID NO: 717 - protein, 1036 aa, unidentified
  REGION 1..1036: note = Description of Unknown: Cas Enzyme sequence
MSKMTPKYRLALDIGTTSIGWAAFRLNDENQPTAIIRAGVRIFGDGRNPKDGASLAVARRQARQMRRRRDRLLKRKQRMLEALVRFGFMPADATARRSLADMNPYRLRAEGLTRELTPHEFGRAVFHLNQRRGFKSNRKTDAKDNESGALKKAIGDLRKQLAGADGSAGFATVGALLWSRAKDGGMVRARYRETKVVKDDGKTRTDKSYDLYIDRAMIADEFDLLWSAQAKFNPGLYSDDAREYLRDTLLHQRKLLPAKPGRCTLLPDQERAPLALPSAQIFRIVQEVNNLRVEQMDEDGVIGSPRELSQSERNTLITALNSSEKVTFTKAKKLLKLPEAVAFNLESENRQFLKGNAVNHSFKKAGVDMAWWAGLERAQQDELVTLLLNVESELELLESLKTRFGVEEELGEVLSGVGLPDGHSSLCLEAISRVLPHLERDGVTFDKAALAAGFESHSQVDSDQRLTLLPYYGEYLSRHTGFGTGNPSDTPEKRYGKIANPTVHIGLNQIRAVVNDLIGQYGPPQQIVVELARDLKSSKDQKREHQRQQAENTKRNERLRELAAELLGKSKDLVKRDDIQRLILWEELSTDPLQRMCPYTGLVISAGMVFSEEIEVEHILPFARTLDDSLNNKTLSARRANRVKGNRTPWEAKEDFAGQGWSYESIQARTERMPMAKRKRFAPDGYERWLREDKDFLARALNDTRHLSRVAKAYLGLICDPNSIWVLPGQLTALLRAKLGLNSILGRDGEKNRDDHRHHAVDACVIGITDRALLQSVSRASEASWEAKGRLIERMPTPWPTYREHVERAIGAIVVSHRPDHGYQAGFMEDTAYGQRGVGAARQWVTRGIGGDNPNERALNALIGIGHRPQGAHRNPTGDGHDGRYKGYVGGSNYCIDIVADAKGRWVGEVVSTFQAYHLVRERGEGALYSAKVAVSGKPLVFRLVVGDVLLADFGKGPEIIRVQRIATSGQINFCPHNEANADARNRVDKKIDPFTFYSSNSGPLKKRLISVLRISPSGRVNRKRLEEMPDAGASS

SEQ ID NO: 718 - protein, 1020 aa, unidentified
  REGION 1..1020: note = Description of Unknown: Cas Enzyme sequence
MLPKLRYRLGLDIGTSSIGWCLLKINPDYQPEAIIKMGVRIFSDGRNPKDGSSLAVTRREARQMRRRRDRLLKRKNRLIDALVKHGFFPKNSAERQASINLNPYELRKKGLYEKLLPQEFARALFHINQRRGFLSNRKTDKKDNDSGALKQAIKKLREKLGEEKCQTLGEWLAKRHEQGLSVRARLRGSTQRDKAYDFYADRAMIEHEFDTLWTKQQTLNPTLFNEGARHELKDTLLFQRNLKPVKPGRCTLIPEKERAPLALPSSQLFRIYQEVNNLRIVAEDLSETPLTKEQRDHIFNLLSIKNKVTFKAMAKALKLSSNSSFNLEDIKRDFLKGNSTAVILSKDEHFGESWYALTLSEQDHIVERLLNEPSEKIAISWLMNKYHLDESTAENTANTSLPEGYGNLSKAALDKILPQLIKQVITYDKAVLAAGFESHSALSHSQVTGEIMQALPYYGEPLRRHVAFAKDNPRNDEERFGKIANPTVHIGLNELRKVVNAIIKRYGHPSEVVVEVTRDLKLSREKKLELQREQKVKQDFNEKLVKEACDILKLNPDTLDRSKRRDLSQKMQLWYELNPNDPTNRCCPYTGEQLNITKLLSNEVEIEHILPYSRTLDDSLNNKTVCMSRANRIKDNNTPYEAFGANHEKGYDYEAILQRASYMPKNKGKRFAKDGYERWLKEDKDFIARSLNDTAYLSRIAKEYLSLICPPNRVRAIPGRMTALLRGTFGLNQFLSGDATKNRDDHRHHALDAAVIGITDQGLLQRFSQANAKAKSLQLNRLVENMPLPWETYREHVERGLKHIVISHKPDHGYQGAMHEETAWGLRSNGTVTRRVREEGSTQRNREFANKKLVEINSTNNKNRHGVDANGNPFAYKGYVGGSNYCIEIWQDEKEKWHGDVISTYQAYQVIRNLGEVEGIKKLGNPMLSQSDKQLVMRLMINDCVRLKIDGVYKIMRIVKINGGDGVISLAGHLEANVDSRNRDKADPFKYTYKTAGSLKTARAQRVTVSPMGEVNYRGG

SEQ ID NO: 719 - protein, 1058 aa, unidentified
  REGION 1..1058: note = Description of Unknown: Cas Enzyme sequence
MMRLGLDLGTNSIGWALYRLAEDGEPKALVDGGVLIHADGRNPQSSSSNASQRRQKRGPRRNRDRMLRRRKRVARLLRGLGLLPSSKREQAEQRKLDPLQLRAAALDRPLTPHELGRVLMTFVDRRGFKSNRKADGGEDGTIRREIGKLLQRMEQAEHDALLHGRHAARTLGEFLWRRRQQGKTIRARLGNGLYPDRALIEQELRAIQRAQAQYHPTVTEEQWDEIINQAILFQRDLRPVARGKCTLIEGELRAYKAEPLFQRFRIWQDVLNLEYAPPREGMRPLDERQQWLIVGKLLEAKSQTFKQLAKLVELPEGSRFNFDAIARDKLDGDQTAAVLRSPKRFGRRDWANLGTHRQQQVVDRLLEESDHDALVSWLQGEFSLDKGTAEAVATAPLPQGTGNLSKVALERLLPYMEEEGLPYHRAVVESGLVHHSDIHGDGKADRLPYYGAVLTREVVGGSNDRKDNDLKRYGKIGNPTVHIALGQLRQLFNAVADEHGKPDEVVVELARDLKQTRKERERDQRGNNRNRERNERLRELAATAGFPEPSALDMRKLRLWDEQGPPDLRVCPFTGEPLSIERVLSEAAEIEHILPYSRTLDDSMANNVLSMRSANQEKGSRTPHEAWGHDSFRYEQILARAELLPANKRWRFQANAIQQFENSGDFLSRQLNDTRYLSRAVKQYLEAAVPPNRIWVTPGRLTAMLRVAWGLNPLLSADDRKERIDHRHHLIDAAVVGLTSRSLLQRVARDSALGVDELGERVAKTVADPWEDFRLELKALVDRVTVRHRPDHFKPKQGGTTGSLHNETAYGPLFGPDGELRHDERGNVLLVETKPLESLDRKRLGDVRDHALRERLIALWERTEAEAGEGILSERFAQQAQQELDVRRVRLVVRLGESSLALIRDKNGRVYKAYKTDGNAYMDIWLLPNGKTTGETVSRFNAHQPDVQSKIKALHPTAKKLMRLHVDDMIAVGEGEERRIMRVQFLSGPNVTAVDHNEGGNLHARVRSKDPATRYVPFRVSASRALNVGLRKVSVNILGRVADGGPFDQSGKGTHGRS

SEQ ID NO: 720 - protein, 1084 aa, unidentified
  REGION 1..1084: note = Description of Unknown: Cas Enzyme sequence
MGYRLGIDLGTASVGLVCIRLDADKEPADIAYHCAHIFQEPVEPATGGGVGNTKASARGAARRTRRLIDRRVSRLQDLAAISELLKVDPQTIIPDNGRCLHEARSQAVTKPITLENLGRVFFRIAKRRGYAGGFQVKKEGDEGQVEGGINQLRQLMQDANCDWLGQYFLHRFNNGETLKLKEAKPDGLYVSRDMVEAEFEQIWKIQSSAHPILNKQYQDKPLKEVFRNVIFYQRPLKSVAAMVGQCPLEPNLPRAPMSQPAAQAFRIEKQIADLRWGMGRRAQRLSPEQQTVIRDVLATKEKATFLQIYIAMKNADCPKPEHRGLNFDRPSRPELKGNSTLKAMDKLGLAEQWQAFNEGTQISIINLLADLGSPQEVDRADWSTRFRGKGKKNKPGKMCKFSFDMVDFINAMVASGKFDRLSKMGFDGGRSAYSIKALKKLTEKMQEGMDEYEATAFLYPKPEKKAELLTQLNSHKSTGNIVVDVALRQMRYAVNQAIDAMGGEPPAEVVIELSRDMGLGLKRRAEIEKGMKKNQYERKKAKKDLEKNGHSATSTNIFRWRLWQEQENNCPYCERKISLGAAVDGSETNLEHIIPRTLTRVGRQQDHIMLSHRHCNDDKGNRTPWQAWGHDADKWKIIIERAKALEKKRRFAKARFLTLQDWKAEIINSDIVNDFTNRQYHETSWISKLAAQWMRTVCQDVAVSRGAMTAHLRQIWGLNTVIPEIRFESGLPVFDTAEKKNIITKEEFEKYKPYWEGHNNNHSGVQRTDQMIEKRIDHRHHVIDALVIALTSRGLYQKMARNYKALSERAQAGEHVKLKLSINPPLKNIRTQALDMIREHHITHKPDRHVGGSLFKGTAYGVTWEENDNDPNADPEQKLTLRKNLEALADDKSKPDAVRKELEKIASLDTRRLVIDTFDKRIAAGKMAKEALTNIQHPQYRNVIRQVKMLTDYSANTAKEIEFESRYSTPEKPHYKWLRHDNYAYLELTCTPGEKPNPQLITQWGALRQKNQPIPPNTKRFFKGDTVEDTKDGKHFIIKQMKAQNGGLFVLVPITETREVRDMASKDGLRTISGPALSRVKLIS

SEQ ID NO: 721 - protein, 1073 aa, unidentified
  REGION 1..1073: note = Description of Unknown: Cas Enzyme sequence
MAYRIGIDLGTASIGLVCLELDENKQPISIPYHSVNIFQEPVEPAVAGGVGATKASTRGSARRTRRLIDRRSRRLKNLAEICRLLDIEPKDISPDNGRSLHEARSKAVTEPIALTDLARIIFRISKRRGYSGGFKVKKEGDKGQVQSGISHLKELMAKANCQWLGQYLLHRFNKGETLKLKEAGLYVDREMIEAEFNQIWDTQAKTHQALNNRENGIPLKELFHKTLFYQRPLKSVTAMVGNCSLEPNLPRAPMCQPAAQAFRIEKQIADLRWGMGRRSQPLTTEQKSVIRNLLRSKDKATFLQIYTALEKADCPKPEHRALNFDRPSRPELIGNKTLKAMDKLGLADDWQQLDEGTQISILNFLADMGSPQEVDRPNWHLQYKGKSGKQRKFPKPMVEFIKLMVDSEKFDRLSKLGFDGGRSAYSIKALKALTGEMQNGLDEYEAIDKMYPANDEQPDLQTYLDLHKPSGNIVVDLALRQLRYAVNNAIDAMGCTPPAEIIVELSRDMGLGLKRRGEIEKKIKRNQGERKKAYEDLEKNGHAATSTNIFRWRLWQEQDTNCPYCERKMGLADAVNGNITNLEHVIPRSLTRVGRQQDHIMLAHRKCNDEKGDRTPWQAWGQDENKWKIITEHAKTLEKKKRFTKAHLLTLQDWKHEIIDADIIKDFTNRQYHQTSWIAKLATQWMRMICPDVSVSRGRMTAHLRRIWGLNTVIPEIRYESGLPVFDTDKNIITKKAFDQFKPYWEGHNNNHSGVQRTDQIIEKRIDHRHHAVDALIIALTTRSLYQKMALNYKKLAEKASSGKKVRLTLSVSPPLKNIRQQALDMVRHHRISHKPDRQISGSLFKGTAYGATWVEDENHPNANPRHLLTLRIKLTDLADKKSNPDTIRKKLIDIASPQTRKLVLDAFDAGIGAGKQPVEALASIQNPQYRTPIKKVKMLRGSVDTANKIVFESRNNSEENSLYKYLQNDGYAYLEVDKSGEKIKTRPVTLIEALRENNRSEKNVIKMFKGDTVEDTKDNQKFVIRQIKAQSDGLLMLVPITEAREVRDLSSSQGLRTVSGASIARLKLVTNA

SEQ ID NO: 722 - protein, 1103 aa, unidentified
  REGION 1..1103: note = Description of Unknown: Cas Enzyme sequence
MKYRLGLDLGTASIGAVAMEFNDSGSPLTPIWHAVHIFPEPLENGKAGLVPKKAARRAARQQRRQIERRSRRLRRIAHLAPLIGVDPTQRATAQSQQLTKLRAKAAHERVSLSELLQVLMKVAKRRGYSGGFRHSSEDEKSGEVEGGAKSLMAEIQVMAGEQGIDSPTLGDYLSYRQYVLGKPVKLKAESDDGNLYALRSMVEAEFHQIWSEQEKHHEILKSTRQGHSLRQVFFEAIFFQRPLKSPAPMVGNCNLEPNLPRGPRAQPSYQTFRIEKTIGDLRWGMGRRSMALSLEQKDVIRKVLNNPEKLKTDATVSFSNLYKELEAAGYPKPEGRGLNLERFSREELIGNKTAKQFHKFGLLEPWQHLSENGQIQAINFLADLGSPEQIEADDWYLCFQKSGATGYQPSDMRTFSGELIGFINLLKDNRNFNRLSTMKFDGGRASYSIKALKMLNQWLQYPHWPADWLPEIRQVDEDTAVRVCYPRATRETELRIGCVTPTGNDVVDGALRQLKWVVNRCIQALGIPPNEVIIETARELNASAKVRNDWEMKSKRNQKERKRVSSEIAKSGGIATNNTILRYQLWEEQEERCPYCELKINMTEALNGAATHYEHILPRSLTQVGRKRSELVLAHASCNSEKGDRIPYRVWGDNPGRWAHIVGVSKRFEELGKKNYSKNRPLALAYYRKAKLLTLMDYETEVMTDSSIADFADRQLHQTHWIAKAAIDMMKSLTPNVFASKGMFTAKLRHSWHLNTVIPEVRFEEGLDVLDIEKREINSETFATYRNHWEGKQCEPEARTDRIIEKRIDHRHHLIDALIVSLTSRSLYLKLARQYAEESNAVKHGTKNRIHVGVEPGLSDLRNHAMALVRDSNLTHKPDHNPNGSFYQDTVYTSRYNPDTGDDCLCIRRSIKDLIDPKNEEKTRRTINLIQSESTRELVQNAFDNRRSKGIELSRVFDDPILNPQFNTPIKRVMVYFAMAAPLKSNNAARIQLAKGEKLLINDGYACVEFKVVDSQAIQPRLLTMAEFQSNKKAEKGVVRIFKNDVVMDQKNGKRYLVRQYKNEGPMLLLTPEVDSRGFTECQTKARRKVSGKSLGRLTLLDK

SEQ ID NO: 723 - protein, 1067 aa, unidentified
  REGION 1..1067: note = Description of Unknown: Cas Enzyme sequence
MSDARAIVLFMENEPLRYRLGLDLGTNSLGWAMLEIDENNQPFKVIRLGVRIFDSGRKPTDGSSKAVDRRGARSMRRRLDRYLHRRNQYIKALVSFDLLPNEESARQKLTSLNPWRLRSEAIDKELEPFEIGRALFHLQQRRGFKSNRRVDNSVENELETTGLKGAINEFSIALAGKTVGQELWKRIQNGEPARARKVGSGQSERYAFYVDRSMVAAEFDAIWQKQASFKPDLLNENAREVLRDHLLYQRNLLPQTPGSCFFEQDQPRMPMAYESAQLFRLYQDINNLRVKDVDTLTTRPLTLDERNRAIDLVLSVKEMKLSSLRKKLLGKEFDKFQFTLETTNRPAIKGNQTHAILAKSDYFGDDWLKLSLSDRDEITRLVAFENNEHFIVDELISKFGRTKEQAKAVAQVRLPDAFLRIGQRAGQKILEQLINGWDEQSDCPLTYDKAAVAAGYRSHSLNTTGEIFSSLPYYGEVLFQYTAPMPRSKVPDEAKFGKIGNPTVHLGLNQVRKIVNALIKRYGVPTQIVVEVSRDLKNGVYTKSQIERDQKDNRERNEDAVKKLNELGQINTADNRLRLRLYDELGGIKKCVYSGRIISLSQLFSHEIQIDHILPMSRTLDNGFANKVLSHHSANKFKGNQSPFEAFGSSPSGYDWDEILDRAKSLPANKLRRFSPEATPEVEGFLDRQMSDTQYLARVTHQYLRALGGLDIWVTPGRLTGLLRGKWGLNDFLSNDGVKNRADHRHHAIDAAVIAVTDRSLLKRISTASAKAVSKDLGRDFEDFPDPWDTFRSELAEKVSRIVVSHKPEHGTEGALHNDTAYGIEKLAGPGSPSLVHHKVPITSIKESDLGYMKLPYEHMTILDLDSETLKAVGDCVLGSSKDKERQSELQKFSELTGRRSVVKREVLSVIPIFRRGDKKNPDAIPYKAYKGDGNYCYEIFEAENDKWDGRIISRFQANSNEYRAFANSKEFHHLSFNGEQLVMRLMANDCVVLGEDSTVYRVQKISSGVIVLAPVNEGNVDARSRDKDDPFNFIGKSPNSLKQSGARRVFIDVIGSVKDPVRKILE

SEQ ID NO: 724 - protein, 1094 aa, unidentified
  REGION 1..1094: note = Description of Unknown: Cas Enzyme sequence
MAYRLGLDVGTASIALVAVRLDEEGQPAEIIYHADRIFEEPLDPGKKGGVGEPKKARRRKARLARKLTDRRAGRLRAIADLCRLIGLDPAAVSPDSGQEIHRLRAEAVSKPIPLADLIRVLLRMSKRRGYAGDFRTKREDQEEGKVEGGISQLKKAMADAHCEYLGQHLWHRFQKGETLKLKNVGLYAERAMLEVEFDRIWEVQAKAHPALNEAHNGRPLRDVFRQTVFYQRPLKSVAPMVGNCQLEPSLPRAPMAQPAMQAFRIEKQIADLRWGGRRSTTITSEQKAIIRELLTEKEKVTFDAIYKALKKAGCHDSMDRTLNTDRFSRQELRGDSTRAAFRALDKKVEKRTGENPDLSGQWQALLPRVQVSVINFLADLGSPQEVDRDGWETQYTRLDKKSGKRVPRWFDPAMVAFISKLVDSGEFDRLGKMGFDGGRAAYSVKALNLLTEKMREGLDEDKAIVAVYGKRNQTTGEIKRRLDLHALTGNSVVDVAQRELWREVNKMLDVLKEPPAEIVVELMRDMGLGVKRRREIEINIANNQRERKRASEELTKHGCAATASNIHRYLIWQEQDTNCPYCGRKIGMNEAVDGNTTNRDHIIPKSLTRVGRQSDHLVLAHQSCNMEKLDRTPWQAWGSDPERWALIEARAKALKEKKRFTKARLLTLKDYEAEVLDDEAIEGFSARQFHETSWIAKLAIQWLRAICLDVSVNRGKLTAYLRRIWGLDTVIPQVRYEEGMPVLDTDKAPVSKEDFDRYRRYWEGHDRSAAGVTITDRRLEKRIDHRHHVIDALVTAMTSRGLFMKMARNYKALAERRNAGERVWPTLAEKPPIPDIRKQALELVRHCNLTHKPDRFPAGAFFQGTAYRRVEMEDGRKRLVVRAALHELTDNKGSLDKARKSIGDIVSDETRQTVSDEFERRLKQGKSVKEALAEPIRDTRYDPRDSKQAQSKFIARVRVYQRTGRGFVDGENAVRIEHEQRDGTALHKHYLSDGYAYLSLKLENHKLASAKSIPLYVTPRRPTVEEYGEIRFYPNETLLDTESDRRYVIRQIRDNAALALTIITEAREVRDMDKDSGLRTVRGKELLKFKHVDR

SEQ ID NO: 725 - protein, 1105 aa, unidentified
  REGION 1..1105: note = Description of Unknown: Cas Enzyme sequence
MSSLRYRIGLDVGTASVGLVAVSLDEANAPKEVVYADLRIFSEPTLPAKGTGELKNANRRLARQARRGVDRKARRFKRVALLAPLLGINSFKVKPEMSQQIHELRVKALSERIELDDLIRVCGLLAKRRGYAGGFKKVKSEDAEAGEVRGGIEALKNKMNELGVRTLGEYLLWRIQNGKSLKLKNDQEAHLYADRDLVHEEFRRIMDEQRKHHPILDEIQEDPGEDPNSKNKVKKPIHKIIEDAVFFQRPLKSVSAMVGNCPLEPTLPRAPKAQPAAQTFRIEKQIADLRWGSGSRAVALTPEQKSVIREMLHDPSLVTKEGQVAFEKIYKGLEEKDLRPGKDVYFNVHRGQGRKGLTGDRTRRAMSDLGVLGLWDSLSPLHKIQTINFLADLGSPEVCDSENWHENLKRAMDEKDPKSGKWRKVPKPYRLADPIVEFINTIVDSGKFGRLSAMGLETGRTAYSIKALDRLRERMAQTGEDESAAIESCYPAPPPTGELNFKLEAPKPTGNIIVDGSLRMIQRAVNECIDELGVAPAQMVVEMARELPLGVKRRQEIEAKHGKNEAARKAAKKVIAEHGLPPIDRLVFRYLLWKELEDQCPYCENRLSFEEALDGGRSQIDHILPQTLTQVGRKRDQLVLCHTACNGEKNNRTPFEAFGHNPQRWEQVLQAAKRLEKAKLSKKAHLLTIQDYEGEVIDDDTISDFADRQFAETSWIAKSATEWFKEVCTDVSITKGQLVAGLRRRWKLETVIPEIRLQSGLDLLDEDDQNITPEDFEAHRRYWDGHYGDEVVKTDRRINKRIDHRHHLIDALVIAQTDRSLYQRMARAYKRQMEKQRAGDRSVRPSIFEGAEPPLADLAEVARRLVRETPINRKPDRYVSGKLFAETAYRLEEQADGKSYLSLSVPLLGLTDNQGSLDKARKRIEDIVSDRTREIVRDEFEKRISAGKSVKEALSEPIPHPDYGNPITKVQTYYRNGPSRAAGSKAIGIPRDTPQKRYISDGNACVMLGRDESGLNAKTLSMVEARDQALFKIPGVRFLFREDLVRKVGEPDIYRVCQVKDGGTICLTLATETRTFDQCAKVSSLTRITKTVSSAKELHEYEVVN

SEQ ID NO: 726 - protein, 1435 aa, unidentified
  REGION 1..1435: note = Description of Unknown: Cas Enzyme sequence
MKKLSIAIDMGAKNNGIFIVKSEGSKILQKKATNIVIDNNNINFSKKSRRENRHKDRNYKRRKLAKRLLEELIDLKAYSREHKESIFGLLNNRGYTFLSTQSEFEELSSITIEFAKTHLQDLANYSTKESLEEYLTNNFKDEKELLAFLDDSVQNITKQSSNLLNFINKKKILADLDELETNSISKFKAFTYIKFMLFRCGYRDLGKNEKEITTKLKTEDVDLSKVDFEKERASIDSLTFNSNYSKSENKKAIIDDLKLLKAFLQNVAKEIATGAKPRKKYLLEIKDEIEKLDFIENKESFYHLIANISNLQLRVLRKFFNHNSSHNSKFDILKNYFVSHHYKSQSEKSLQKELMPYLNKHHNIKEFLQKTPPHLTIPPYEDMNNRDTYKCNSMLIKPSIITNELKEAVDYILTNPQFEQLKLSEEGVFTIKKLIKNRVIEDNQLIKTDFTYSKYLQRILDATPELTSRELNPRNVFKHQKKFERGTIDSVVIFKKEFGEKIYNALRPIAKKYYEEESKIHSGIYDESTSILTPCHTNTPYKNNAKHLLLKPIYSYSFTPKEAEDFLENIKETKGLQTALKRVADEAKKYQNSFYHIVDACYNNEKCLDDKEIKTIVKNLNKNLQELKTILGDKETYLKELEELNSSSLKRVLNTFLQTYNILFKELSGFNKTCKHCTAENAIRSDESHTIAKRLLSDVAKPIDGMLDMMLNRVAFEIVEDIEPKDIEDIESLEILLEQNRFEFEENLNTIKRANNSQIKKYKRDNKDRLNISICPYSGEKFDKGDWDHILPQSQGVYNSKANMIYVSSDGNQNIKGSRNLTLEELAKPHLKAMFKDDDITKIKSIIKEGLSTIQKEQFSNFDNLKLHQQIALRYALFMRGTPEFNKAFELLKLDKLKTITNGTQKRLARFVYEKLVEKYPNIFKNISVDSKTIDNKLVSTTRNLLSDSQEVLKKQKIQDSHSHCIDAMVVFHLANSKAQRITKADNTKEMISKKVFYYNFEDIYLNESSINHLSKRKTFINSPKKELGSYKLFDDTIYSEHYKHISKELLKDKKSLKDKDLKLLIEYQLLFINRKNKKIFIENSQQIEDNTIYQIDVAKTSNLIYGLFNKKDKSSLVELKFLDKLQYFTSRKEIQNIFFDEKQTKLKEFSQIKSIPPYSTKLYRAIYKKLQNLEGLFNISDEGKSTLNSKVLEEFQTNLYASKQKDSNKQERKRGKKRHKFTLPIMGSPKFRIKRGDTWQVLGNKDIATKNYLIDGNIKPIAFFSKNTISLKITDLLDCLLLDKNTQSIYDVEVNIEPIIDYVSKLQYLVSEAKRCTVIVTFSKKSFIQTYNWHKNNRVTNVPYCYKIPFIGLDNIKLFDGAKDQQFRLFLEYFIENKNSSLSRYIGSIRDGLKGKATILDNNTQSITLQYKAGINSAKKQIIIDNLNETYHSK

SEQ ID NO: 727 - protein, 1443 aa, unidentified
  REGION 1..1443: note = Description of Unknown: Cas Enzyme sequence
LIQQGEKMQELKKKKIIAAGIDFGAINTGVSYFSFSKDDAPHQTLPEAELIITDKNIKWLLVDRREKRHTKRNLLRREKSKKLLWELLLSRDIYKETLPFALQEELMGLMNRRGFTFQENELSTEDWSEDLCEFLDDYLEDSNIGNARGTTIVEKIKNYTNEYDEKLKTLLKAKPKKTSSEEPPQWVKKYKWIKDHDSKKYSFSEKLLASAIKAIRESLETRERESLGNYPREEYLKLIKSDIAHYYTQDHWKPLRDKFSKDEFSCLVGNIANLQLRFLRKYFHDEQRKNNPDRGFQASRFAWLYLRTIRNFHAKETDEVDRKRQTIKALSEHNLASRQTALTASSTQILKFLCSLDPHNSIPPYEDQNNRNIERCPSLYLNPRYLDKHYPSWKTHWIGSSIEKYFGNLPLSKDLNLSIEKDALIFLHRVLDVRNVSNPFKFIDVQKKKKEIDIILNEAPFAELNEEKRIAFKELYEFYRKYTGTISQAKKGLSNDTDLRNILKRCNHQVPHKNKVVEISLGRIIGKQISPEDVKNFREGPWAVPRSIKSVCRRCAELQKQHGYETKKCFTEQLKFSTEIKKLCTDITNASKKIAEHFESPPTKERTCDEDLFILTQIFNILESDLHGFASSCLQCAKENLWRNQQYGEKGVHAISLRIDSVAPIDGVINKLVSFVAGRISSHILKIAQKLELTPDEELHIYLFPEENKFSQVEELSSLKGKRLKESIKKAVQQKEYNFQEKDGRIQNDSPCCPYTGETIQSGGEIDHIIPRSFSKKRYGTVINHEINLIYASRMGNQKKKNKTPEFEDLHPNYLKNVFNTTDKSTITHSIRAVIEMLDKNPHIDLSLFEPKKRNYLRVGLFISELQQEIANLLLRNSTRARVNGSQRYLAKQIVKKVRRNYPYAQSSLFLQETEEIRKIRKDLEERGIVEKKKTPQPAFSHIIDANISLFLGLNQEGYATFISQGPEEFLPKQFHIIRAQKKKISERTRPSDIARLSLMHAGMYENHFLNCIITKDSWGFGFSPRPHAYIPIGKKYSEHSETYDAIKPFFSLKEIFKNKTLSELQDHVQETRNPLIFKFNNRKTVEYLFNTHQQYGQTLSYEAKILENCHYFTQRKDITDQFFKDKNNKRTFTAPIFEKRFSFRIRKEEHSDKYKTFEKKLSMPFNVLWEKLNQDITTQNREEFSRNLAQHTLFKNRKQETGKKKHRYHKRAYALPIVPTLPGTPLWQRSYNPIKREFVYQLICSDESVCVGFDAKGNEQLHPHFQKSKNLAPYKGNMTEIYSGNVSHSFTMPIPIPINHIFESLGIRKLSYKIFTKARGEYSMEITSNNFLPLMRNKENNITSWQLCLHSFKIDLSTPAYNKFFSLFSKGMQEFFNSQNKQVLNNNINKLHDSAKQKIPIKFLPLGIISLNSISSEYINLSFTAQGQFTARELELAKHIKK

SEQ ID NO: 728 - protein, 1417 aa, unidentified
  REGION 1..1417: note = Description of Unknown: Cas Enzyme sequence
MQFNVVSPIAIDFGAANTGVNISHLSDNNIIKEGFTIIDDGKSIKWLQKERTQNRHQRRSIKRNKLAKRLLWQILTEEFKINNVEDDLCDFINGLLNRRGYTYFTDDQVDYEVFDDIYLSGLSESVLPILDEIEGTSFQEKIINITSDIDKCKKINQQFSESHVKEEGKRTKKFQRFFDELKCDSKDEKDTYSKIFTEMEKLVSSTIKSKEDGHYYRASYFENIYEDIKNNEKLLRFLSKSNVSADEFYKLLANISNFQLKLLRKYFNENSKWDPKKLNNILDKWVKSWRCPPNSKEADAKKLLLDSLKTKRNIIDFLTETDPNKTIPPYEDQDNRKPPRDKTLYIDPVKIDKIFPSWRAAVKNILKHSENKNLTEKLDEVISAATFLDINGNKRQNLDHDALVLQRFFDRAKEFDPYKIRILATYNEDKTLNFLQHYDLLKNHLNGNKEYADNLLNIAQRYYEEVEKAKKGLWSSRAGNILFVYDQKNSKKKNLINYNLSNILGVDFNDEKLKKFHEFISINEVSSGLKGKKARKIIKWAESAAILQKRLGNALNYHILDIERKGAYSKNLSKEEKNIYAVILGCLNSAEKIAKEFKIIKSDHFSSIYSFAQIFNSIEGDIHGFSSISKASMIENSWRSKTNKIEINGITKYHANAVRLPKDSVRPFDGMLDRIIKRQAFEIACSKIDQIEKNVIDKREKIFIPIVIEQNNFAFTYDLATIKQDNKKKKNSEGEYKRLSSEYYNKYERLKNSSGNICPYSGDYIRNGDIDHIIPRSITRKFSSTVYNHEANLIYCTTSGNVKKGNSRYTLKNLNKKYLQNQFGTDNIKQIADQVTEKLENIPGRKREFFSGLDNEEQKVIRHALFIPELDYITFPILSTQTKARVNGTQAWLCKNIKQIIEDELSKKGYNIEFDIVKVKSEDVHRNRFLLGEHDSRFKKPVNISQSPVSHVLDASIALADAFNAELSSESAEEDNVDYIKKFIPDNFEIKKLGKKKIWDKNKPQSEKLFKDTLYGINFLPILYTNKEEVYIGFSLDNSVEIKDSSSFFDLMLPFLKYKKQTFNNRNELRKLLEGRKFLPLNIDKDVAMEHLHYVSKNSVSAKDNEIANVLDALFFTTLKKDIKNVLSDSSSKLKFDKIKEKDFQIKVEKIGKFKKKGNSITHPSYQEWLQVVKTTKELLDKGLENNDTEFWSEVVKNSGLFKRYKPDRNHKKVRKQFSLPLLEAPSGGYRIKQQAGNGNNVWQIVAIQNYSSIGFYKKENGDIDFNNPAGVQHFRKSPNVSKIGGRYSLENEYVPFGSVRNVDLEIGLPCNYSVYLKLAETGRVDIGLTLNKEDFVEYVLPGLETEETDYLKIPSFLKTRDNFVKSDNNTNGIFPGYMKPRSQINILEIGEEVTIEYRTEGFTNVLKEAFNKGKEV

SEQ ID NO: 729 - protein, 1108 aa, unidentified
  REGION 1..1108: note = Description of Unknown: Cas Enzyme sequence
MSKLFSFDIGHASIGWAAFDITTPREPSLEGCGTVIFPADDCLASQRRQFRRQRRHIRSTRQRIARIKEFFLGLNLLSQAEVDEPGGPAPWKLAASVLCGHRLLSWRELWDVLRWYAHNRGYDGNRKWSRADVADPADTEKEKNAHELMTRHGTATMAETICSRLQVDPRSPSKTTPSRAYKTLNAAFPRDVVVAEVRRILEAHASQFPIIDAAFIDALCAEDNAPRGGLTVRDRLASLGWQRDLPSRYVGGLLFGQAVPRFDNRIIGVCPVDGGKLPLKECREFREFRWAMTVANVRVSDGANGIRPLTVPERASLTDALRRSGAFTATQFRKEVASITKQGEGNTAAMMTDPNAADALVLDPPLAFVRTNSEMKVAWPLLPASLQCRILARLNRHKGITWGWVAAQPEAPPSLPEVLLEASSSKGKSKTKSGPVTWAVLSQRGLSPRWPTGRAPYSRAVMRKAVEEVMAGGHPAAAGGVLFMSEERINRERAKTLDELTNNHLIRHRLRMLDRLISDMTKRYTGGDPAQVVHCVVEVVRDLAEFSGKTNEEITTELNARLKNFNDVANRLKQDLHGINVAIGAGLIRKARIADDLNWKCPYTAEGFDAVTLARGGVDLDHVIPRSQRASDSLDSLVVTFPAVNRWKGNRSARQFVADEQGKTVPGLPHLTIRSLEDYDKMVAGLAGDEKPTRFTRGPGSTGDKMRRWNRKQRLSRENIEDSGFTPRDLTVTSHLTRLACRQIERSIPSLQKPGSITSIPGSVTGVIRKAWHCLGCLAKAAPLILHEVPAWDEAGQPIVDTTGKQVVQTLPRPKGEVREITHLHHALDAAVMGYAVMLLPRDGKLWEQIVTRKVPAADAAEFKKAYGWTGMLKLAAPKNGGGSHRLEVLDLPHTFKKILAERLAERRVVMHVPADMRGARLKLNSWRVVSVADGRVKLRQRSFDPKDNDPESGARRRAWKSKELSVRGVVGMEPGKLARARAALVISENFGVAVLDSAAGGQSERYRVIPFHQVKKQLAELTALNNGVRPLIIRNGDTIVVQSGNFSGRWRVFSVKNAKAGVMLDLGQPDTIKPLNKTDGHKINVKLASLLAGGLSVAGRDLTCGGL

SEQ ID NO: 730 - protein, 1144 aa, unidentified
  REGION 1..1144: note = Description of Unknown: Cas Enzyme sequence
MPLTFSFDIGYASIGWCVLSGNSRSQEDPKFLGTGVVTFPTDDCLASKRRDLRRTRRHIRSTRQRIERLKCWFLHQGILSREELDLPGHAAPFLLAAASLQNLRTLTAWELWTVLRWYAHNRGYDGNSRWARDEGGDDKEGDTLKEEAARALLTKYGTSTMAETVCKCLDLNVEHHSKRISSFLPYKTLDAAYPRHIVEGEVREIVNKHIAKISGFDSAAARLIMKDNPLSDQEREILLGAGIKLPKSYHGGLLFGQLIPRFDNRIISRCPITWAGIFDREIAAGKSEVESKHQAEKLAKVPAAKSSEFLHYRFARILANLKADGKVLKPELRASLWRLAEKNGRLTHKDIEREIKAYSGSVATNIDAFFKIHPDSEQALILDPVMDEVRKAQGTRAKLSSIWNLLSDEVKSDIIFMWRNGKSISFAQILQKSGNDPQLTEILEKERATLKPKKGKPVPTFDSYLLNTRVAADFPSGRAAYARPILKQVVAEVLAGFDPNRPARSAKHPEGEDKPEDGVLYPLLDPTSRVRELQDARPLDKLTNNHLVRHRLLILDRLLDDMISEFCATGQKVERVVVEVARELKEFSGKTAKEIASELNNRLKDFKSAVDHLQENAPNLALTGSLIRKCRIAMDMKWQCPFTAGGPYDASDLSKLEREHIIPYATRNSNALHALVLTWPAVNRMKGKRTARQFIIENEGKQVDGMPNLSLMTLKQYDAFVDKLDTKGHLDDYRRKKARKALLATTDFEDKELGFTPGALTQSSHLMKLAMRSLKAKLPDALCDPIPGQVTGEIRKTWNLINTLARVSPEIIDPASGKPRPKDEIRAITHLHHAVDAATIALAAHYFPLQKHGQDQKGKIWQALLKRNRSQEEIKFLQQLGIFESYLRVRTAKDGTESRTTDVRLRELSASLKNQLARSLAECRVMQHVPADRSGTKAELTTWGLIAVDGDYAILVQRINRSTLEIEETEEHRRWKDKPLSKESAKLLLKYENRLNNRQINLVKRGILKLTSERVPKILGLKDGSLKSRKGALIIGDNFGIMISPKLGLVPFHAVHAILSEVRNVADATEIPILRNGTCINVTKGTWKGMWRIISVKDSEAYGISVDLAKLDGLKLSKGNARVSKMLEDGLEILPRCYTGYKVI

SEQ ID NO: 731 - protein, 1363 aa, unidentified
  REGION 1..1363: note = Description of Unknown: Cas Enzyme sequence
MEGIVYMKNSKIYLGLDIGTDSVGYAVTNDQYDILKFHGEAAWGSTVFDSASLSAERRGFRSARRRLDRRQQRVALVQELFSSEVNSVDPAFFKRIKESSLFRDEVNYQHTLFNDDDYTDVEYYDQYPTIHHLISDLMNNKESHDVRLVYLAIAWLVAHRGHFLSNIDINNIDKVKDFGEVYAKFINFFEFGFYDKPWGEIDTDEFGAILKSKNSITIKNKLLTELLFGGEKPSKEATDGFPFNREAMVKLLAGGTCKLKDLFNEEAYEEFGSVSLNMDDDKLGEIADNIGDDFELIESMRLLTDWAMLVDILGDGNSISEAKVEIYNQHEKDLTELKRFIKKYIPEKYDEVFRALDKPNNYVAYSYHVEGMSNTKPKKKANQEDFCKYILGLIKTIDIDEDDAEAFEIISNRLQLAIFMPKQKTTSNRVIPYQLYAYELKKILHNAEQYLEFLNQKDEDGLSISDKVYSIFTYRIPYFVGPLNKKSEHSWIRRKAGKIYPWNFKEMVDLDESEQAFIERMTNKCTYLPDQPVLPKDSLLYHKFMVLNEINNIRINQEKISVELKQDIYNDLFMNIKKVTRKRLTDYLISRNVIKKGEEDIVTGIDITINSNLSSQIAFKKLINSGALSEVDVERIIERASYAEDKSRLLKWISKNYPHLTDEDKKYISRVKIKDFGRLSRKFLSEFIGANNETGELVTVIGELWNTNNNMMELLSDKYTFVKKLDEYRQDYYQDNKMSLNNRLDEMYISNSVKRSIYRTMAIVKDVEKAFGKPDRIFIEVARGASEDQKNKRTQSRKQQILDLYSKCKDEDVRILKQQLEEMGEYAENRLQGDKLFLYYMQQGRCAYSGKSIELEKLGTKAYDIDHIYPQAYVKDDSILNNKVLVLSELNGEKSDTYPIKAEIRDKMSGFWNLLKERGFITEEKYKRLTRSTPFTSEEKLGFINRQLTETSQSTKAVATILKEKYPECEIVYCKARLTSEFRKEFNLPKSRLLNDLHHAVDAYLNIVTGNVYNMKFTKRWFDVNSKYSINTVPMFTKPLIRDGITVWDGEKMLAKVIKTAQKQNAHFTKFAYMKHGGFFDQMPVDASDGLVPLKKGLDTEKYGGYNKAGVMFFIPVRYKLKKKNEVIIMSVEMLYGKRFLEDKEFAKEYAFKRLNHILGKQVDDVEFPMGFRPWKVNTMLSLDGYRVCIAGIGGGGKCLIAQPCTQFMTSPYWNYYVKKLENFVEKTTKNANYIYDETFDVINYDKNIELYDLFIDKYKNSIMKNRVNAPIGTLEKGSDSFNSLDIKEQARVLLNILLSFNRSSSSGVDLTSINGAGRTGATVNFSSSISNWKKAYSSVRIIDNSVTGLWSKISDINLLELV

SEQ ID NO: 732 - protein, 1349 aa, unidentified
  REGION 1..1349: note = Description of Unknown: Cas Enzyme sequence
MQKYYLGLDIGTNSVGWAVTDENYNLCKFGGKRMWGIRLFDGAQTAEERRMNRSNRRRLSRQKQRIDLLQELFAKEIAKVDPTFFIRLNESRLYMEDKSTGTKFPLFADPGYTDKEYYKEYPTIYHLRQELIKNPESHDIRLVYLACHHILKNRGHFLINGSFSDLKNLSFVCREMLDAFNELSKYQLMISDIDALEKILSDRKQQKSAKVKELVQIFECGPREDKSDAKICKGILSNLCKFLVGAKGNITRLFDTDFDEMETSSFSFGDSKYEDSLLPSLEENYPDYANVIQKIKAMYDWSVLVEIMAGENYLSFAKVNAYKKHKENLSILKSLMKKYCTPDVYQRFFYKTDEKSNYGNYIGAIHNNGHSYTMKKCDEETFYKSLSKILDKLVVQQADQITLEILKKEAENQTLLPLARTKANGVIPNQIHIQELRAILDNAKTYLPFLNESDEYGTIAEKIIRIAKFKIPYYVGPLSTRHKEQGANTWIVRKQEGKIYPWNFEEMVDLERSNNEFIRRMTNKCTYLIGEDVLPKNSLLYSKFMVLNELNNLKIRGHKISIELKQELYKELFCKKTKVTGKALLVYLKKKDAELTLEDISGFDTDFKSSLSIYIDFKNHILREQIDDGKYQSIVENIIKWKTIFDADSKMIEKMIAREYPNMFSSEQIKKICRLKCRGWGNFSSRFLNGIQGENTETKECFTIIEALWKTNCNLMQLLSKQFTFKDAIDCINADKVGKIDKVTYENTVKDLVVSPANKRAIWQTVQITEEIKKVMKCEPEKIFVEMARGGEKEKKRTISRKERLLKLYMDYKDENRDWIKEIESRDEQDFTNRKLYLYYTQIGRCMYSGEEISLEELMQKNSKWDKDHIYPQSKIKDDSLDNLVLARKDINNNKSNKLLPTGIQDKMKKHWKMLLKYGFISKKKYDRLMRTEDFSDEELSGFIERQIVETRQSSKAVAELLEHLNEHTEIVYVKAELVSDFRHDNNMLKSRRINDYHHAKDAFLNIVVGNVYNAKFTANPRNWIKKNRNANYSIRRVFDYTVKRGSTIVWQGVKDGGHSIDGIKKTMARNDILYTERTYCEQGELFNATLIKKGNPNAIGLKKGLDPMKYGGYSSPKTSAFAFIEFDGKKGRQNHLVEIPVYIANIAARQPEYIKNHLEEKKGYQNVIVKKYPIQKNALIKLDGYPARLRGANEKSITLKNAVQLVLKSEYHETIRNVEKYLEYIDKDESVSKAARFSHTELDKLYDELCFKAENSIYKKRPANQSATLKNGQKTFLAITNLKEKAQVINNIITMFRCDATTTTNLKTIGGSVNAGGMQVNKNTLTSQKVVLVHQSVTGLFVTEEELL

SEQ ID NO: 733 - protein, 1206 aa, unidentified
  REGION 1..1206: note = Description of Unknown: Cas Enzyme sequence
MGAKIFQDLELAFDVGHSSIGWAVLQSRTDVSPAANAPRVNILGCGVVTFGADDCLASKRRTYRSQRRHLRATRKRIAWMEKLLAQLGVLSTEAFEAVHKQAGGDSFAWQRAAEILANARSQKPLPDLGWPELWNILRWYAHNRGYFSPPWANREEDSIADDNDVPDTEKVERANAIMREFKTVTMAETISAYTVRYEQEVAEWQQKKRAEKSPHFKGLKAAFLRESVVWPEVRDLLTALKGKLPKLDDALIRTFLGNDPDPMKDREAWRTIPCPAIKLSGRYHGGLLFGQVIPRFDNRIIGVCPIQFARRQAELIAAGFSADDAKDKAAKESKLPSKATPEFLRFRWAMQLANIFGERAGERETRALSANERKQITERAERQGAFAKGEFKKAVREIAGWPDKLSRDNLDNLLMHPDAEKALVLDPAQREVHNSKLAAALTALPERFRKRLLGKLRRGQSVSYKQIHGWLAGADADAFDAEIQRVIEAANTKHSKKQTPLTRDELLAEKLAAEFPKGRAPYARPVLRQAYEEVMKGWDPRAEKKDQQPRGCLCQTDELKEAQLQRRLEEQTNNHLIRHRLLILGGEQPKPNAKPEHERRRFKGLLHDLIQEFANGDKSRIAGMTIEVNSELRDLSGKTRKAQEQDLGLRFGDFKRVSAKVEEACKRRGIRVTAGIIRKARVAEDLGWRCPYTGKDFCIDTLLDGVMDKDHIIPYADRESDSLDSLVITWNEVNKWKDKRTAMQFIRDEGGKRVPGRPELEIMALAVFQKHVAGLDTRKGHDDDRARKKRRIRRLLTEHYEEKEFTPRDLTVTSHLVRLGAQVLQRNFPKDQRPPVVSLPGSVTGEVRKAWKLTGCLEAANPAVMEEVEERDEATGELKKVRRAKKKNDIRGITHLHHALDACVLALSAHYFPHHGTVWSTMVKAGIDREADDDRRLWLAMTKRRPTPAEAALLKTTGLYKADAQGRMHLDELPEQLKQQLRQRLVEKRVVQHIPADMSGMRVQENTRGITAIKDGRVFLRQQSRDAKTGKLSINPTEESANKVIGLKAGKLTPQKGVRVITDNFGVAILDHAPEGEDKFVIVPWHKIWVRIYKGFKDEAGKTIEKSLVERNGGKQPRILRIGTLIRVSNPKNKAYKGIWMVRGVQLNQRAGYLVDISEPDVIEYRVPKRKDCKQNVGLKALVQGGLEILKTPLTGVVSPPLKLAE

SEQ ID NO: 734 - protein, 1220 aa, unidentified
  REGION 1..1220: note = Description of Unknown: Cas Enzyme sequence
MAISIKKNLMGAKTIPDLELSFDVGHSSIGWAVLQSSAGVSPAANTPRVNILGCGVVMFGADDCLASERRKKRSQRRHLRATRKRIVWIERLLVHLGVLSTEAFEAVHKQAGGDSFAWQRAAEILVNVRNQKPLPELGWPELWNILRWYAHNRGYFSPPWANREEDSVADDNDVPDTEKVERANAIMREFKTVTMAETIAAYTVRYEQEVAEWQQKKRTEKPPHFKGLKAAFLRESVVWPEVRDLLTALKGKLPKLDDALIRALLGNDPDPMKDRDAWRTIPCAAIKLSARYQGGLLFGQVIPRFDNRIIGVCPIQFARRQAELIAAGFSADNAKDKAAKESKLPSKATPEFLRFRWAMQLANIFGALVGGRETRALSADERKQITERAERQGAFAKGEFKKAVREIAGWPEKLSRDNLDNLLMHPDAEKALVLDPAQREVHNSKLAAALTALPECYRKRLLGKLRRGHSVSHKQIHGWLAGADADAFDAEIQRVIEAANTKHSKKQTPPTREELLAEKLVAEFPKGRAPYARPVLRQAYEEVMKGWDPRAEKRDQRPRGCLCQTDELKEAQLQRRLEEQTNNHLIRHRLLILGGEQPKPDATPEQERRRFKGLLHDIIQEFSNGDKSRIAGMTIEVNSELRDLSGKTRKAQEQDLGLRFGDFKRVAAKVEEACKRRGIRVTAGIIRKARVAEDLGWRCPYTGKDFCIDTLLDGVMDKDHIIPYADRESDSLDSLVMTWNEVNKWKDKRTAMQFIRDEGGKRVPGRPELEIMALAVFQKHVAGLDTRKGHDDDRNRKKRRIRRLLTEHYEEKEFTPRDLTVTSHLVRLGAQVLQRAFPKDQRPPVVSLPGSVTGEVRKAWKLTGCLEAANPAVMEEVEERDEATGELKRVRRAKKKNDIRGITHLHHALDACVLALATNYFPRNGAVWSTMVKAGIDREADDDRRLWLAMTKRRPTPAEAALLKNTGLYKADAQGRMHLDKLPEPLKQQLCQRLAEKRVVQHIPADMSGMHVEENTRSAIANGNGKYDLNPPHDKGALPTKKLVGLQPTNGNGKLKPQRGVRVITDNFGVAILDNNAEHKFQIIPWFKVWPRLYKGIGDEKSLVEQNAGKMPRILRNGMLIRIGKFRILKPTRILENSIWSVDSIGDFDGVIKVDLKQCDTVNTRFDGIDPTDPTGKKKKKFTSPGCKLSTDLERVYEGGLEILKTPLTGIASCPITSSA

SEQ ID NO: 735 - protein, 1080 aa, unidentified
  REGION 1..1080: note = Description of Unknown: Cas Enzyme sequence
MSIKDKISSGTDANLHLSFDVGHSSIGWAVLEKTGQNASDINILGCGAVVFRADDCLASSRRAYRRQRRHIRSTRQRIARMKTLFKHLGVLTQAELDKPGCAWPWKSAAQVLQGGKQLSWPELWDVLRWYAHNRGYDGNRRWSAAETEAQNEDSEKEANARTLMGKYGTKSMAETFCAMSGINPLGTKKSANVPGDKRPKGQNAAFSRGIVEREVRQILQKHFDKLKSVDATLERALMGKDNNDKLAWQAILCPDSKLPKRYEGGFLFGQLVPRFDNRIISICPISGEKVPSRNCREFLNFRWAMQLANIRIGRKSDRELRPLSAVERATLEKQMRARGYLTPKELKDAVRSITACERDNLETMLMHPDAKEALLVDPVQKLISSDDLLPFWNLLPERLHKRLRGQWRRGKVFSLAQIRKQLELFGDAGAFDAELQRQLDTQNTNAKKKDKQLTREDLLQKHFPPRPMKSDGRAAFARHLLQQAYEDVLAGKPHPKEEGGCLFITEKIREAQMNRSIAEQTNNHLVRHRLVILERLLTDIIKEYAGGKKASIGKITIEVNRDLREMSGKTAKEKAQDMGLRIANHHAVAEKLEKAFAEENNGNSIHITAGLIRKARIAEDLGWKCPYTGQPYEPKHLVTHYVDKDHIVPRSERASDSLDSLAVTFSAINKWKGKRTAYQFVEQEQGKPVPDLPNLSIMSLTRYKQLIEGLETYKGHDDDKRRKKKRKELMLLPKYEEKEFMPRDLTQTSQLVRLGAQVFKKNLPDLTTSDIVSLPGSVTGTVRKAWKVLGCLSLANPQVLDENKAVKSKTDIRDITHLHHALDACVLGLTSHFIPNNGRVWELILKRNPNDLEKRQLEALGVFGFNAEHRFEMRDLGDRLKEQIRQRLAEKRVVQHIPARMDGLRVEQNTWRVVAVKDDEVILRQRIRQPDGTRSDKTTEEKPSKLLGLNPTNGTGKLAKNKGALVIPDNFGVALDPQPRVIPFHKVWMQLAELKKANRDKMPRVLRNGQLIRIKEGTYKGIWRVFSAKNNASGMALDIGAPDVVRLKNKTEGHKINVLLSSLVKSGLEPIRASLTGIAK

SEQ ID NO: 736 - protein, 1079 aa, unidentified
  REGION 1..1079: note = Description of Unknown: Cas Enzyme sequence
MGTKTIQDLELSFDVGHSSIGWAVLQSSAGVSPVANAPRVNILGCGVVTFGADDCLASKRRDYRRQRRHARSTRHRIAQMEKLLAHLKVLSAEQLKQKHQQAGGHTAPWFLAARVLASNGDAKHLLDWPQLWDVLRWYAHNRGYDGNRRWSAQEAEAQSEDTEKEKQAIALMEKHDTTTMAETLCKALGLEPLGDRQSSKDNFKRLNAAFPRPIVEKEVRRLLELQQKKLPAITDAFLKSLFEDWRAAKISDLKLPDRYQGGLLFGQLVPRFDNRIISTCPITGEKVPSKNCPEFLNFRWAMTLANIRVAGAKEKELRSLSAAERKQINAVMESEGALTPKELTKLVRETTGCTRDNLDTMLMHPDAKDGLLLNPIQKLVRGDKLKTLWPTFSPRVQKRARDLWERGKPVTLERICSITKKLGESLANFEAELNKLADSANTKRSKKGGSFNRDDLLKEPLTIKKSDGRAAYARPLLVRAYAEVMAGKHPKEEGGCLFITEEMRQAQLQKQIDHQTNNHLVRHRLLILERLLKDLIAEPAFANGDKSRIARTTIEVNRDLREMSGMSAQDIKKDLGRRLDNHHKVAAKLEADLDGRTFNGKPIQITAGLIRKARIAEDLGWTCPYTGKTYDAIDLVSRQVDKDHIVPRSLRPSDSLDSLVITFAEVNKMKGQRTAWEFVSDEQGKVVEGSPQLSIVSLTRFKQWAEGLETYKGHDDDKRRKKKRKELLLLPNYEEKGFVPRDLTVTSQLVRLGAQIIKKTFAGSEKPPMVVSLPGSVTGTVRKGWNLLGCLELAAPQVKEADGSIKNKTDIRDVTHLHHALDACVLGLASHYLPNNGGLWEVMIKRNPNDAEKALLRSTGYFDFDSQGRFGLTELPDALKEQIRQRLAEKRVVQHIPADMSGMRVEENTRGITAIKDGRVFLRQQTRDAKTGKLSVKPTEESANKVIGLKPGKLTPQKGVRVITDNFGVAILDHAAEGEEKFVIVPWHKVWPRLQELKKRNSGKMPCLLRNGQLVKLATGKRKGTWRIFSIKNNSSGLALDLGLPDELYPSWINSLLKSLLRDGLTLFQTSFTGCEKSA

SEQ ID NO: 737 - protein, 1256 aa, unidentified
  REGION 1..1256: note = Description of Unknown: Cas Enzyme sequence
MSKENAINDFLTGLVFGFDVGTGSIGYAVRKGTKFKDVGVLICDSEGSDLSKRRDLRRQRRTLRSRKYRRQWFASELNKLGLPKPVSPPHDPISLRLRALNGEALRPEELHAALTHLFKRRGYSKVPWAKVEALRKNGEKAKQEDSDTQKVITELEREMNAKGCSYPCQLLDLRRKEAGTLPKRKWGRNFPWGRQMLETEFRAIAEAQKGHFPELVKNVESLFHRNTREIKREVDGKKQTFHVFFKTDTGKEPGVLGIRWPKFENRGPGLDALEPFRKDHETGAWIPQHTLRRDNLLFKEWQLEVALRNFRVKRRLITVGRSKKEKYELIPPPPPALDALRKLWNERGHLWAEDLREWARNCGGQFELRDPDFNLTPRNDFSGRARFSKHGMAVIRQVIADAREKHDTAYSVWEQKFKDKNPKANEEDVANGYARFLTVGAASNQGAADNSYARTVAPPPVLILPGETTVGAFQRYLNTIRNPQVRHRVELFGRELRRLMKLHSQNQAPDFIIIEMARDLMMSQEQKDAKEAKDKERRDDRDKAAQILRDMGYVPEADNVKKFLLAQEAGWRCPFTLQPFCQSDFSKLTIAQLVQAENKPRFVKEVSSVFRDLEVEHLVPRAPLVCNEWYNLTVTLHSTNAQKRKRTPFQWLSVDRDGVPPDLDWERACKNAADRFGANSLKYQVFTSPNAAEIIENNAKRSIQQTAYIARCLREACLIHFGKEWLDWTDGAGRDPRLLPDNRASKSYLTTNGAITARLRDAWHLNGILWPKPQRLNDAEWNKLTDEEKTILKAKYKDERAVRALKNRQDHRHHAIDAMVISCAVPWQTFKPRLGNQQPEDGLCELDAETGEITKIWNPVFNDYGYGIMQAVESKMDLLLKFSTDRQIDLLRHHKSSQRNAQAFDTTAYGRREKFCGDELGQTLFVARKRMLDLKKSHLDPSNTGGFIFSPLLRDHISKEWESFSANEKNWFHIQSDWIGIFEAQINTLRAPGKDDQKTRVGIKARESRVYKLRQMEERKDWDELLSFIAKELGAKQPQPKFPSQFVETLRHPFYKTPITSVKVTAQSKDDDSFSLVREPTSEKARSGTYVMRKQEDKYREMRVYRLPKPGRSGPYACWLLLPWYGKLDARGKRFKTVENDFMTRACKDAEFVRSFRRDEIVCFANNHLANKGIKQNESWRVVRTDAKGDFLATVGLLPANLVRETTHPITDEKVKLEPVVVALNDFMKALERKTSADELPHPPLTEPESPGATKA

SEQ ID NO: 738 - protein, 1159 aa, unidentified
  REGION 1..1159: note = Description of Unknown: Cas Enzyme sequence
MKPDLSLSFDVGHSSLGWAVLRLPATPGQLPEILGTGVVTFGADDCLAVKRRRYRQQRRHVRATRQRIARMSRLLAHLGVLSEQELQDRHRQAGGDSFAWRRAAEILAAAREGRTPPDTGWPELWDILRWYAHNRGYFAPPWAKRGEDEEEEPAEADPKRPKKQPTVAELLKKGGEISPKEMTVMGLGLMHGEHPEAKFKAETMAETIAAYTEWYDREAARWQQGLRKDKPAHFKGLKAAFPREEVVWPEVRALLTALKGRLPKLDDALIRTLLGSEPDPMRDPEAWRTVPCPGLVLPKRYMGGLLFGQMIPRFDNRIIGVCPIQFARLEATHLAEGLESEEARHRAEKESKLPAKATPEFLRYRWAMQLANVFGAAPGEVKTRPLTAEERRQLTRMAKQAGALAKGEFKKAVRSLTGWPDKAPRDNLDSLLLHPDADRALELNPVQNELRKSDLAAAFAKLPERFAKRLHGRLARGKTATPGEVRGWLEAADQAAFDAEIQRVIEAANTRKGKKQAAVTRDELLAEKLTAKFPSGRAPYARPILREAHEEVMKGWDPRAEKNERQPRGCLCQTDELKEAQLHRRLEEQTNNHLIRHRLLILERLLGDLIAAPEFANGDAGRVATLAIEVNRDLRDMSGKSRKEQEQDLGRRLGDFKHVAAKVEEACRRRGIPVTTGLIRKARVAEDLGWRCPYTGKDFSFDTILDGVMDKDHIIPHADRQSDSLDSLVITWNEVNKWKGKRTAMQFIRDEGGKPVPGRPELTILPLALYQKLVDGLDRRRGHPDDIARKKRRIRRLLTEQFEDKEFTPRDLTVTSHLVRLGAQVLKRAFLNLPKKRRPPEPVSLSGSVTGEVRKAWRLLGCLAAANPQVLDAAGNVKTKQDIRGITHLHHALDACVLGLAAHFFPRHGTLWTAMIKRRPSPEEAALLIATGLYDGPDANGRMLLRDLSPELKEQVRQRLAERRVVQHVPADMSGVKIEENTRRVLHVREDGRVDLRQRAPRDAKTGVRPKFKDTDEAPAKLLGLNPPGGDGKLKRQQGVRVITDNFGVAILDHAPEGEEKFVVIPWHRVWHRLEELKPRNAGRPARVLQNGMLIRVPRGTHRGVWRIFSAKNNADGLALSLGRPDAIGCDKAKQNVRLGVLMRDGLEALVTHLAGTVA

SEQ ID NO: 739 - protein, 1559 aa, unidentified
  REGION 1..1559: note = Description of Unknown: Cas Enzyme sequence
MNDKQKISPAKDAADLELAFDVGHSSIGWAVLQSGTVAPPVSGKGDLSINLLGCGVVTFPADDCLAIDRRNKRRQRRNIRSRKQRIQRMENLLVAMNVMPGVKQQHQKGKGNKRGEGKGFSYPWLLAARLLAATEAEREKHLLTWSELWDVLRWYAHNRGYDGNLRWSGYYVVEAYSPENELQPDALGEMAEKAKKQDKAENPNAEDRPKEKEETEEDDSDKLAMAGRLMSDYGFATLTFAESVAKFLLGPDRDVLPPKQPGAAGQLKKTTESFTKQDFHQKLFGLTEEFRDHPRHLRNYYKGLKAAFPRRYFVSGTTILAGGTEWEVRTIIRAHFNAPAGKARCDETFERVICGGIPEERGDWRAFEKQFPKLYRSKHESEQLKTLRISKRLPPEEKKRRKQQRQTLLHGKIILPKRYQGGLLFGQLVPRFENRIIAECPVTYTRKLPMLQRVSAGQSPYDKSLVWSEEDAKQLDREVAHFRKKLALLPAGASESDKRSLAECFAADLAKVPAKNNLAFLDYRWAMLLANIKIRKTGETYLKGEKLRPLAPEERHEIDAEARELGFLEYQREERDKKTGKATKPEFNELADIVRRVTGCGIENTNLDGFFIPPDMREALKLVPIEKGTEAFRLVWQELDDQLRRRFTIQMLNGTIQTPERICTELGKLDKAHLADAIKADARAKAADKNGKISEERAAKLMATEFSCKKLEGRARYHHDVLRQAWREVMRGEDPRKKISDEFFLPKPKQRDGCLVISDGAQCLLDEKPLASQTNNHLVRQRIQVLAGNLRQDKSGNIRRTKAGEMVSRNSLLDDIIAEFAGGEERNIKTITIEVTRDLQEMSGKSNEEKKQVEGRKRSEHSAVAAMLAKELVDSNGERLKVNGTPVKVGKYIKKAWIADDLATGLDGKKIWRCPYTLAVGHNNPPILEPKHLVFPLNDAARLELEHIIPKSKRVANGMEAQVLTFRAVNQMKGQRSGLQFVKECGGRPVTELPGRRVMTEPEYRAFVESIAVRGATKQDVQRRKKRKELLLTEHWNEKEFVPRDLTNTAYVVKLAAEKLRVRFRHLGKDAPPVVYVPGSVTSAFRDKSWRIFRELAAVHPEVKNEMDKGDERFRVGFDGDSPKERKETGKQIESLSEGLKEFLKKFGKESFTEAEKDAKTAELDSLFQACGQSALRRKVFWLKSSFNLKQAIRDITHLHHAVDAATLGLVTHYLVPPQCGSLDGTLAKYIVKGSLNNTERDEFRRIYYSLQLARNFWFHRERRLRFVGNDYEEQQDNRENFIGRCGETLRGLIEKDAREALAHDERAQFEKLVDELGLPRLFYFDTKNRLHIRDLRDDIKRQLHCKLGEAIKGRMVQHVPADMSLMSVKENVKGYELLDGKWAKVHQQQRDPTSGKPIKKEQKVARDKLIGIGTENGKLAAIKGVLEVTGNMGVAFVEQNGDEEKPPPMLVIPLHAARQRLEEFQQTHIGKRVILIRKGALIRFTNGLHSGTVWKVFEVNNHQKDGPLLKIGKPDAVGLRTEPDLNYKVPGLRTRWRDIELLELPFTGIALCPTTSSA

SEQ ID NO: 740 - protein, 1153 aa, unidentified
  REGION 1..1153: note = Description of Unknown: Cas Enzyme sequence
MNYNLKSPELDLQLSFDVGHSSIGWAVLGIISNQIPTLLGCGSVIFQADDCLASERRGFRRQRRHVRATRLRIARMRRLFAHLGVLTKEELAIPGCAWPWLLAARVLRGGKMLSWRELWDVLRWYAHNRGYDGNKGWSKHDKASAEDSDKEKRAHELLTDFKKKHGREGTMAEVFCDVLKIDPLGPLKSSMIRVRNLGAAFPREGIEAEVEHILRAHVGVLANLDDALINALMRDYTALPGLDLRVPARYGQRLNDGSLSPGGLLFGQLVPRFDNRIIASCPITFERIYQSVKAETGDEVKAKHEAEKQAKVPSVDCIEFYRFRWTMELAKIKIATSDPRAPRNLTVAERKTVNEEMEKHGYLTPGTLKKVVRVLTSNALDNLEQTLTHPDAERALVLDPVRRYIHSDQLVSVLWPALPIRLQKRLIGQWRRGHAITVAELLDDCGETRTAAEAVCEKHLDEQNTRKRKKDEPLTREFLMRSPLSVQPPKGRAPYTRQVMREVVEFIFKTDRHPAEEGGPLYRSEAIRHAQLKRELDEQTNNHLVRHRLKILERLHNDLLKEYANNNRAQIARINIEVNRDLREMSGKTAQEQAKLLGQQLANFKSVSKKLAEDYEGLGVHVGPGLIRKGRIAEDLGWTCPYTGKLYDSLDLLHRRVDKDHIIPRSERPSDSLDSLVITFSEINQMKGKRTAVRFVEEFGGKPVQGLPQLMIKPLPIYLKDMAKLNTFAPHADDERRKKNRKKLLLLRDYVEKKFTPGDLTQTSQLVRLGAQVLQKHYIGAKKQPAIVSLPGSVTGAVRKSWNLLGCLAAANPLVLNPDELDADGRPKLHTKTEIRGITHLHHALDACVLGFASCFLPRDGGAWELLVKRRLNDDEQRRARAIFGKQIEITKDGELRLADLAPTLKTQICERLKERRVVQHLPADLSGLRCKETVWRIFDPTDPHPNSKRLARWLTQKEIAVPAPDAKTALIICRKRRAAESTDEESAGGKVLRETKTWRWVYDIKDKSALLGLAPEGDVSAAKLKRIKAVKVLGDNFGLALDPEPTMIRPHKVWHQLNSLHTTNGGKPVRVIRKGTLIRVARAKSATVDYRGVWMVRGTTLNQRAGFLVDISPADQITYRGQPGCRANVSVPTLLKCGLEVLKAPLCGVLPI

SEQ ID NO: 741 - protein, 1161 aa, unidentified
  REGION 1..1161: note = Description of Unknown: Cas Enzyme sequence
MSIKPKISREPDANLHLSFDVGHSSIGWAVLQKTGKQASDIDLLGCGSVVFRADDCLASSRRAYRRQRRHIRSTRQRIARMKILLKHLGVLTEKELDKPGCAWPWKLAAQILRGGKLLTWPELWDVLRWYAHNRGYDGNKGWSKHDAASAEDSDKEKRANELLAEFKKKHGRLGTMAEVFCDILKIDPLGPLKSSMVRVRNLGAAFPREGVEAEVERTLRAHVGVLVQIDERLIDAIMRDYTAVPSPTLRLPARYGQRLNDGSLSPGGLLFGQLVPRFDNRIIANCPITFEQVYQTIRSQTGDEKQAKHEAEKQAKVPSVNCIEFYRFRWAMELAKIKIATSDVRAPRNLTVVERKAINEEMEKYGYLTPSVLKKAVRSLTNGALDNLDQILTHPDAERALILDPVRRYIHSDQLVSSLWSILPNRLQKRLAGQWRRGHAITVAELLNDCSEVRSMVEAACERYLDGQNTKKHKKDEPLTREALMRMPLSVELPHGRAPHTRQVMRTVVEFIFSVDRHPAEEGGPLYRSEAIREAQLRRALDEQTNNHLVRHRLKILERLHADLLKEYADANRARVACITVEVNRDLREMSGKTSQEQAKVLGQQLANFKSVSKKLTEAYEGLGVHVGPGLIRKGRIAEDLNWTCPYTGKLYDALDLLHRRVDKDHIIPRSDRASDSLDSLVITFAEINRWKGKRTAVRFVEDEQRKPVPGLPQLMIKPLPVYLKDIASLSTFAPHEDDERRKKSRKKLLLLRDYVEKKFTPGDLTQTSQLVRLSTQVLQKHYIGVEKHPKVVSLPGSVTGAVRKSWNLIGCLAAVNQLVLNPDDLDEDGRPKVRTKTEIRSITHLHHALDACVLAFASCFLPRDGGAWELLIKRRLNEDEQRHARLIFGTQVEITKDGELRLADLAPALKLQICERLKERRVVQHLPADLSGLQCKETVWHVFDPANTHKNSQRFARWLVGKKVTIPALDAKTVLIICRKRRAADVADGETAGGKVFHETKTWRWVYDIKDKSTLLGLSPEGDATAAKLKRIKAVKILGDNFGLALDPKPTIIRPHKVWHQLAALRQLNAGKPTRLLRIGTIIRVKEKSPRSDYRGTWTVRGMSFKQRDGLVLEIAPLDYVQSRRVPGVFESASIGTMMKSGLEIVKTSLTGVNSSPKAL

SEQ ID NO: 742 - protein, 1236 aa, unidentified
  REGION 1..1236: note = Description of Unknown: Cas Enzyme sequence
MGAKTIQDLELAFDVGHSSIGWAVLQSVGRESARTDSPRVNLLGCGVVTFGADDCLASKRRDYRRQRRHARSTRHRIANMEKLLAHLKVLSAEQLKQKHQQAGGHSVPWFLAARVLASNGEKKHLLDWPQLWDVLRWYAHNRGYDGNRRWSAQETEAQAQDTEKEKNANALMAQHGTQTMAETLCKALGLEPLGDQQSSRKNFKRLNAAFPRSVVEKEVRRLLELHQKKLPAINDAFLKSIFEDWRAGGVPDLKLPARYQGGLLFGQLVPRFDNRIISTCPISGEKVPGRNCTEFFNFRWAMTLANIRIGFGNEIYANGEKLRRLNPSERAKVDALVRKLGFLKLETDKPDKAGLVRKGKNELLEIILAETKCNRHNLDSLLFTDEFKESLKLTPIEGDSTAFRIAWGSFGDPQHDATGNYHDDSLRHRFTTQLFRGKKEKPKMLTLREIIRQLEKLGKTDVISKIQQAVELEIKGKKREADPVKIEALLDAKFYGDRLNGRARFSREKLNEAFRQIFHKTNPIHPLESGGCLEQTDKIKAARKQELAQQTNSHLVQHRLLILAGNINAKPKAKEGLIQHLIAEFAGGDKSRIGRVTVELARDLQEMSGMTNQDKKKAIGLKLSHYKQVSESLAEKLRDAEGNLLKGPNGKPFFSNPGLIRKARILDDLENKCPYTKQDIEFIHLVTGHFRNGVSHTVDKDHVIPRSQRLSDALEAQVITFSEVNRMKGQRTALEFVKQFGGKQVDGIPSLHIRSEADFRSYVNSLWPSKDPFKRAHASGAKVSDDEARCWRRKKLLLTEKWEGKEFTPADLAKTRHIVKLAKQQLETVFFDLPKEQQPPVISITGAVTATFRDKGWKLLGELAAVHPMVKETLEKGRREENEGKIFNPKKAIREITHLHHALDAIALGLITNYLVPAKHQSLDGELSRLIVKGKLTIDKEKGIDELANLQAICSKLFIKLPLQVDSKNLLHVEDLPDEIKIQIRHELAKKRVAQHLPSDMTGLGKRIRQNTTGILRVISPLGETLWKKESNSDEELESLRQEIAKAKNRDEFRLEITAPVGEEDEGDAPAKVKKTAVKSISHVLGFLPTGGKGKLTPQRGVREIRDNFGVAVLNHAKDAEDKFVVIPWHKVWHRIQTLQARNDGKPPLILRIGTLIRVIKPKNKEYEGVWMIRGAQINQRDGYLVDMSRPDIIDSRKNGKPNVRLQSLVDGSLEILKTPLNGIPSGPIKPQESAA

SEQ ID NO: 743 - protein, 1096 aa, unidentified
  REGION 1..1096: note = Description of Unknown: Cas Enzyme sequence
MGKIIIRDLELSFDVGHSSLGWAVLQTVERPSALSEAPRINILGCGVVTFGADDCLASKRRDYRRQRRHARATRQRIAQMEKLLAHLKVMSAEQLKQKHQQAGGNAVPWFLAARVLASNGEAKYLLGWKELWDVLRWYAHNRGYDGNRRWSAQEAEAQEQDTEKEKNANALMAQHGTQTMAETFCKVLGLDPLGEKQSSAANFKRLNAAFPRPVVEKEVRRLLELHQKKLPGINDAFLKSLFDDWQAAKVPDLKLPARYQGGLLFGQLVPRFDNRIISTCPITGEKVPSKNCPEFFKFRWAMTLANIRVAGAKEKELRPLTGDERKKINAVMESEGALTPTELKKAVREMPGCERNNLDTMLMHPDAKDALLLDPIQKLVRGDKLKTLWPTFSPRVQKRARDLWLRGKLVTLDRVCGIAQKLGESLAEFETALNQIADAANTKRGKKEGSFNREALLKEPLTIKKLDGRAAYARPLLVRAYAEIMAGKHPKEEGSCLFVTEEMRQTQLQKQIDQQTNNHLVRHRLLILERLLKDLINEPAYANGDKSRVAQVTIEVNRDLREMSGKSAKEIQQDLGRRLANHHGVAAKLEKDLDGKTYNGQPIQITAGLIRKARIAEDLGWTCPYTGKTYDALDLVSRQVDKDHIIPRSLRPSDSLDSLVITYSEVNKMKGQRTALQFVSDEQEKTVDGMPQLSIVSVTRFKRWAEGLETFKGHDDDKRRKKKRKELLVLQSYEEKGFVPRDLTVTSQLVRLGAQNIKKTFAGVEKAPVVVSLPGSVTGTVRKGWNLLGCLAVAAPQVKEADGSLKTKTDIRNVTHLHHALDACVLGLAAHYLPNNGGLWELMLKRNPNEMEKTMLRSTGYFGFDKEGRFGLTELPEALKEQIRQRLAEKRVVQHIPADMSGMRVEENTRGITAIKDGRVFLRQQSRDAKTGKLSIKETEESANKVIGLKPGKLTPQKGARVITDNFGVAILDHAAEDEEKFVIVPWHKVWPRLQELKPRNAGKVPRVLRIGTLVRVPKKAGRSDYRGLWMVRGVQLNQKAGFLVDLSSPDVIQYRVSGRDDCAQNIRLQSLYDGGLEILKAPLAGIASCPITSSA

SEQ ID NO: 744 - protein, 1068 aa, unidentified
  REGION 1..1068: note = Description of Unknown: Cas Enzyme sequence
MKDYVLKNKPEPASNDKFLTGLVFGFDVGTGSIGYAVRRGADFKDVGVLICDSEGSDLSKRRDLRRQRRTLRSKKFRRQWFAKELAKLGLPKSQTALDDPISLRLRALNGEALKPEELHAALTHLFKRRGYSAVPWAKETKETVKPKTEDDDGEILKQAHGLKAEMDKRGCKHPCQYLAQRRKEVGESPTDYWGRKLYWLRELLEAEFRAITEAQQKYFPQLAEKSDWLLYGDSQPKKTKDEETFHVFFKATEARSPGVLGLRWPRFDNRGPALDSLQPVDEQGRTQHVVRKNKEAFTKAQWELALMNFRVIDRASGKLVAPDRKSLVRLREIWESGKRKKKKESASDTEESETIKISEPVLKRWAKDFVGQYKLVDGQQPLTPQTGAGRARYSSPTLERIIAGEQFNPPQPLLRRKNESPEQALNRYMTDIKHPLVRHRLILFQRLLKKLVSQFGEPDTIVMEAVRSLALGKTKKRELIQRIHNNREERDGIRKELSKDGFSSSKNSILRYRLFKEAKGRCPFCLCPFCLQAVLFKEAEIEHIVPRSRVDCNEFYNLTVAHADCNKKKDNRTPWEAFGQTPDWEALRRNAEECFGLGSMKYKLFTNPDAQDLVEEKSDLQHTAYIARVIRQTSLIQLGWLGEDGRDPTGLKDPQKTAWKFQVTNGHLTSRLRKAWGLNQILHPFPSKDEWGAMTPDEQENKKSELQEKNRGDLRHHALDAIVIACTMPWLAHRTVRVKDPETGEDGWWDLDERTQRSVARNPICPNEGQMYGLAKEEIEKVVVRHHVAKGNKRQFFDTTRYGKRGKDLFIARKVLAKMNPKQLAKIYPESQSLYLTEAWNRFTAENPNVDLLLKEENRGKEQGAKVALPGKFISRLCFSEYQRWVESQKTSAPLGFRWPERVKIPFKSVSVIADDGDSAMFETKLGSKTYVSQTEFKEVRVFLPPNGKKFITQFVRPWVRKGIAEQSSIPEGSKHICTLTKGDILVMKNADLEKKIEAGTRWILKKTFSSGRVSILPSHLSPNREVLISLGFDPINFLRISMNDLMRVLGHELPHPPSVKPQSESSD

SEQ ID NO: 745 - protein, 1042 aa, unidentified
  REGION 1..1042: note = Description of Unknown: Cas Enzyme sequence
MNPSKSSIPDFCSGLVFGFDVGTGSIGYAVRKGSEFLDVGVLICPEDTNDLSGRRGLRRQRRTLRSRKYRRQWFAKELEKLGLPPPEKQLDDPITLRVRALNGEALQPDELHAALAHLFRRRGYAKVPWASEQAAVGEKPSGKTEEEGEIKQAVAEIRRKVSESGCQHPCQFLAKRREEVGGSPTEKWARKIYWPREMLRDEFLAVLKAQAKSFPKLAEKADWLLFGGTREVKGCRVFFNAAGSRAPGMLGLRWPRFDNRGPALDSFQLVDAQGRTRHVVRKNKDAFTHAQWELALMNFRVLDAATRQKLDPRTSFPVLVENLRNEWNKKGKVTAARLEKLAAPFKEKFLLIEGQKPLTPETGTGRSRYSSPTLDLIRSEIGAGRRVDPPQPNLRREGESTDEALNRYLADIKHPLVRHRLVLFRGLLARLAARFGPPDMIVLEAVRSLALGQRAKNELNKRNDKFRKEREVARDQLASSGDSISRKAIQRYRLWQEARGRCPFCLETIARTDLGHGADIEHLVPRSFVDCNEFYNLTVAHLKCNRELKGERTPFGAFHGTDLWPDIKRNAEQTFSGRKLEIFLSPNAEELIEQKADLQHTAYIARVIRHVTLIQLGWLSDKGSDPTPEKQNSALRFQVTNGQLTSRLRKAWGLNQILHPWPPGKRWDDLTPEEQTQFAGKNRGDLRHHALDAMVIACTLPWLAHRTHGATDESGNHGWWTQDEKLRSRAANPVFPRDGQMHEVAEQAIGKVVVQHHVSRSNHQQAYATTLYAKKAKDTYVAREVFTTLSPRNLGSIWPKDFAAYCEAAWERYAAESPDIAAELKKNKGCVPASFTSRLCFAHFQQWRAGQAPPFAWPEQVKIPIRSVRLISVKDDTAVVPFSPGTHAYVKRTGFKEVRICLTQDGKSLVPVFVPYGRRDKPLCERPIKPGLRPAAVIRRGGIVKLLRATGPRNPPGTYRVSATMQDNIQLIPAHIAKDKDALLASGYLANGVTISWKTFLAAAGHELPHPSSTQPQSPGAAEVEQAMGTHDRGAQPTEGCG

SEQ ID NO: 746 - protein, 1343 aa, unidentified
  REGION 1..1343: note = Description of Unknown: Cas Enzyme sequence
MTTQKNLPYSIGLDIGTNSVGYAVVDDNGEVLRFNGKNMLGVRLFDEGQTAVERRILRSTRRRKNRRKNRIALLRDLIGGEVLAKDLEFFKRFDESYLLQEDKTNGDRNILFTDKSYTDVDYHKQFPTIYHLRKHLIQSNKKADVRLVYLALHHILKSRGHFLNGTKDFTVGEGLEKATVEFVKEADDFYEFTPPANLSGDIVKILKEKTSKADKQDQLKKLVPFEKTQKVNKAGFEQTIKAILGYKADYCKVFKTTDTGKGKLSFSLNEDIEDKLDELENIALDNFILFEKISQVYSAFILDQLLKGKNYISDAMVLQYEKHKKELKSLKRLYKKYFSAAERKAVFSNKTGTYEEYIRHSGKKINNKPIYEVLQKNIKEALKAKAKSSPALEKEEDYQLCLKALEEGEFLKKLRTRDNVSLPHQVHKMELEEILKRQGQYYPALEQHHDKIICILTFRIPYYVGPLNPHSDFSWAIRKQQNIKIYPWNFNEIIDKDQTAEEFIKRLRNKGTYFQDEDVLPKKSLLYQEYMTLNELNNIRVKFKTLDNEKHICLENKEKIINEIFKKKKSVSKKAIENFLITEGQTYESSRGYGNGNKFAASLSSYIDFTKILGEVTPDNSLMIEEIIYWLTVFNDREIIETRIKRKYGDRISEEQVGKILNLNYSGWGALSRKLLDGILSKNENPQERATVIQTMRNSHKNLMQVLNHDKLGFKEIIEEEGRQKRTGKLKYKDVDELVTSPANKKGIWQSIRIIEEIVKIKGCHPAKIYLEIARGKDKNPKRTTSRYDRVKEHLKQLADTGLINEFNNISKDDMSSDRLLLYFLQQGKCMYTGEVLDINQLSSYHIDHILPQAYIKDDSLSNRVLVKRTANMRKNDDLTIRQEIQTSRAGLWKHLLEKQMITLKKFNLLMKDKITEGDRKGFINRQLVETRQITKRVKDLLEGTYTDTKVRSIKAGLISKCRSYNHFYKIRDLNHFHHAHDAYLACLVGQYVDIRFPNWAYQKAYSERYRNHVRKMAEQEGQSGKSYDYFIGSLKTRIIDNTTGEIKWDGEKRLAKARKILQYKDVLVSKKKEEQSGQFYNQTIYPKGSSEAKIPLKKGMDPGKYGGYSGEMQAYCVLIESDQGKKRKREFVGIPVQRAYLIRDGKLTLDTFLNEELGYKDKNLEIIIEKIPKYQLFEGKDGGLFFIISSKEVANAKELVLDEKYQKLLYAMTFKNPKQDCVNDSALVELFGRFIEKIDQHYACFTGVNKKLKKALDEGIFASLPLKYIDPKTKAHKDKITVIKQLLLMTQANSSNANLKLIGGTEREGRLKRKPFSFVDDDGRITLINRSVTGLFESHRKV

SEQ ID NO: 747 - protein, 1388 aa, unidentified
  REGION 1..1388: note = Description of Unknown: Cas Enzyme sequence
MKNKEWYLGLDVGSASVGWAATDSNYKLLRKNKKRLWGARLFEEAKTAADRRSFRAGRRRLARRKWRINLLQELFVKEISKNDPNFFLRLKESKYNFEDKSLMNEYILFNDKDYTDKEYFKEYPTIYHLRSSLTTEENPDIRKVYLAVHSMLKNRGHFLLQGQSFNDSNIDSVIKELLELETVKINFEVTDEVIHSLKEIALEKKNLSDKNNDVKKLYPKEKQLQEIFKLVFGGKTSLDKLYDIEEYKELDTSVKSISFKEKVYEKVRPDYEQILSNYIELLDLAKLVYDSIVLADIKKEGKTISESKVELYNKHKDDLANLKKLVKTDSKLSEDKKKEVYFAIFKEDKEKRTNYVNYTHRSQEGKSCSYEDFKKFLKKELEKLEDSPTKTTILEELDLETFLPLQRTKDNSVVPYQIHKEELVKILDNAAKYHSFLDEKDDSGYSTREKVVQLFEFRIPYYIGPLNAHHNTENGGYSWAIRKKGMESVPVTPWNFKDVIDESASAEAFINNLTNKCTYLAGEDVLPKNSLLYSEYALLNELNALRYEGNRISVEARDIIVTKLFKEQGKKVTKKTIKELLKTEGFIDGKGEIAGIDNIVKNDLKSYRDFKKILGNKFDKERVENIILWITLYGESRKLIKEKIIKVYGDFYTVDEIEKMSRLTYKDWGTLSRKLLTELVSEKLYNEETGECLNIIGAMRQSTILFMELLADKFDYMSQIKNHNKENKDDITEITPDILENLYASPAVKRSIWQTVRIVEELKTIIGSAPTKIFVETTRSNKAPNKVTTSRQNDLIAKYKTIKDQEIFELEKELNSSIDFPTNKDRLSKEESSRLKAKKLYLYYTQLGRCMYTGQKIVLKDLLTDKKYDIDHIFPQSKVKDDSFNNTVLVTRESNEEKGDLFPLKSKFQTKETKGLWRFLKEKKLITEEKYNRLVRTEEFSDDELTGFIARQLVETSQAIKAISTILSELNPETTICYSKAENVSAFRQNFGKIKEGNRKSENNEKLIKVREINDYHHAKDAYLNIVVGNVYDVKFTRNVYNFIKNKKDARKYSLNSLFYTDVKNANTIAWEMGKTVHVVEKTMNNNNILITRRTAEQKGALYDATVYKAKVAAKAKEGAYYPLKITDSKIKDVGKYGGFTKVKIAYYSIFEYTIEDKRGESRITRIVPIPIYISQNIKDDKTLLEYAKTQQLGKDLKLKYRKLCIGSTLKINNFNYYMGGKTSDYFTYDSAIQVVLDKDSEVYTKELAKYLNWKKENKDGKLWKSITEDKNIQLYDVLVEKMNTGIFIKKTPNKYDELSTEEVRDKFKNISKEEQAKILLEVLNLLTNKKSTFDLKNIGITASRAKCGFNLSNQSQFSIIEQSVTGVYEKEIVIVGEKNNDLENSSN

SEQ ID NO: 748 - protein, 1438 aa, unidentified
  REGION 1..1438: note = Description of Unknown: Cas Enzyme sequence
MNFNRKCSENYCLGLDVGTASVGYCVIDENGKLFKINRKGDDGNNKRNSLWGVRTFKSGEPAKGCRINRSTRRRYSRTHTRILELRKIMSDMVCKVDENFFARLDESFLWKEDKSDKAKSDYILFADKDCTDKDYYEKYQTIYHLRKHLLGTTEKADARFIYLALHHMLKYRGNFLYEGQKFTELDDFKIIYEQFLTSLKEYLEIECNYDQISCEEIEEKLKEKKSKKEKNNEVSEILKKLGLDKKYAEAVANAIIGYKFNVATIMNDKNLCDENGKEMSVSFASANYEEEEQKLSDELGEKFSVIENLKRLYSWYVIKQIMQGSDKNRVNYLSQAMVAKYEKHHAELKELKELFRDYKTQKEYSEFFHKELKAEQKDGKMSPVFLKSFGKIKKGEYVPNYANYIKGMKRCGDTQSKARENLYKCIKALLGDVAKDDERYIRICAEMENDSYLEKINDVSNSVIPYQLNEMEMEKILDIQGEFYPELKKNKELILKMLTSKIPYFVGPLNPGSRFAWMSKKAGMENKSVYPWNVEEVVDVDKTAEKFITRMTNYCTYLPCEKVLPKHSIIYQWYEVLTELSQISIDKIKFGKEIRDDIIQNLFLKKVSVSGNNLKEHLKKSGTYNDIDNRVIKGYQGGDNFASSMSSYITFKKIFGEINMSNIDMIEQIIYWLTIFDDKKIIKRKIEQNYKDKINDSQLKRILKIKYTGWGQLSKKFLTGIKGDTGHTIIEMLEEGDLRWKEIPNLIQIINRDENIKTVIEENRLRYNGEDDLPDIIDKLHTSPANKRGIKQCMKVIEEIIEYMGRKPEQIFIEFAREEGEKVETKKVKDKLDKAIGKLKQEFKDYYNDDIKQELKDNEKRLDEEKVRLYFSQNGKSLYSAPSASNQLSLDNLNQYDVDHIIPYSISQDDSMDNKVLVKKIENQNKGNRIVSDAFGNKADYKEMQNYWEMLYKAGLISEKKYNNLNKSLDEVFSKGFINRQLVETRQIVKNVANLISDYYDDKIEVIEVKAQLSSYIRNKFTQEKKDDDGFWIENTENAMFFKNRGLNDYHHAHDAYLACIIGLYIQKVYPGWKNELNFKKYRREFEKYYEEQKKYNTKSKKEIYISMLNRFTKNYEKAGWNGEEIIEYMRKIFCYRDVMISKKTEENTGSFYNQTRYPKEKLDGNKKETKLIPLKSGNNLRGKEGLKELSVEKYGGYQGGECAYFVLVKYYTVKNKKKTEEKQWKMEFVGIPTYISYEINKGNINLKQYICDKLKNNTVEILRNKICKYQELMDEEGNRYFLVGPTEVANAKQFVLGSRYQKFNRLYSYINSENWHYIRTDELEKEIDEFFKLLQNKIHNEFKGYIKDIDKVIGANTSKLDIDKKIDYFNEIYKIVQANSSRPAVSKFNIAGISDGLGRKRSLPFKDKIIIVDKSVTGIYERRTCFELENGGNTKSC

SEQ ID NO: 749 - protein, 1063 aa, unidentified
  REGION 1..1063: note = Description of Unknown: Cas Enzyme sequence
MKYRLALDMGATSLGWCVLALDRNDAPTSIINMGVRIFPDGRENAQAGKVGEPLAVARRNARGTRRNNDRRDRRQKRLMDFLIQHGLMPENYNDRKKLESLDPYSLRAVALDKEIPMHHLGRALFHINQRRGFKSNRKTDRRENESSNMKNAIKDLDQKIMLSGCRTLGEYLKKQKAENQPVRVCSSMVKNKAEYNFYPGREMYQKEVATLLQKQKTFHPSLTDKVCETIQDIIFYQRPLKPAIIGSCRFESGEKRARLALPIVQKFRILQEINNLQIDRLAEGDPMLDTDDRKEITESLLGSKKKTFGQIRTLLKIPRDCRFNLESERRSELAGDLTSFLLSDEACFGERWHSFTNEQQETIINLLFDEPDPDTLIERLATEWDVSPQQAENIANAPLPDGYGSVSAKAITKMMPFLEQGMKYSDAAKAAGYHHSDFRTGEIFDRLPYYGEILPNNVIGGSYAPNDKEMPEKYFGKINNPTVHIALNQVRQLTNALIDTYGPPEQVVIELARELKEPAEDVTKDQAKNQKDNERINKELELLGVKQNYRNRMLFKLWEDLATDPLKRCCPFSGVQISKTDIFTGAFEEEHLLPFSKSYNDGRANKVLSARAKNREKGNRAPYEAFSHTPEWPEILARIQNMPKNKQWRFKEDCWNIAKGQGEDIIARMLNDTRYMTKVTKAYLSAVFDNEKGKSKIWAVPGQMTALLRDKWGLNDMLGEEDGQKDRTDHRHHAIDAFVIGCSDRSTFKRLSDAARKLEEDEKLYDKRHKLVTDLQDPFGGFRQQMTEKLENMVISYKPDHGNAAGAINAPRPYTIAGLHMDTAYGFIRKGDKKGAIVIATRKPIGSMIDQKNIDKIADMSICAALTKHLEGMKEGSAEWKAALVKFSQDTGTRRVRIHIEKTRDSLIPIRQPVDKGPQETRGEEYKLYELRGNYCAEIYCPSKGEDTGQWLCEIIPNYYAHQKDFIPQWRKSNPTAKLVMRLQIDDMVAYEEKGNEKICRVKKMTSGLVYFRENKIAKEEADKLSRKMSATQMQEFNVRKISVDILGRVKDPFKMKQKSKAA

SEQ ID NO: 750 - protein, 1128 aa, unidentified
  REGION 1..1128: note = Description of Unknown: Cas Enzyme sequence
MNYRIGLDIGITSVGWSVIENNEFGDAVKIIDLGSRIFTAAETPKDGSSLALPRREARGARRRNRRKVFRIFRVKKLLIESGILSESELDKLYTSNISKYSIYEIRVAGLDRKLRENELAQILINFVKKRGYKSNSKAEELSDKDSGKDSRKALTAINENKNIMKLHNYRTVGEMYLKDEKFRMILPDGTFLKSLNNGKIVLKTRNTTDEYKTTVERSLLLDEIKLILDVQSKLNDKINDAFITKYIEIFQSQRNFDEGPGKPSPYGGDIIESMFGKCTFEQDEKRAPKACYTFEMFKFLQDINHIKLEEINLLNKKNDTLYHKSEKEAKRCLSDEEKVTILNEFKNTDNISYPKLRKMLNIPYNYVFNIITYDFSKIKDDNIKDIIDENEKGMKNFKAFESYHTIRRTLNKVQDKYIYSLNEDTLNKIGYILTAYKSDVKRIAEFEKLNLDKDIVNKLLELSFSKLGHLSIKAMKNIIPYLKEGLTYDKACDVVYKDFRGLLKIDKKNKLSLNDIEFISNPVVRRGISQSIKVINAIVLKYGNPDLVVIELAREMSRDFTERNKDKKSNEENMKYNESVKERIQNEYKHGLNVTGQDIVKYKLWQEQGEMCPYSGRHIDITDLFTTDVDIDHIIPYSICFNDGYNNKVLVKASENRQKGNKLPYQYMLDMNRDIDEYTVRVENMYQSKRTSNKKKVLLKEILTSDDVEGFKDRNLSDTQYICKVIYNLIRNNLNFNDSKYINKPIYAVNGKITSHLRKRFRIPKIRENGDMHHAIDAVIIANISESMIKKITNYYKHEENKYNDSNNLEEFNSQFPEPWPKFSKELDARCMSKKENIERAIASLKLPNYLPQEKINPIFVSRMPRRKISGSAHKETIKAITPDGHTIIKTDLKKLKLKEGEIENYYNPQDDTLLYAALKKRLLDNDNNGEKAFMQPFYKPKSDATTGPLVKKVKILSKSTLNVKLDKMNAVADNGDMVRIDVFNIKNDGYYFVPIYVSDTVKKELPNKASVAGKPYEQWKEMKDEDFIFSLYPSDLIYVKSKRGIKLSPMNKNSTKESIVVDEMYGYYNSANISTSAIQIVTHDRELYQDGLGIKTLLEFKKYQVDVLGNYTEVKNLEKRMKFNFKK

SEQ ID NO: 751 - protein, 1374 aa, unidentified
  REGION 1..1374: note = Description of Unknown: Cas Enzyme sequence
MPGIYVGFNIGTNSVGYAVTDKQYNLKRKFGEDAWGSVHFDAAQTCKGRRDHRTGSRRIGRKKQRIALLQEIFAPEVAKVDERFFLRLKESFRWRDEVEEPHIFFNDSDYTDIQYMKEYPTIHHLITELMKNPEPHDVRLVYLACAWLLAHRGHFLNNLKVENIDKITDITTVYQEFLDYFTSHGYRRPWEDVSPDALGEVLKENMKVSDKKNALKDFLLDGHTPGKDVTENFPYSQEAIIRLLAGGECSPKEFFHDEAYEDLKKIKLGMSDEDHAELANVIGEEYDLILSMRKIYDWCILANILNGRSDITISEAKVLTYEQHKKDLKTLKYFFRKYLPDRYDEIFRKTGTDSYASYVGHADKELKAAIGKQAAIASFSKHIKKMIEKVEVEVEECDQALFQDMFERLEVNTFLPKQRNTDNSVVPHQLYEYELIRILENASKYLPFLNETSAGLRNMDKIRAIFIFRIPYYVGPLNEHSDFAWLTRKAGKITPWNFDEMVDKDASESTFIRRMTNQCTYLPGEDVLPKDSLYYQKFVVLNTLNCLRLNGEKISVHVKKLIFEELFGTKRSVTKAGIARFLKEKGFMQKGDILGGVDDKIPAALTTYIAFRPFMEQAILTENDIERIIERASYAEDKSRLVKWLQANYPGLSKEDIRSISRIRISKFGRLSMRFLTGLKGKDRSGQEYNSILDAMWNVNDNLMEILSSRYTFMDAVQEYREEYYKGKALTLKERLDEEIVPNSIRRPAYRTLAIMKDIEKAFGIPDKIFLESTRGGFQNLKGTRTKSRKDQILDLYKNCKKHPNLPRLRSELESLGEDVDRILQSDRIFLYFMQFGICAYSKKDIAFEKLRKHDKVYDMDHIWAQCYIKDDSLSNKVLCYREINENKGEKYPVEPEIQKRMMATWLEWKDLKAIDNEKFDRLTRTVPFSEDEKFGFINRQLVETAQSAKLIAELLSKRYPGAEIVYTKSTLVTEFRNEYELTKSRLFNDLHNAQDAYLSIVAGNVYHMKFSRQWFNPNQRYSIKTKTVYSNPVKCGNELVWDGVPMLEKVKKIARKNSAHLVKFPVFKTGDFFDLQIVKKKSGLFSHKEGLPTERYGGYNGMSIAYFVIVKFQTKSGEDLFFMPVELLYGQRFREDEEFAEEYTKKRLNARVRGTVLDYSYPFGKRPWKINTLLELDGFHACITASGSKGRTLSLSTMESFVASDKWKLYIKRLDKFVEKYEQSKKKTKKLRCNPKYDKLSVEENLGLYDLYINKLQNSIFSKRPNNQLDTLISGREKFIKLKIEEQCEVLVRIHTLFGRSTNSIDLTPIGGSKNAGSPGSFSSLVSNWEKTYSDIRIIEQSPSGIWYKKHVTLLKKGKKRFYEKDKKTTIAS

SEQ ID NO: 752 - protein, 1091 aa, unidentified
  REGION 1..1091: note = Description of Unknown: Cas Enzyme sequence
MSYAIGLDCGIASVGYAVMDLDEKGNPKRIIRLGSRIFPSAEHPKDGSSLALPRREARSTRRRLRRHKHRLERIRYMIVDEGILSQEQLDVLYSEPVSDIYMLRVDALDRPLTNEEFARVLIHLAQRRGFKSNRKVDKEDKDDGKLLTAVSGNTLLMKEKGYRTVGEMFAKDEKFSSQKRNKAENYTNTVSREMVEDEVHKLFAAQREFDCPFANETVENRYVNILFSQRSFEEGPGGDSPYGGNQIEKMIGRCTFFPEEQRAAKATYSFQYFSLLQAVNHIRIVSDGSIRTLRSDERKNVLEAAFQTDGLTFKRIRAVLGLSENDRFRNVYYRSDDKEEWESKTKFQYLHAYHEMRKRFDKLKKGHISIVSRTDLDEIGYALTVFKTDDKIISYLKEHTSLDKSEIDAVLMMPSFSKFGHISVKACKAIIPSLEQGMTYDKACENAGIKFQGHDSDGKTRYLPANPNDAPELEDINNPVVRRAVSQTIKVINAIIREQGESPAYLNLELAREMSKSFQDRQEIKKSHDQNNARNEKIKQEIADNFGKVNPSGQDILKLKLYHEQQGVSLYSQKVIAYDRLFEPGYVDIDHIVPYSICFDDSFRNKVLVFSNENREKGNRVPLDYLRGEEANNFVVYVKANVKDYKKKQRLLRSRPTEEDIKEFKERNLNDTKYLSRFLLNYIQDHLQFSESGSDKTKRVTSVNGSVTAYMRKRWGINKIRENGDLHHAVDAAVIACVTDGMINRISRWSKYHETEYEEFEGESYAVDPRTGEVLDRFPLPYPEFRKELDCRLFDNEKHMHEALTRLSNYRDVELSTIHPCFVSRMPNHKVTGPAHQDTVRSPRHYEEDGIVIAKTALQNLKLKDGEIEGYYKPESDRLLYDALKARLVEFGGDAKKAFKDDFYKPKSDGTRGPLVRKVKTFKKSSLNVSVNNGKGVADNGSMVRIDVFFVEGDGYYFIPIYVADTLKEELTNKAVVAHKSYDEWREMKEEDFQFSLYPNDLILVKKASGAIPLTINLKDSTLPPKIEKSEVFLYYRKSGIAGATIVCDNHDGSYYVTNLGIKTLASIEKYQVDVLGNYYKVGKERRQSFR

SEQ ID NO: 753 - protein, 1194 aa, unidentified
  REGION 1..1194: note = Description of Unknown: Cas Enzyme sequence
MGKKKILGLDIGVSSVGLALIIEDENNIKSIEKLAVRIVPEDPDFHGKFYSGNTASKNLARTTKRGIRRSNQRFKLRRDRLYRILNEVKMFPSESLFELEALPLYELRAKAVSEKISLEELGRVLILINQRRGFLSNRKADSSEENLTEYKQKIEDLEDDLGEKTIGQGLYNELVSSSNIQNLLLRERTYLRSSYLEEFDRIWDKQHEFYPSVLAGNSQQETNKNTLYYEIRNNTIFYQRPLKSQKGLVSDCEFERFHKATSKSSPFFEMYRAYQRVNDLSWKNDKGEQLYPIKEQKDELIKALLLGENLTKQGNLPQKSIKTILGCKSNEKVYFNFEELEGSRTAYKLRKALKGAGIENFEKYLKFDPSINDEKGGLFELWHITYSLPTFDDIVRTLTRRFPFTKEQASFIADNVHYKSDFGKLSTRAIRKLIPHLKSGLNYSSACDEVGYDHSGYKTKIELKKKLDAVSPNSLRNPVVEQVLNQVVNSVNLIIEKYGKLDEVRVELARELRNSAKSRSRISRLNSSNKKDNEKIRERLHDEYGLKVVNGRDVKRYNLWKETNCSCLYCENPITKTDFMSGNAEIEHILPKSRSFSNAMTNFILAHKKCNASKNQMTAFDFMESKGEHALKAYTEKVNKLYNDGKGQISRTKFENLMCSGDEIPSDFVERMKKDSQYIAKETVKLLRTVCENTYTTTGQVTDLLRSEWGLKNVLEELGKPIYRELGLIETKEIKDSKGNIKTIEKIKDWTKRDDHRHHAVDALICALTDQKIIFKLNNLNKIFQYSRETLSKEELAEMERINENKYDLKEFFTQGAYEFKEPIENLRPIVKKHLNEIFISFKKSNSKVLTKNVNRVKNADSQVTWVPRAALHEDTIMGKRKRISQKKLLINKKFNNLENIIEPKIKEFIKEYLNKYGNDPLKAFDSKNLKKNPLMFNGEVLKEVQVFENTNSKRVAISDSVTKAQLDKIIDEEVKKILKARVDEYGGIKAAFKNIDDDPIYFNKSKGIVIKSFSVYDESKSIDVRDGVAKTGGNHHALIFKDENGKYNDKVISFNEAVQIGLLNISEIGKPYPIIIRNDDPELGAFQFSMQINDLFVFDLKHTINPQEENEIDFFDSQNREIISKKLFRVQKMSKKSKGTFEVAYRHHLETSVNRSSINLKGITWDEHGSNNHLGRLTKIKINHIGLILKVGE

SEQ ID NO: 754 - protein, 1046 aa, unidentified
  REGION 1..1046: note = Description of Unknown: Cas Enzyme sequence
MLHKMRYRLALDLGSTSLGWAMVRLNASQQPCAVIKAGVRIFSNGRNPKDGSSLAVTRREARSMRRRRDRLLKRKARMMRTLIEYGFFPANETQRKALENLNPYALRAKGLDEALTLSEFARALFHINQRRGFKSNRKTDKKDSDSGALKTAIKQLHSVLDPQGNDGKPRTVGELLYKRFTDLSKLPKDRTVRARYRQDKIVKDDGKTKIDKYYDLYIDRAMIEQEFDALWKKQSELNPILFTENARADLKDVLLYQRSLKPVKPGRCTFMPEEERAPLALPSTQRFRMYQEVNNLRILREGLKEELLTLQQRDDLINALEKNNRRTFTQIKKLLGVGGSVQFNFEDPKREELKGNTTSAILGKSEHFGEAWFAFNEAKQDAIVLQLIKEENEAKLVRWLQDETGIDEKRAEVIANAGLPEGYGSLCIEALARILPELRRDVMTYDKAVQAAGFEHHSKLNRNEEIPDITFKIESIDRNSGEIKQFHLHKELPYYGEYLQRHVGFGSGKPEDSIEKRYGKIANPTVHIGLNQVRVVVNALIKRYGHPSEIIVEVARDLKQSKDRRDEENKRQAENQKRNERLRKDIADILGISEERVRRDDIEKMILWEELSFDPADRRCPYSGVQVSTVMLLSDEVEVEHILPFSQTLDDSLNNKTVALRQANRIKGNRTPWEAFGTSNISGFDYSGILTRAELMPKAKRYRFAEDGYQRWLKDDAGFLARALNDTRHLSKIAREYMSLICPNTRVIPGQMTAMLRRNFGLNDVLGLNGEKNRNDHRHHAVDACVIAVTDQGLLQRFAAASASARERQLNRLVENMPLPWESYREHVQRAIDGIWVSHRPDHSHEGAMHNDTAYGLRGNGRVSFHKMVEGKREYIEDNLKVIEITDTKAIDRHGLLPTGKPRPYKGYKGDSNYCIEIVRNEKGRWEGVVISTFEAYQLVRKHGAAQLQHSGLSISGKPLVMRLMIDDTVRLNIDGQSRTLRIATLSGNGQVFMANISEANVDARNRNKEDPFVYISKMAGSLQTAKARRITISPIGELRDPGFKE

SEQ ID NO: 755 - protein, 1513 aa, unidentified
  REGION 1..1513: note = Description of Unknown: Cas Enzyme sequence
MEEKGITLGLDMGTNSLGWAVVDNSTNDLVSYHGHPMWGVRMFSESSPAEDRRKKRGARRRYQRRRQRILLLREIFQKEICNKDPYFFYRMDQAFYVSDDRTDEGKGYLLENQKATKDFYNKYPTIWHLRYDLVTNKEKKDIRLVYLAIHHILKYRGNFLHEGDIELSAKPNDELNMFISCISSTYEGNFEKEEDDDNANWDKYFVVEQINNDKFIDSLISIIDKYLDRSKKLTEVVDPSKKRYELFADELIQLVGEPKNILTELLPDALFKGTVDLSKNRIYKEIYKNQIDLDKKDLKIIFNSDDFENKISNLSSKLKEISPLIEGLIYLKSIYNNYYFKDFMKGSSSLSKAFIKKYNENKEDLKSLKSYYDKYLSDKKNSMFRDNKVNNNFVNYIGHYSPNEKNPDGKSWSEGEIIKIEKKKSDYSEFLNKLKEDLVKPWKKYPEAQKEADGFLKKIEDNTLLQRLNNASNSVIPMQFNKKELVAIINNQKEYYPDLFTDSNISHIKQIFSFKREYFIGPIDFDKNNKSKFSWVVQKETALNKKQKIYPWNFYDVVDKKETQKNFIQRMLNHCTYLKGENDYCIPSSSISYQAFVCLQYVNKLRDSNNNLISVDAKQQLFKDLFLSNKTVTAKEIKEWMYQHKLGNTASIPPCNCNMSTYISFKNLNKYKKYEFLRLEQIKEIDEIVKLMMIFSDKETRNDILKNDYHFDDEDIKQIKGFNYKNWGRLSDRFLNGIKIEYNDEESNEHREYNSLNNVLWFTNFNLNEILFNSKFNFHDEIEKYNEKQNIDFKESDDDFLKNWMEKNVCVSPIWTRSFVQTYKLIKEVNELLKEEGKEISYYSVECTRENKPDKKGKETCSRYDRLLNIFKDKGFNKEARDQGINVSTLIKSLQDNKDSINNSDHFLLYFQQLGKDMYTLEPITDLDEIGTNKAYDIDHIYPQSVLKDDSISNRVLTKSTINRDFKKDKFLSDPDCGLKLPKGAFSFYKFLFDNSLISRTKYNRLTEKEINFNSLESFINRQKVATDQSTKAIIELLKFLETNKYCERDNEMSRDEARKEAEKHIIYSKAGIVSDFRKRYQIYKSRIANNYHHAHDAYLNAVLGKTLKDYYDDKKIYLFGDELKKRIQKDKEYTINPDNILSENTREAKDHRIIWNGIKEIDLIKNNIQNNFDIRETMYTYYGNTLIGEETVEGKKGKGKETIKSLTPNGNRMDLKKYGGYKQVSYPYFYLIEKNNREAMICPVNSFYKDDNKIDEFIEDNFFTEKEIMKSKGSNKPLFTKKLKLKINTVILSPKDDTQHLRKMYITGSNRFNKDLHIKNGFDRNFQKEDMQTIHMITKFIKVYESNDCFENCNPRILFGVNEKSSAYIQLKKAEDCLLTDEDLKHLYNSIIEMWNKSIYSNRTTRNLIDKISCKYGHWFASEVLSKEQFINIIYLLNEMLKYLKTNDSSTLNLKTNYLRKGNKNDEKKEKGEDCGGLSLSINLSKGMRIVSYSITGFKTELLYKVKEKVKE

SEQ ID NO: 756 - protein, 1066 aa, unidentified
  REGION 1..1066: note = Description of Unknown: Cas Enzyme sequence
MKYCLGLDLGSGSIGSAVIKLDEQNNAQEIVDAGVRIFPVSEGAEERRQKKSMRKNLKRTRLRLELLAQKLFENRLWVNETPEGTAGLRAKSPYKMRFDALYKRLDNPNYIGRIILHMAKHRGAGFVSAAEEMVEEVLEEGQQSKAKKSAYDMMLQHLKDTGSVTVGEFFYKRLQEKSDKNTGKPVIRQKAYALKSNIVDYALPRYLVKDEFNRIWDIQAQYFVQMQKEGLKKEIYDILFFERPPVPYATGKCIYIRDEDRLLKAHPLSEQRRIYEEVNNIRVVYDTGKRKLTLSERDKIVEELLLKGKNAGKSAIKKLLGLSAQQKISLPDDRVIKAYLYSRPEFAEIEYLQSLSTEKLEEFIDFLAEPKNPNDRSGRLYSEDALIEYLKPVLAIEDEKEIGNLLTKLPKGRGMLGRTASTRILQELQRNVLTHREITNVLAQTDKRFQAAEEAARQNQGKCFELPYYGEILQADTQPLSPFVIKNSKTVDDNEKKWGKIANPAVHMILNQIRLVVNEIIRIYGRPYEINIELGREVGLSTNKKKILENTQKAGKNLNDEARKYLSDHHIFVNGKNILKYKLAKEQGWKDAYDPRVNIKRNFDGFEIEHIIPQAKGGTDTYNNLCLVNRNDNLNKGDSFAYDYLEKTKSPEVLREILKNARERIPGKAWRFEAEAREKFEEQGDEEETNRYLTDTRYVAKMAARYLRAIVDCDDSDEVIRNRILPVKGQQTSQLRRSWNLQGIEYELMGLDVLPYQVCSKYWLEKETGEIVEGEEKPEIDGCWACYDKIKNPEWREKPRIDHRHHAMDAITVACATRSLIQKMANEVNLRHVATPLPLTSVASVGEFRRKVVEILKKINVSHKPEHSKARQLHKDTGLKVLGANPDDKNAVITLRARKVLDVVKNKSDLNKLLIPESIKNNWYADIEEDKNKQAQLVKNFELYMNTAEQILIKQNEQAVAEGKKEIKLTDGRVISKAFQIILDKKLWKGDKFKCYESKSALVYIPKHGVAYEGQNNHRVDFYQKNGKIGWEVIRCFDINQLGFEPQWKKEGAKLSGRFTKEIYWN

SEQ ID NO: 757 - protein, 1059 aa, unidentified
  REGION 1..1059: note = Description of Unknown: Cas Enzyme sequence
LKHSGQYILGLDIGIASVGYGLINNETKEIIDAGVRLFPEGKSDENDGRRSKRGSRRLLRRRKHRIANVKSLLAEYGISIENNSNMNPYEIRVKGLSEKLSDEELAAALIHLSKRRGIHNVDVTDDSEESSELSTKDQINRNAKLLTDKHVAELQLERLNNEGSVRGHSNRFKTNDYIKEAEALLDKQIEFNKKLDDEFKRKYIHLINRRRAYYEGPGEGSPFGWNADIKKWYETLMGKCTYYPEELRSVRYAYSASLFNVLNDLNNLVIMRDENDKLTKDEKVHLINNLFKKQKSAPTLKKIAKELGVKEEDIKGYRVDKKDKPEFSSIKIYHDIKGITSNPQILENPEILDKIAEILTIWQNEKHILEELEKLQLNLNEQERVKVANLTGYTGTHSLSLKLIKQLNSELWESNLNHMGIISNMNLRPKKMEFKGLDKIPVDFVDEWILSPAVKRSLIQSIKVVNEVIKVYGEPKDIIIELARESNSDDKKRFLQKLQKDSQKINEQVRAKISEINGKDNFSSSLFEKVKLWHLQDGLCMYSTESIKIDDLIQNPNAYEVDHIIPRSVSFDDSLNNKVLVKLEENQKKSNMTPYQYLSSGQGSISYEKFKANVLTLAKDGKRISKKKRGYLLEERDINKFEVQKEFINRNLVDTRYTTRELMNLLKLYFKDNEMKTKVKAINGGFTHTLRKIWGFNKDRSEDYKHHAEDALIIAMADYIFANKDIFKNQNILMRDNQAIDLETGEILSEKDFVDRFFEDEVFSNIRAIKNFDRYKYSKRVDKKPNRQLMNETIYSSRTFDDGEYIIGKLKNLYDPKNKDVKKKINKNPQAFLMYHHDPQTFEKLQTILDQYSDADNPLAKYYEETGEFLKKYSKESNGPVVKSMKYKYRKLGAHHDITDKYEGSRNKVFTLSLKPFRIDIYKDGGKYKFVNINYIDVKDVGSEYNVDENSYNEKKNRKNITEQAEFIGSFFKYDLIKIDDQLYSLISIHSESSNKLEVDLVNKNYKEYAEKNKLSKRKFISIVSKNSITKYTTDILGNLYPVHNEKLKMKFPKYKGKE

SEQ ID NO: 758 - protein, 1378 aa, unidentified
  REGION 1..1378: note = Description of Unknown: Cas Enzyme sequence
CISYGNLLRYIYYRGSKVFCQEGRKVQMSKKYYLGLDIGTNSVGWAVTDENYNLCKYAGKRMWGIRLFEGGETAEQRRISRSNRRRLSRKKQRIDLLQELFAEEIAKMDPTFFIRLNESRLHLEDKSTGEKFPLFRDKDYTDIQYYKEYPTMYHLRKELIENSKVHDIRLVYLACHHILKNRGHFLINGSFSDVKKLSSVCESMLNSFNGISKYQIEINDIERLEEILSDRKKQKSVKAKELIQIFECGPCEDKTDEKTCKAIVSNLCKWLTGLKGNINSIFDMQFEEIDTSSFSFTEPKYEDTISAALEEKYPDYADVIQKIKAVYDWSVLVEIMAGEDYLSFAKVNAYNKHKENLCILKEVIRKYCDSEIYHKFFNGFDEKNGYGNYIGSIYKNGHSYAMKKCSTEDFYKTLGKILDKIQPEKEDENVLEELKVEVKNQTLLPLARTTANGTIPNQVHIQELRAILDNAKKYLPFLNEEDEYGTVAEKIISIAKFRIPYYVGPLSTRHKEQGANSWIVRKQEGRIYPWNFEEMVDLEQSNKEFIQRMTNKCTYLIGEDVLPKNSLLYSRYMVLNELNNLRIRGNKISVKLKQELYKELFCTKAKVTGKGLFNYLKKEDEELALEDISGFDIDFKSSLTSYLDFKKQILGEEIEKDKYKGIVENIIKWKTIYDDDSKMMKKMIEREYPNVFSKDKIKKICRFKYSGWGNFSLSFLNGIRGADRETGESFTIIEALWKTNYNLMQLLSKQFTFREEIDLINAEKVGKINKVSYDNTVKDLIVSPANKRAIWQTVQITEEIKKVMKCEPERIFIEMARGGEKEKKRTVSRKARLLELYAACKDDVRDWTKEIEDREEREFNSKKLYLYYTQMGRCMYSGEEINIDELMQKNSKWDIDHIYPQSKIKDDSLDNMVLAKKVINNSKQNKLLSSDIRIKMKKYWNALYKGNFISKKKYDRLTRTEDFTNEELSGFIERQIVETRQSSKAVAELLNRLYEHSEIVYVKAGLVSDFRHDNKLLKSRRINDYHHAKDAFLNIVVGNVYNAKFTSNPRKWIKENRGTNYSIRRVFDYNVKRGNTVVWQGVEDGGHSIDEIRKTMARNDILYTEYTYCDKGELFNATLIKKGNDKAINLKKALDSVKYGGYNSPKTSAFAFIEFDGKKKERKNHIVEIPVYIVNIAKRQPDTIKEYLEQKKGYKNVVVKKYPIKKNALIKIDGYLARLRGANETDILLKNAVQLILNDKYYEIIRRVEKYLEYNVRYEAESMFEGFDHADLNSLYDELTSKLETSIYKKRPANQLNALEKGKEKFKNIQTLREKAQIIKEMLIMYRCDAATVANLKAIGGSANAGSMKIKKNTLTSRSLVLVNQSITGLFETEEELV

SEQ ID NO: 759 - protein, 1071 aa, unidentified
  REGION 1..1071: note = Description of Unknown: Cas Enzyme sequence
MSNKITSLKKYSNQTKNTRLALDIGTNSIGWAIYKLDKKKKPCSIIKTGVRIFSSGRNEKDYTTLNATRRQKRLERRQRDRTLQRKKFLLHLLKKYGFFPKDKDLAKELQKLNPYELRAKGLDEELELSHFGRALFHLNQRRGFKSNRKSSNDKESGVIDSSIKAVEELMEEKKVRTYGEFLWKRFQKMEESRKTPGSQQENWILARRPINFKTKDNYVVYSKRAMIKDEFNKLWNAQAKFHEKLKDEKIKEKFFKAIFFQRPLKQVIVGKCFYTGKDRIPKVSPYFQKFRILKELNNLRWINQRGESFSINKDNTEFRDHLISRLFSKKKEVKFTDIKKAFKKFFPNIEDFPRFNLDTDNRNKLEGDIASNILRKEISEWDNWSLEQQDKFVELLDGKNNHALKKGEEVLFMKEDEEVLNDLIKFSKDNNFKLNEEQLKKCIKKNLPDGHGTYSKEFIEKILPFLEKGELEHKAIQSAGFGHHSDRKYKGELANALPKYQEILKNQCVEMSLKPNKKNPFNTFRIPNPTVHVAFNQLRLLVNDIIRLYGKPSEAVIETARDLPLGVKTKNQLQSKQKENTLRNEEARKIIEDFGQENNRSNRIRYQLWKEQKYKCIYSGDPISKTALYTAQLEIDHILPYSQTLDDSYMNKVLVYKKANQGKGNQTPYEYFSSHVKQWENVLSRTKELPKGKQWRFEKEAMDLVKNDNNFLERQLNDTRYISKYAKQYMEHICPQVWTVRGQTTAIIISLIQFEEKNREDYRHHAKDALAIGLIDRSFVKKVSDIAKKIEGQDKSRLKNIRKELAKNNAILPWSEFKEDAKSSLEEIIVSHRQKTKKEGELHEETAYGGIKEIQNFSQPIDVVLYKNIIEITKEKLKNIISPKIRKDFENEFKKSNKITKEFLQDYHKKTGIRRVRLKSKETIIPIKDQFGHNYKAFMPGSNYVIKLFQDKKGKWDGKIITTFDANQNKIFLPKKNSSLMKGNLLFFEGDFWKLVKFDRNKILIFVRHFVSGNPDELRKEEKTKHLMSQKNISSLGKTKPKKVDISPAGKYKLIDFQIEKEELIKQKVTL

SEQ ID NO: 760 - protein, 1097 aa, unidentified
  REGION 1..1097: note = Description of Unknown: Cas Enzyme sequence
MPPMELTIRGQKLCGAIKHLIITTIRHGYIMSSRKNSAIIVMISQDNFGDLFMTYNLGIDIGIASVGYAGINKDQENIIFCGSHIFEAAENPKTGASLAEPRREKRGQRRVIGRRSQRKKQIRALLTRHGLKYVELIDQSKSTALPLSPWSLRKCALERKLTDAEFARVLFHIAKHRGFQSNKKGGTDKNDTEGQKVLTGAVELEEKWLVSGEKSVAAYLSTQAKQRNGDGDYTNSIKRDLVREEVKQIFIAQKKFGNIKSTPELLKEYAGNGNKEERNTREGDGIAFFQRPLQSSEHLVGECTFESGEKRAPKHSYTAELFVLWTKFNNTRIKDTKGNERALTQDEKNKLSELAHKNKGGVTYKQARKELGLCDDERFNISYRKIKEEDNSWSKIRDTSEKRYFLKLTGYHALKEALHTGSDFDWQKWIGSRIDNLDDIARILSFYEDKKQVDEMLSKHGLSEEQKEKLCNIKSFSKSVDLSLKALRQIAPLMQTGVRDDEACKEVYGDHRAQKENKGLVLIPPFEDIRNPVVNRALAQTRKVINACIRKHLKEYGMPETIIVEMAREVGKNFKDRKEAEREQLKNEAYRNEARQHASEILGIIEDNVTGTDILKYRLWKEQDGFCPYSGIYMSPEVMQDGSATQIDHLIPRSRSFNNSYMNKVLCISDENQNKENETPVEYFTRIGRKISSLESFSKTLPHKKAENLLIENYDARKSDEWKSRALNDTRYIARLLKSHLEENLNVKIQVRNGALTANLRGQWGFGKKTRSNDRHHALDAIVIACSTQSMVQKLSSWDKYDARRKKPSERPLPPKPWNTFRDDAINAVNNIFVSRMPVRKITGSAHQDTIRSIREIDGQTKIIQRIKLKSLTLAKLEDMVDKERNFKLYNVLKQRLEEHGGKADKAFATPIYMPINDPTKTAPRINSVNIITKEKTGIIINEGLASNGDMARVDVFKKNGKYFLVPIYVHQIRDGKGKLPNKAILANKDEKDWEEMDDKDFIFSLCKNDLVHVKSKKEEYFAYYVGTHRGTGAINTRAHDRDESFGKNGDSSMGVKTLLSFEKYSVDYFGNKHKIEKEKRLGVAQCNDSKSCEDKP

SEQ ID NO: 761 - protein, 1049 aa, unidentified
  REGION 1..1049: note = Description of Unknown: Cas Enzyme sequence
MGYILGIDIGIASIGFAGVNHDLKKILFSGVHIFEAAENPKTGASLAEPRRTARGQRRVIHRRAQRKNAIRQLLLRHGLNCLSVVDKKYEPTGKNTPPISPWDLRRTALDRKLTDEELVRILFHIGKHRGFQSNKKSQSNEGDDGKALKGAGDLEQKWIQSGEKTIGAYLSTQSKKRNGNESYDNFIKRDWLREEIKVIFEAQRKFNQIKATEVLRLEYAGTGEKAKRNTPEGDGIAFYQRPLQSSEKLIGDCTFEKGEKRAPKFSYTAELFVLWSRLNNTKIKIQNGDERFLTQDEKNKLVNLAHKNKGGVSYTQARKEIGLNESERFNISYRQLDKGDNSWEKIRNEAEKSNFLKLSGFHALHEALDTGSATDWQKWIGSDRDKLDEVAYITSFIEDGKIIREKYQKLGLNEDQIKKLCEIKNFSKTVDLSLKALRNILPELEKGLRYDEACKALNYNNQPENKGLSKVPKFEDVRNPVVNRALGQTRKVINACIREYGLPDTIVVELAREVGKNFRDRKDIEKEQKTNEARRNTAKTHIAEILGIIEDNVTGEDILKYRLWKEQDCFCPYSGAYITPEMLRDSTSVQIDHIIPYSRSWDNSYMNKVLVLTTENQKKKNDTPFEYLGKTNRWEALEVFARQLPPKKAERLLTENFDDKKAGEWKDRALNDTRYMARLLKTHLEQSLDLGKGNRVQTRNGSLTAHLRGAWGFPDKNRRNDRHHALDAIVIACSTQSMVQGLTNWNKYEARRKNPAERPLPPKPWESFREDAKESVNSIFVSRMPVRTISGAAHEDTIRSIRKSDGKIIQRIKLKDFKKDTLENMVDKARNIKLYDILKERLDAHGGDAKKAFATPVYMPVNDPSKPAPRINSVRILTNEKSGIEINHGLASNGDMVRVDVFKKDNKFWLVPIYVHHFAEDKLPNKAIMQGKDEREWEEMNDDDFMFSLYRNDLIKVTTKKETMLVYFGGLDRATGNISIKAHDRDPSFGTNGENRTGVKTAINFEKFSVNYFGRKHKIEKEKRLGVAHSDDSERGAAIPEQGTGAAAE

SEQ ID NO: 762 - protein, 1075 aa, unidentified
  REGION 1..1075: note = Description of Unknown: Cas Enzyme sequence
LKYTIGLDIGVTSVGWAVINLDKKRIENLGVRIFDAAENPKDGSSLAVPRRLARSTRRRLRRRKHRLDRLKDLFVKEGIVTEMDMRSLYEELGSTDPYALRVQALSERLSEKELIRVLLHIAKRRGFKSNRKSELQEKDMGVLLTSIEKNKKLIEEKDITPGQLLYDQEVKRNKRGEYKNTLLRSNLVDEIKLIFQRQREFENHQFTEVLEESFLSIFTSQRSFAEPGAIEKLTGTCTIEPDELRAPSGAYTSELFMVLTKANSIVVTNEKAERKLTADEILLVRDEALKKKKVTFTALRKLLKLEDVELFNFIDYNAKNKSGELFSREEAEKAPFIELKHYHKLRDAIIKDLGETRWLEILLTPSKIDDMAYALTFRKSDKDIRNYLKGHEEKREGWQKPSHILEDDIIESILKLSFSRTKNLSIKAMQKMIPYLEEGHRYDEAALRAGYHHSVRKGKEKSVILPVLEIEEIRNPVVFRALSQCRKVINSIIRLYGSPYRIHIELARDLSKSFPDRKVIERKQKENQADKERAAKHLQELYNQVPKTRDILKWRLLKEQDGKCAYSLKTIDPYRLMEDGYTEIDHVLPYSRTFDNSYFNKVLVLTDENRQKLNRTPYEYFGTDMERWNRFEAWVNTSKLPRDKKQKLLKKQLDRDQGTEMKQRALNDTRYISRFLKNYLEDNLLFAEGPEKKRVFTYKGQMTAYLRHRWGFAAKERDNDLHHALDAVLVGVMNDGMVREIERASKRNEFYRKKIDQEYVDPETGEVIEEKYMTIENTKLNEPWFDFRQEVEIRMSENPQYGLKHKQFYNYEPEEIDQIKPIFISRMPFRKITGHAHMETIRGAKYLDKNIKTFKEPLSKITLEKLEKMIGKDSDPLTYNLIKERLEKFGNKPEKAFEEPLYKLKKDGTNGPEIKSIKIGETFSAGVLVNGGAGVADNGKMIRFDLFKKDNKFYAIPVYAHHVVQGELPNKVIVPRKPSSQWKEINETFEFLFSMYKNDLIKLKLKDDKEIFGYYIMIDSSQASINIVNHLNNVEYRKGIMSCLDIEKWSVDVLGNLSRVRKEKRRELEKPRHLK

SEQ ID NO: 763 - protein, 1060 aa, unidentified
  REGION 1..1060: note = Description of Unknown: Cas Enzyme sequence
MTKHDFPYRLGLDVGSNSLGWFVVRLDGEGRPVGLGPGGVRIYPDGRDLQSKSSNAVTRRIARGARRRRDRYLKRRTNIMSLLVAHGLMPADLAERKALEALDPFELRLRALDQELPAYHVGRALFHLNQRRGFLSNRKTEKDDSESGAIKEAATRLQAAIEAAGARTLGEFLHWRHRERAPVRTRNRSTGAKAEYEFYPTRQLVEAEFNAIWEKQAQYHPAMTPAARVAIGGDRQVNSIFFQRELKQPPVGKCALDPAHDGGDAEGFRCPWAHPLAQRFRIWQEVRDLTIEHVGRKPVPISKEDGDKIALALLQNNKLSFDKIRSLLKLPSESRFKLESDKRAELKGDETAAKLSHKAMFGKAWRGVSLPRQIEIVERLLAEEDEACMVAWLSVEAGLDHMAAVRVARAFLPDGHCRLGLRAIRKLVPLMEAGNTKYQAEVAVYGKPDATGEVSPTGYLPYYGEWLPDDVLGSGDPHHPKEKRWGRFPNPTVHIGLGQLRRVANALIREYGPPAEIVVEMTRDFKLSPRQVSEVEKEQAENQRKNDARRADLAGLGQPVNARNLLKMRLWEELNPKDPLDRCCPYTGEKISIQRLLSEEVDIDHLIPFSLSWDDSAANKTVCMRYANRAKRKQTPFEVFGDSPEIDGRQYDWEQIAARAAGLPRNKRWRFRPDALKQFEAKGGFQARQLNETGWLARSAKQYLSAVTAPNKIWVLPGKLTALIRGKWGLNNLLPDHNYSDAKNRKDHRHHAIDAMVAALTDRSLLQRMASAYDEERERIEVPLPWETLRDDLDTRLKALIVSHKADHGIAAQLHEDTAYGAVKDPQREGANLVYRKDFRLLNENEVEKIRDHRLRDLVKAYVASEKAVGKDLKSALRSFAVRGDIPGVPNGIRHVRLLKPEKPEYLVSICDQAGKPYKSYSAGENAYVDIIEALDGKWWGKAITVFQANRANGAGGASSPTDPDARLVMRVCKGDLIALHRDGKRVVMRVHRLDAAANRFKLAGHNESGNLDQRHADTADPFRWLMASYSTLKTMRAERVRVDELGRVWRVQAQQPPAR

SEQ ID NO: 764 - protein, 1065 aa, unidentified
  REGION 1..1065: note = Description of Unknown: Cas Enzyme sequence
MFRLGLDIGTNSIGWWLYGISNNKPVAVVDGGVRIFADGRDAKTGASLAVDRRNARAMRRGRDRYLQRRAMLMKRLAASGLMPQDPVQAKALQLLDPFALRAQGLDYALPLDHLGRALFHIDQRRGFKSNRKTDGGDNEGGKIKDGTARLDIAMMAAGARTYGEFLHLRRAAAMDARHVPAVRTRLSLRMDEESGKSEAGYDFYPDRHHLEEEFHKVWRAQEPHHPEMNDALRDQLFETIFHQRPLKEPTVGRCLFCPEDRLPKAHPLTQQRVLYETVNHLRITANGRASRPLTREQRDQIIFALNCKEPLKSLGGTKLTLDALAKALKLKGEKFTLETTARDAIACDPVRASFAFKDRFGARWSTLDWQQQWELIQRRQNAQSDQQVQELFQWLIDTHHLSPDQARATADAPLPEGYSRLGLTATIAILDKLKSDVLTYDKAVAAIGQHHSDGRTGEVLNALPYYGKILDRHVIPGSQDPSHDDITCYGRITNPTVHIGLNQLRRLINLIIEVHGRPDEIVVELARELKQSADQKAEAERTIKKNTDAAIRRGVNLGELGQPDNGANRAILRIWEEMNPDAMKRFCPYTGKLISAGMLFTGECDIDHILPYSRTLDDSGSNKTLCLKEANRAKRNKSPSEAAHGGMRIWALEAENLKHLPANKAWRFAPDAMTKFEGERDFLDRALVDTQYLSRIAREYLDKLYDGSDGKSHVWVVPGRLTEMLRRHWGLNSLLHDDQRDVTKAKNRMDHRHHALDAAVIGATDRSLIKQMAEQSQIDAGRGLDDLASRVQPPFDGFRDAVKAQINSITVSHRADHGRIDASARAKGADSTTGQLHNDTAYGLTGQSLNGVPLVVTRKPFDGLTPAMIEKLRDIPLAEALRLATKGKEGKDFQTALRQFAARPGPYQGIRRVRIIEPVDVIEIKDRSGVAYKGYKGDSNQCYEIWQMPDGAYKQVVISTFDAHKKMDHRPHPAAKRLLRLHKNDMVRLEDSKFGPTCVTVEKFSVNGQVSMVAHNQGNADQRYRRDKEDIYIRMQAASLIKSGARRVIVDEMGRIKDPGPPKTA

SEQ ID NO: 765 - protein, 1058 aa, unidentified
  REGION 1..1058: note = Description of Unknown: Cas Enzyme sequence
MLRLGLDIGTNSIGWWLYEIAHGQPVAVIDGGARIFSDGRDAKTGASLAVDRRNARAMRRGRDRYLHRRAMLMKRLAASGLMPHDPEQAKALTQLDPFALRAKGLDHALPLDHLGRALFHIDQRRGFKSNRKTDAGDNEGGKIKDGTARLDMAMMAAGARTYGEFLHKRRAAADDPRQTPAVRTRLTLRPDAESGKSEPGYDFYPDRRHLEEEFHKLWLAQERHHPELIDALRDQLFETIFYQRPLKEPKVGRCLFHPEDRLPKAHPLTQHRVLYETVNNLKITANGRASRPLTLEQRDQILFALNGKEPLKSPGGTKLSLDALAKVLKLKGEKFTLETAARDAIACDPVRASFAFKDRFGVRWSTLTWEQQWDLIQRRQDAQSDQQVQDLIQWLIDTHHLTTDQAKETANAPLPEGYSRLGLTATLAILDALKSDVLTYDKAVAAIGRHHSADRTGEVLNTLPYYGKVLDRHVIPGTQDPAHDDITCYGRITNPTVHIGLNQLRRLINKIIEVHGKPYEIVVELARELKQSADQKAEAERVIKKNTDAAIRRGANLSELGQPDNGANRALMRVWEEMNPDPMKRFCPYTGTLISPSMLFTGACDIDHILPYSRTLDDSGSNKSLCLKEANRAKRNKSPSEAAQDGLWIWALEADNIKHLPANKAWRFAPDAMAKFEGERDFLARALVDTQYLSRIAREYLDKLYDGSDGKSHVWVVPGRLTEMLRRHWGLNSLLHDDQRDVSKAKNRMDHRHHALDAAVIGATDRSLIKRMADQSQIDAGGGLDDLASKVQPPFEGFRDAIKARINAMTVSHRADHGRMDGKSTTGQLHNDTAYGLTGLSQNDVPLVVTRKPFDSLTPAIIDKLRDAALAEALRLATKGKDGKDYQTALRNFKSRLGPYQGIRRVRIIEPVDVIEIKDRNGVAYKGYKGDSNQCYEIWRMPDGAYKHVVISTFDAHKEIDHRPHPAAKRVLRLHKNDMVRLEDSKFGPTCVTVEKFNVNGQVSMVAHNQGNADQRYRKDKEDIYIRMQPASLIKSGARRVIVDEMGRIKDPGSPKTA

SEQ ID NO: 766 - protein, 1071 aa, unidentified
  REGION 1..1071: note = Description of Unknown: Cas Enzyme sequence
MSELDYRIGLDIGTNSIGWGVIELFWNKDRERYEKVRIVDKGVRMFDKAEIPKTGASLAEPRRIARSSRRRLNRKSQRKKEIRNLLVQHGIITQEELDLLYPLSKKSMDIWDIRLDGLDRLLNHLEWARLLIHLAQRRGFKSNRKSELKDAETGKVLSSIQVNEKRLSLYRTVGEMWMKDAEFSKYDRRRNSPNEYVFSVSRAELEKEIFTLFEAQRKFQSSYASKNLQETYLQIWAHQLPFASGNAILNKVGYCSLLKGKERRIPKATYTFQYFSALDQVNRTRLGPDFQPFTQQQKEIILDKMFQRTDYYKKKTIPEVSYYDIRKWLELDETIQFKGLNYDPNEELKKIEKKPFINLKAFYEIKKVVANYAERTNEAFSTLDYDAIAYALTVYKTDKDIRSYLKKSNNLSKRCYDDQLIEELFTLSYTKFGHLSFKAINHVLPIMQEGRTYQEAIHQLGYDTTNLKKENRSMFLPLIPDEITNPIVKRALTQARKVVNAIIRRYGSPHSVHIELARELSKNHDERTKILSAHDENYKKNKGAISILIENGILNPTGYDIVRYKLWKEQGERCAYSLKEIPPDTFFNELKKERNSSPILEVDHILPYSQSFIDSYHNKVLVYSDENRNKGNRIPYTYFLETNKDWEAFERYVRSNKLFSKKKREYLLKKAYLSRESELIKERHLNDTRYASTFLKNFIEQNLQFKEVEVNLRKKRVQTVNGVITAHFRKRWGLEKNRQETYLHHAMDAIIVACTDHHMVTRVTEYYQIKENNKSVKKPYFPMPWEGFRDELLSHLASQPIAKKISEELKAGYQSSDYIFVSRMPKRSVTGAAHNRTIMRKGGIDKKGKTIIIERLQLKDIKFDENGDFKMVGKEQEMATYEAIKQRYLEHGKNSKKAFETPLYKPSKKGTGNLIKRVKVEGQTKAFVREVNGGVAQNGDLVRVDLFEKDDKYYMVPIYVPDTVCSELPKKVVKSGKGYEQWLTLDNSFTFKFSLYPYDLVRLEKGDEDRFLYFGTLDIDSDRLNFKDVNKPSKQNEYRYSLKTIENLEKYEVGVLGNLRLVRKETRRKFH

SEQ ID NO: 767 - protein, 1110 aa, unidentified
  REGION 1..1110: note = Description of Unknown: Cas Enzyme sequence
MRKAVRWRFGGDLGANSLGWAAIELNDEIVPRPIGILAAGSRIFSDGRDPKSGASLAVDRRDARSMRRRRDRFKQRQRALLKYLIADGLFPAEEAERKALAALDPYELRAQALGEEALPLHHLGRALFHLNQRRGFKSNRKADRKDDKENGLIAVGVERLRDAMAVDGADTYGQWLHMRRQRATDANAIPSVRARMRPASDEGEKSDGYDFYPARALLEEEFDAIWEAQAPHYPKALTGDVRDRLFEIIFHQRPLKAPKIGKCTLIESEERLPKMHPLFQRRRLLEEVNALMLVRPGQKAQRLTPEERDILVLKLKDKAKVSFESLRKTLKTDLDARFNKESENRPHLIGDEVAATMGAKTRFGNRWVHLSIDEQWDIIRRLSKVESDQDHRAFLDWLIATYGLEEEQARAVANAHLPQGFGRFGLTATTKLIEALQQGVTPQGRTEQASPIEPGRVIVYSEAVAHAGLGHHSDMRTGEIFTDKNGLPQLPYYGVALERHIMPGTGISSDPEEMRIGRLTNPTVHIGLNQLRRIMNRLIRTYGPPAEIAIELARELKQSEDQKKEANRRNNENRIAAEKRATKLEELGIQNNGANRALLKLWEELDENAMGRQCVYSGQVISPSMLFDGRAEVDHILPFSATLDDSNANKIICVREANREKGNNSPYQVWGHLPRWEEIAARAARLPKNKRWRFEPDAMEKFSADSGFLDRHLVDTQYLGRLAYEYLASLYPERGEGSRPIWVSPGRLTEMARRKLGLNDLLPDHNFGGGAAQPKNRLDHRHHAIDAVVIAIVDRSLLQQIARVSGDMGTDGRERITIPEPWENFREDLRKAVNAIVVSHRADHGTAAKSGLPKGQDQTAGRLHNDTAYGLTGETDAKGNSIVVRRTPLSALKKLADIDQIRDPGLKAALYRQVEGLEGKAFEKAITDFPKRDWHPYQGIRRVRRIEPLSVIPIRDQSGRAYKGYKGDSNYRYDVWELPDGKWVSEVVSMFDAHKPDWTSRIRAECPIARKVLSLQQYDTVMVSPREGETQLLRVVKFGQDGRLYLAAPYEAGALKARDTDKDDPFRYMSLFPAKQKQWQTRKVRLDELGRVLDPGFPARTARRKTRAPA

SEQ ID NO: 768 - protein, 1074 aa, unidentified
  REGION 1..1074: note = Description of Unknown: Cas Enzyme sequence
MKHPYGIGLDIGIASVGWAVVALNENAEPYGLIRCGSRIFDKAEQPQKGDSLAAPRREARSARRRLRRRSLRKADLYELMEKNGLPGKAEIEQAVQAGHLPDVYALRVQALDGPVTALDFARILLHLMQRRGFRSNRKADDAQKDGKLLQAIDANTRRMEANRYRTVGEMMYRDPVFAEHKRNKAENYLSTVKRDQIIDEARLVFAAQRQYGATWASPEMEAEYLCILTRQRSFAEGPGKGSPYSGSNRVGTCTLEGKSEQRAAKAAFSFEYFTLLQKINHIRIAENGTSRTLTPAERQVLLSVCCQTDKLDFARVRKALALPEEARFNMVRYRGEQTAEACEKKEKITALPCYHKMRKALNTLRKDHIRNISREQLDAAGAALTNPENEDKLREALKQAEFEPLEIEALLTLPSFAGYGHISVKACRKLIPYLEQGMNYNDACQAAGYDFQGRQNGEKAQFLPASTEEMEDITSPVVRRAVAQTIKVVNAIIREQGESPVSIHLELAREMNKNFQQRSELDKAMRDNSAENERLMKELNELFPGRIVTGQDLVKYRLWKEQDGRCAYSIQPLELDKVITVSGYAEVDHIIPYSISFDDRRTNKVLVLASENRQKGNRLPLQYLQGKRRDDFIVYTKANVKNFRKRQNLLKERLSEEDGKGFIQRNLQDTQYIAAFMLNYIRNHLAFANCSGAGKRRVVAVNGAVTAFLRKRWGLSKVRADGDLHHAVDAAVIACTTQGMIKRVSDFCKRAETTAVRNEHFPEPWPHFRDELRQRLSACPQEDLMKINPVYYATVDISSIQPVFVSRMPRHKVTGAAHKETIKSRLDDAHTVQRRSITDLKLDKEGKIAGYFNPSSDTLLYNALKEQLTAFGGDGKKAFAEPFFKPRADGTPGAQVRKVKVYDKATSMVAVHEGKGVADNDTMVRIDVYFVPGDGYYWVPIYVADTVKLKLPNKAVVQGKSYAEWKEMDEENFLFSLCQNDLIRIESKRTMKFKVQNSDSTLEKEVQMNCGLTYFEGGNISTGAITVTTHDNAYIVGSLGFKTLQKVQKYQVDVLGNYTPVKKEKRQTFPAQRR

SEQ ID NO: 769 - protein, 1074 aa, unidentified
  REGION 1..1074: note = Description of Unknown: Cas Enzyme sequence
MKHPYGIGLDIGIASVGWAVVALNENAEPYGLIRCGSRIFDKAEEPQKGDSLAAPRRKARSARRRLRRRSLRKADLYELMEKNGLPGKAEIEQAVQAGHLPDVYALRVQALDGPVTALDFARILLHLMQRRGFRSNRKADDAQKDGKLLQAIDANTRRMEANRYRTVGEMMYRDPVFAEHKRNKAENYLSTVKRDQIIDEARLVFAAQRQYGATWASPEMEAEYLCILTRQRSFAEGPGKGSPYSGSNRVGTCTLEGKSEQRAAKAAFSFEYFTLLQKINHIRIAENGTSRTLTPAERQVLLSVCCQTDKLDFARVRKALALPEEARFNMVRYRGEQTAEACEKKEKITALPCYHKMRKALNTLRKDHIRNISREQLDAAGTALTNPENEDKLREALKQAEFEPLEIEALLTLPSFAGYGHISVKACRKLIPYLEQGMNYNDACQAAGYDFQGSQNGEKAQFLPASTEEMEDITSPVVRRAVAQTIKVVNAIIREQGESPVSIHLELAREMNKNFQQRSELDKAMRDNSAENEKLMQELHAKFSGRKISGQDLVKYRLWKEQNERCAYSLEKLDLTRVITEPGYAEVDHIVPYSISFDDRRTNKVLVLASENRQKGNRLPLQYLQGKRRDDFIVYTKANVKNFRKRQNLLKERLSEEDGKGYIQRNLQDTQYIAAFMLNYIRNHLAFADCSGAGKRRVVAVNGAVTAFLRKRWGLGKVRADGDLHHAADAAVIACTTQGMIKRVSDFCKRAETTAVRNEHFPEPWPHFRDELTQRLSACPQENLMQINPVYYATVDISSIQPVFVSRMPRHKVTGAAHEETIRSQVNEKYTAVRKSITELSLDKDGKIKDYFKPSSDTLLYEALKKRLTEFGGNAKKAFAEPFYKPRADGTPGAQVRKVKVVAKMNNTIPVRSGGGVAKGGDMIRIDVYYVPGDGYYWVPIYVADTVKETLPNKAVVRDKTMEEWKEMKEDDFLFSLYSNDLILVERDKPICFSLMHKDSTLPKKYETKKELVYYKYGNISNAAIKVETHNGAYVFEGMTFGTVRKIQKYQVDILGNYVPVKKEKRQTFPAQRR

SEQ ID NO: 770 - protein, 1168 aa, unidentified
  REGION 1..1168: note = Description of Unknown: Cas Enzyme sequence
MKGCVLGIDVGVASVGAALIEVDDVKGTLHYRGIIDGVSHIFPAADGAAERRLQRSIRKRYQRQTHRLKDLRGSLSRLFSVPPGFDDVLPDAGQAYIAACKAAGEPAILSANSRFRLRAFGLEQQLTPGDLARTILHVAKNRGMRLTRVLENGKDDKGEKQARAEASGMAQEAEETRSLMVDSKATTPGSFLWQREQDATKGNQRPALRNRKGRDGGFLFTRQQVEAEFDMLLAKQAEFYPDILTVDVMEALRTQVFWEKDAPEPEIGPCLYFPDREKRLPEASDLFQCKRIYEQVNSLLVKFSNESKERLTPDQRDLLIAELMTGEDLGGTKIKKILKLEKGLTLSLDAGYGKRKEAVKIKGHRLAYEFAKVPELQAVYADLPPERRESLVELLRKERDREIVVRSLCDDFGLSHMAAGYAVEEVILPAGYAATGPTATRLLFETLRDEVMEDGQNAGRVMFPYDAEQWLDQKQGFQKAGAQVVAASRLPYYGRVFPHLVRGRMKPEDRGYPAATNEEKFGRIPNPVVHVALNRIRKVVNTLLARHEKTHGLPLRVHVELAREMSMSEEERDAYARQTAKQHKQNSEDDRVIVKNGGIAGRKARRMLRLAREQGWKCPYSLKQIDASRLFKDFDLDHILPRSQTLDDSLGNLVVAWRDANRVKGQKHPHKAFGDGKDYKREDGVLISHEQMIENIRNTKGMAHKAWRFGPDAMERYADDNDFTERFLNDTRYIAKWVAQYLQCITRPDSRRKTKPVVALNGRVVGDLRYGWGLKDMVEQIALDQEPDGYKADAKQGTGKKNRDDHRHHLLDAIVAALTPPRLVQILKNEAKRQAEANNGRIRQLTPPPPWEHFAQDIRLFLAESRANHKPDRNINAGLHEATCLGVVARLGDGSYLVRNRKRLVPGMVVDPKKLEDAICLPERYINALAKGLKEGSAHVFWPSRDPVGDLKRIATDLKEVHQAIMALYEQQPETETVMRDTGEPDASTQTRVIKPEERLGRAIACYVDQTGRRTVRVYGMSQAVIIAENDNGVPSRSYRAGNNAWLDLYRGADGKTAYEIVRNIDAMKPGFTPQWQEDPENTALLRLYQGDTVELTDKEGQRRICVFRENSDGDWSFQPVNLAVNVRDTPLRSRLRFSFNRLLQADPRLIVVDAAGQVVWRSPKRNW

SEQ ID NO: 771 - protein, 1073 aa, unidentified
  REGION 1..1073: note = Description of Unknown: Cas Enzyme sequence
MRVLGLDGGIASIGWSVIDINDDDASGGTIVAAGTWMFDAPEDKGQAGTKLRSEERRKFRGQRRVIRRRRQRMAALRALFAEAGLLASADRDALHAPGIDPWRLRTAGLVRALSPIELALALGHIARHRGFKSNAKGAAKNEADDKKKMLKASAETKEKLARFETPARMLMEDAGFVIRETIKRDGTPDIVRRLRNREGDYSRSLLRDDLQAEARSIFRAQRRLGQTLASESLEAAFVKLAFSQRPLRDSEAMIGTCAFETSEKRSARRGYSFELFRLLARLTSLSIIEGRNSRRLTAEEIGKAIADFGVTATITFASLRKKLAIAATESFDGIKQDEETKRDVVSRSGEAATGTARLRRLISAAHGEMTWRSLVARPEVLDRIADVISFRDDLGRIGEGLAQTGLDPGIQTTLRAAAADGGLDIFTRAGHISAKAARAIIPGLIQGMTYDKACTAAGYDHTVSRERHAFDVGVTGKEALARILKQERISRGLVGSPVARKALIEAVKQVKAIVEEFGMPDRIHVELARDVGKSIEEREEIARGIEKRNKQRDKLRGLFAEKVGRPPQDGARGAEELLRFELWEQQNGFCLYTDEYISPGQLVASDNSVQVDHILPWSRFGDDSFHNKTLCTAKANQDKKGRTPFEWFDEDKTETDWDKFAARVRGIPYMKGMKRRNYMLKNAPELEERFRTRNLNDTRWTCRLLAEALRQALPDTTDVAGKRRRRVFVRPGALTDRLRRAWGLQWLKKDVDGKRRPDDRHHALDAIIVAATTESLLNRATREVQDLEHKGLHYDLTKNIAPPWNNFREQALSAVESVFVARAERRRARGKAHDATIRQFRERDGELVVFERRKISDLKIGDLERIKDKERNEKLVVNLGAWIDAGKPADRPPLSPKGDRITKVRLISKTKVNVVLYRGGPLAPPGTVDRGEMARVDVFRKAKPSGQFQYFLVPIYPHEVATLERPPERAVAAYKPESEWPIMDCSFEFMWSLVPMSLVRAVSAQGEIFEGYYRGTDRATGAILVSQPSDSTDVTKGIGARTLAEFKKFTVDRLGRVFEVGQEIRTWHGEACI

SEQ ID NO: 772 - protein, 944 aa, unidentified
  REGION 1..944: note = Description of Unknown: Cas Enzyme sequence
MAAIRRVLVAHRLLRSPAEDALALRLDPWGLRAEALRRPLAAEEFASVLGHIAKHRGFRSNAKQAPSTNDADETSVMKKAIESTRERLAQYTTVGEMFALDPAFSDRKRNRGGGFARSILRDDQAFEVAQIFKAQRRLGSTLATEALEAEFANHAFSQRPLQDSHHLVGFCPFISTERRAARRSPGFELFRLYGRLAAMRLATRGGERPLSPAEITRVAENFGVQKKLTYAWLRKRLDLDDTVSFADVPRADESKRDFVARAGAAAEGTFALRDAVGEAGWRSLQGRGAVLDELAAILTFRSDLGSIRAGIEALPIEKLVAAALVDASNAGKFSSFAGAGHISAAAARALVPHLAAGLNYADSCREAGFDHSAPIQVDLKDIRNPVARKAVSELIKQVKAIVHEYGMPDRIHVELARDLGKSAEERDEITKGIEKKNRERDKLRERFAELIGRLPSSREEMLRFELWHEQNGRCLYTDTEIRPDQLVATDNSVQVDHILPWSRFGDDSFTNKTICLAGANAEKRDRTPYEWFVADKTPAELARFERCVDACHAMKRYKKRGHYLRRNAAEVEERFRARNLGDTRYATRVVLDLLARLYPEDGKKHVLARPGALTAKLRRGWGLEGLKKDPSGQRRQDDRHHALDAMVVAACSEPMLQHLTRAFQQAEMRGAARDFSTLEQPWEGFRSAAEEAFSQIFVARAERHRARGEAHAATIRQVRERDGKLVVFERKSVEALTLKDLERVKDAARNAATIAALRTWIEAKKPKDALPRSPKGDVIRKVRLQSNDKPAVLIRDGSADRGDMARVDVFRRDDAKGRARFYLVPIYPHEVATLGRPPQRAVDAYKDEEEWTVVSSDFLFVFSLYGNSFAEIMKTDGDIVSGYFKGLHRGTGAISLADPANVAPPKTGLGARTLVSLRKFQVDRLGRRFEVRSETRTWHGVACT

SEQ ID NO: 773 - protein, 1083 aa, unidentified
  REGION 1..1083: note = Description of Unknown: Cas Enzyme sequence
MHRFAFDLGTNSLGWAVYALDKDTQPTALERIGARIFPNGRDPQSKESNAAGRRMPRGARRRQDRSLGRRKRLLDDLIGFGLLPSDADARSAVLVANPIEARARAARAEVALEQLGRALWHMSKHRGFKSNRRADKDADEKGKIATASTALLERLRADGHPTYGAFLHARLARGEGTRIRPTGDGAKLSYEFYPTRAVLEAEFDHIWATQAGFHPSLTEAMRERLRDTIFFQRPLRPVRPGKCTFFPDQDRLPRWHPAAQEFLILSQLNHLRIVDDDGEQPLDITARDLVARTLMGGTKLSWPGLKRTLKLPSQAVFNLEKGGLKELARNDVAARLLGDTKKPGPLAELWPSIDASAREDVLSRMAEVADPEELVAWLMTRHGLSREVAERVEKIPLPDGHLRFCKQATQAIVEELRGDVIPYDEAVRRAPLLGGAGLDHSDFQAEEGVDTLPPYNRLPVLQRMIGNGTGNPNDPDLLRYGRITNPTVHIALGQFRRVMNALIAEYGKPAQVVIEATRDMAKSAEELNKIEKTIRDNEKRNDRWRAEIQQAGLLEEGARIGDRFLRMRLWEEMGNGPADRLCPYTGRPIALHQLHSDEIEIDHILAFEETFDDSPANKTLCFREANRRKGRLSPAEAADQQPDVFDLAAIIGRTKHLPANKAWRFLPGAMQKWEETRGFEDRQLNATGYLARVVRTYAEALFPKTDDEGKRRSHVWVLPGRMTAMLRQRWGLNLGDHNRKSRDDHRHHAIDAAVVGVIDRRMIQVLQTHARNMGVERLDRVLPAPPEPFLGFRDAVLAAVEKVNVSHRAQHGSINPNDPSQTSGRLHEDTVFGLVRDVPENQADLTIGNVVVRKPVSGLSEKEIGQVRDVKLRLSLEEATRAARDKSLPEAERKKRLPEALAKWVRETGHRKLRILKPEAGVRPVRDRDGKPYKWLVPGEISWLDILEAPDGTWFQHATDIWAANSGGAEPWNSAHPGARFIMRVHKNDTIQAFDWDDKNKCVVEGSNQIKRIVRLSPSNSVIYLVGINDAGDYQKRHNDADDPFRWDFANIGKLKLRRARRVRIDELGRVHTIPHGTDQMTG

SEQ ID NO: 774 - protein, 1070 aa, unidentified
  REGION 1..1070: note = Description of Unknown: Cas Enzyme sequence
MKRFAFDIGSGSLGWAVFHVDNAGRSPTELIDLGVRIFPTGRDPQSSESNAMGRRQPRQQRRQIDRRKKRRVELEERLQAHGLMPAAGEVDGRAVFFSIDPYCARDRAAGGRAELQDLGRAIWHMSKHRGFKSNRKADRTNEDDTGKIADAAKALREKLANAGAPTYGSWLAGRHAQGEPVRIRPVGEGAKTSYDFYPTRAMLEAEFDHIWRLQSKHHPSLTEEAREKIRDTLFFQRPLRPVKPGRCTFFPSDERLPKWHPLAQEFLILQQLNMLRFLDERGERPLDKDTRDLVMNHLMAGEKLTWARLRRTLKIPAGTEINLEKGGLKEIAHNATASRLAGTAKKPGPLSDLWPHWKEEARNMLLSVLDTAASPEEAIDRLTGEFDLPRDIAERVEKIALPSGHLMLGLRATRVIVQAMRDEVVVYSDAIERASGRGLFGDGVVVHHSDLRPQGDPGLPRLPRYYELPALQRMIGAGTGNPDDPPEVRFGRIANPTVHIALGQFRRVMNALIDRYGKPDQVAIETTRDMAKSARELNEIDAEIRKNTKRNDAWREELEESGILSPGARAGDRLMRMRLWEELGRTPADRLCPYSGVPISLTQLHSDAVEIDHILPFEDTFDDSSTNKTVCFRAANRIKGKRAPGDAWSGEELEAIIERVKGAPGMARKLWRFLPGALEKWQAQRGFEDRQLHATGYLAKVVRAYAEALFPKDGTSNIWMPTGRMTAMLRKRWGLHLPDHNSKTRNDHRHHTLDAAVVGVIDRRTIQILQTHARRIGAKELDRLLPDPPEPFAGYRDQVLERVAKINVSHRPDHTSGGKLHEDTAYGLVQDLPENRAARTIGNLVVRKPVTAMTAKEIGQVRDQKLREELLAATEGVRSDKKKLAEALKSWSERTGHLRLRILVEDKSARPVRAHAGKPHVGKPYKWMIPNEIAYIDVLEDIGGRWLHHATDIWTPQDAEPEDWRKVHPEATFVMRLFKNDTVQVFELDNEGSPIPGSNMVKRVVRMEPSANRVRLASCRDAGNLDQRHKDEDDPFRWDLATISKLKARRARRVRIDELGRVRIVPHGMI

SEQ ID NO: 775 - protein, 1079 aa, unidentified
  REGION 1..1079: note = Description of Unknown: Cas Enzyme sequence
MYRFAFDLGTNSLGCAVYRLTDDMRPASLERLGVKIFPNGRDPQSKESNAAGRRMPRGARRRHDRSLGRRRRLLDDLIGFGLLPSDADARSAVFVANPIEARARAAREQVALEQLGRALWHMSKHRGFKSNRRADKDADEKGKIAIASAALQERLRADGHPTYGVFLHARLARGEGTRIRPTGDGAKLSYEFYPTRALLEAEFDHIWAIQAGFHPSLTEAMRERLRDTIFFQRPLRPVRPGKCTFFPDQDRLPRWHPAAQEFLILSQLNHLRIVDDHGEQPLDITARDLVARTLMAGTKLSWSGLKKTLKLPSQAEFNLEKGGLKELARNDVAARLLGDTKKPGPLATIWPTLDNATREEILWQISEVADPEELICWLMERLGLSREVAERVEKIPLPDGHLRFCKTATQAIVEELRSDVIPYDEAVRRAPLLGGAGLDHSDFQAEEGVDTLPPYNRLPVLQRMIGNGTGDPNDPDLLRYGRITNPTVHIALGQFRRVMNALIAEYGKPAQVAIEATRDMAKSAEELNKIEKTIRDNEKRNDRWRAELQQAGLLTEGARIGDRFLRMRLWEEMGKGPSDRLCPYTGRPIALYQLHSDEIEIDHILPFEETFDDSPANKTLCFRDANRRKGKLSPSEAADQQPDFFDLAAIIGRTKHLPANKSWRFLPGAMQKWEETRGFEDRQLNATGYLARVVRAYAEALFPKIDDEGKRRSHVWVLPGRMTAMLRHRWGLNLGDHNRKSRNDHRHHAIDAAVVGVIDRRMVQVLQTHARNMGVERLDRVLPAPPEPFDGFRDAVMSAVEKVNVSHRAQHGSIDPSDPSQTSGRLHEDTVFGLVRDVPENQADRTIGNVVVRKPVAGLTEKEIGQVRDVKLRLSLEEATRSARDKSLPEAERKKRLPEALAKWVQETGHRKLRILKPEAGVRPVLDSNGKPYKWLVPGEISWLDILEAPDGTWFQHATDIWAANSGGAAPWNSAYPGARFVMRVHKNDTIQLFDWDDKNKCVFEGSNQIKRIVRLSPSNSVIYLVGINDAGDYQKRHIDDDDPFRWDFANIGKLRLRRARRVRIDELGRVHTIPHGTN

SEQ ID NO: 776 - protein, 1083 aa, unidentified
  REGION 1..1083: note = Description of Unknown: Cas Enzyme sequence
MHRFAFDLGTNSLGWAVYRLTDDLRPASLERTGVRIFPNGRDPQSKESNAAGRRMPRGARRRQDRSLGRRKRLLDDLIGFSLLPSEADARSAVFFANPIEARARAAREQVALEQLGRALWHMSKHRGFKSNRRADKDADEKGKIAIASAALLESLKAEGHPTYGAFLHARLARGEGTRIRPTGDGAKLSYEFYPTRAHLEAEFDHIWAIQAGFHPTLTEAMRERLRDTIFFQRPLRPVRPGKCTFFPDQDRLQRWHPAAQEFLILSQLNHLRIVDDHGEQPMDITTRDLVARTLMAGTKLSWSGLKKTLKLPSQVEFNLEKGGLKELARNDVAARLLGDTKKPGPLATIWPTLDNATQEEILWQISEVADPEELICWLMERLGLSREVAERVEKIPLPDGHLRFCKTATQAIVEELRSDVIPYDEAVRRAPLLGGAGLDHSDFQAEEGVDTLPPYNRLPVLQRMIGNGTGDSHDPDLLRYGRITNPTVHIALGQFRRVMNALISEYGKPAQVVIEATRDMAKSAEELNKIEKTIRDNEKRNDRWRAELQQAGLLAEGARIGDRFLRMRLWEEMGKGPADRLCPYTGRPIALHQLHSDEIEIDHILSFDDTFDDSPANKTLCFREANRRKGKLSPSEAADQQPDFFDLAAIVGRTKHLPANKAWRFLPGAMQKWEATRGFEDRQLNATGYLARVVRAYAEALFPKTDEEGKRRSHVWVLPGRMTAMLRHRWGLNLGDHNRKSRNDHRHHAIDAAVVGVIDRRMVQVLQTHARNMGVERLDRVLPAPPEPFEGFRDAVLAAVEKVNVSHRAQHGSIDPNDPSQTSGRLHEDTVFGLVRDVPENQADRTIGNVVVRKPVAGLTEKEIGQVREVKLRLSLEEATRSARDKSLPEAERKKRLPEALAKWVQDTGHRKLRILKPEAGVRPVHDRDGKPYKWLVPGEISWLDILEAPDGTWFQHATDIWAANSGGAAPWNSAHPGARFIMRVHKNDTIQVFDWDEKNKCVVEGSNRIKRIVRMEPSANRVRLVGINEAGVFDDRHKDADDPFRWDLANIGKLKQRRARRVRIDELGRVHTIPHGTVQKVG

SEQ ID NO: 777 - protein, 1532 aa, unidentified
  REGION 1..1532: note = Description of Unknown: Cas Enzyme sequence
MKKILGLDLGTNSIGWALVSANEDKQPKTIEGIGSRIIPMSQDVLGKFDSGTSVSQTAERTGYRGMRRLRERNLLRRERLHRVLNILDFLPEHYKKSIGWDKDNYKTFGKFIDDTEPKIPWKKNGNGDYEFIFQSSFNEMLNEFSLHHAGILTNNKKIPYDWVIYFLRKKALSDKISKEELAWIILNFNQKRGYYQLRGEDEESGNKKEYVVQLLVNEIIEREVDKKNPKRKWYDVKLENGWTYSSTFFTKPEWAGLSKEFLVTEEVDENNEVAKTKDGTPKRKLSILPTFDEIDLMSQADKDKIYKKIKAKTEATISNSGKTVGCYIYDSLLANPSQKIRGKLIRTIERKFYKDELKAILEKQKEFHSELKNTKLYSDCLNELYPSNKAYVNTISSRNFTYLFVDDIIFYQRPLKSKKSLISDCPYEERVYLDKEGNTQKSSLKCIAKSHPLFQEFRLWQFIGNLRIYEKEKNINGVLKNDVDVTPEFLKDEDDYVALFDWLNNKKEIKQDTLLKYPAFGLKKDAVKYRWNYVEDKPYPCNETRALIMSRLEKLSIASDFLTKEIELMLWHILYSVEDKHEIEKALRTFSKKNGLDEGFVDLFKRFPNFKKEYGAYSAKAIKKLLPLMRKGKYWDEQAIDEKTKTRINRIIDGEFDEKISSRVRDNAISLTDINSFRGLPVWLSCYIVYNRHSEVKDIAKWEKPEDIDNYLKLFKQHSLRNPIVEQVITETLRVVRDIWVKFETIDEIHIELGREMKNPADKRKQMTQQMSDNENSNLRIKRLLMEFINPEFEIENVRPYSPSQQEILRIYEDGVLSSVAEIPSDVDAIIKKFKESEAKKQPTRSEILRYKLWLEQKYRSPYTGEMIPLSKLFTAAYEIEHIIPQSRYFDNSLSNKVICEAVVNANPYKDRELGYEFIKNNENRIVPELSTPTKTVRIFTAQEYEQFVKDNYSKNPAKKRKLLMDDIPDDFIQRQLNDTRYISKVIKGLLSNIVREKVDGEYEQEAISKNVITCTGGVTDRLKRDWGLNDVWNNIVYHRFERLNELTKSNQFGEWDNKDGKRVFQTNVPIEFQKGFSKKRIDHRHHALDALVIACANRNIVNYLNNESASKKSKISRYNLQVLVCNKTKTDDRGNYRWVVKKPWETLTQDSQKALEGIIVSFKQNLRVINKTTNRYQHFENGKKIVSNQVKGDSWAIRKPMHKDTVFGRVNLRKIKQVNLKTAIETPERIVDKNLKKKIKELISVGYDEKKILKYFKDNVKQWPDIDFKKIGIYFFTDETKEPLAATRKVVDKSFTIKKIEEGVTDTGIQKILLNHLEYKGGDAELAFSPEGLEEMNKNIAELNNGKPHKPIVKVRVYEPMGNKFNVGVQGSKTKKFVEAAKGTNLFFAIYQTNEGKRTYETIPLNVVIERQKQGLIPVPEVNENGDKLLFWLSPNDLVYVPIAEKTGDYSFIGDVDDFNNIYKIVSFTGNRLYAIPYCVANVIVDKLEYTLLNKVEFTDNKESIKGSCIPIKIDRLGSITSVGNSKVALQ

SEQ ID NO: 778 - protein, 1037 aa, unidentified
  REGION 1..1037: note = Description of Unknown: Cas Enzyme sequence
MSYILGLDLGTNSIGWACIDEENQIIIDTGVRIFQEGVNHNTQGKEVSKNEDRRLARQSRRQYERKRQRKEILKSLLKEHGMFPSDPMDEIEFFNLNKKENNEQEIREPKFPPYALRKKGLDEKLSKLEFGRCLYHMNQRRGFKSSRKSGDSTDDGKVATATTDLQKQIEDNKCRTLGEYFASLDPMDQRIRGRYTLRKMYELEFDLLWEKQREYYPEYTDELKNEIRDRVIFYQRPLKAVHHLIGKCSLEPAKKRCPKDAFEAQTFRILEQVNRLEFTDEDGVVYKLCRSPIDKFAEGQTPSLEDFEAFDEDAAKKREALITALSAKKEMKFEDIKKCLGFTPKTQCNLEKGGLKKLLGDRTQSSYRSLFKKQWDKFSQEERDKIHKTVSQARDTEWLEEHARKKWGLDEKTAKKLSKTGFEPGYMHFSRKAIKNLLPFLRAGLTVPHARMAAGYKEARSHQNIEEQMEKLRNPIVSKTLYELMRLVHKIEQAHGKPGQTRIELLRALKSSAKNREETHFKNLENKKANDEAKEEVIKKGYKPTHETVLKYKLWKECKEQCPYTGKMISQTDLFENNKYQIEHIIPYSRSLDDSFANKTLCEAEENKRKGNHTPYEFYNGTDQYDAILKRIKVLPFNKQRKFRQKEISKDFVARQLNDSSYISVEAKNLLTQLGHKATVAKGQATSELRHQWGLNSLLTGGGDLKNRDDHRHHALDAVVVALTTQGILNNLSKLNKYKKSNSDKSANTENASPAGWKNFREILKPFIENMLVSHCINKRARGSLHEETLYGDLQMKDDKGAPLYAIRKPLTGLDASSKIEKIADPIVKQIIIDHLRASGVDVDKKKYKIPGSVFKDVQLFMRSTKGLKIPIKKVRLHQPANNMILLPKRNRTGVEPGGNHHVVIYRYKDEKGKAKQGGEICTRFEAVRRKVKKEPIIKRELEEGKEFICSLAINEMVLLGMKEDQIDWENPDRSKLKDNLYRVQKISNDITFRHHLYSILKNDNGIEVGRAIKQPSGFKGIKVRIDRLGRIHKAHD

SEQ ID NO: 779 - protein, 1048 aa, unidentified
  REGION 1..1048: note = Description of Unknown: Cas Enzyme sequence
MSLNYTLGIDLGASSIGWALVREKALPTSNENIVAGVRVFPAGTDSEKDVEKSKCIDRRVARGMRRQHQRKTQRRNRVTLVLVNAGLWPRNTQKQKELLLHPVMPDGTRDIYAVYNLRARALDETLTPYEIGRALIHLSQRRGFKSNRKIDNTDEKETGKVKEGIGRIRAAMEETSSRTLGEFFAKHIGVADIAARRGNYTDRKMIEDEFNQIWDAQAPHHPEIMTDKNREQIHEAIFFQRPFDKDSEDKIGHCVYIPEEKRARLGHRLVQRYRIWQEIANLRYNANDGQGEQSLSTENRRKIFEALDQVTKITFVKIKKIVGLPEDSVFNLETKGKRKELKGNESEAKLSRLFPEWDKLDEDERNARCEAILSLSDEELAAKARKEWGADDDKVAEILKVVLTAKTGSVSLAAVKRLLPHFEAGLDLTGALEKEGLGQSHIELEEGCNQLPLPDMDKLMITNPVVRTSLFQVRKIVNAIIAKYGKPKRIVVEFARDTKGSIEERNEKHTENRRLEKENESIRKRLIDEYKIVDPHKTDIVKYKLWKECDGICPYCGKELSPQEVFHTGEAQIEHIIPYSISFNDSYANKTLACHKCNLEKSARIPYQVWGQDEKRFGEIIGRVKLFQSEFRWTKVNKFEKKEIDETKAPERLLNDTRYMCRVVREFLQQLYSGTGSQRDQFVRVCTGSLTAKLRHQWGLNKILDVENNFKNRDDHRHHAVDAIVIALTNQNMVENLARWSQQRERRESPIFDAPKPFRAESRDPEQETQEFLRQAQQAIDKINVSHKPTRRVRGQLHNETHYGKIDENTYVVRKPLSALTANDAKSIRDPQIRELILNCLKQHGVDVNTKKSPENKVVQNALNAQPIYMTADGKPNGKAPQIKKVRVTVPLSKAIEFKNSDGEVYTYCDPDNNHHMEVFEFIDEKGKLKREARVVTLFEARRRVNAGESVVSRVHPTRPEAKLYTWFCKNDIVEVQDKDGSMKLCRIQKLSGSSEFSSKFNVYFRLHTAATIDDNGSLVHIQSCSPDKLVMKKKTVSPLGELSDDNG

SEQ ID NO: 780 - protein, 1012 aa, unidentified
  REGION 1..1012: note = Description of Unknown: Cas Enzyme sequence
MKDAEIFVSTNAQSDVNAAFLKGLVFGFDVGTASIGYAVRRGREFLDVGVIICPEETADLKGRRGLRRQRRTLRSKKHRRQWLTQELAKLGLTRPSANLHDPVILRARAVSGIALTPEELHATITHLWRRRGYLERVPWSSRNEGGDRKKEEGVVREGISKLRAEMQAEGCAHPCHFLIRHPQDQRRRIWPRDLLEAEFRAIVAAQRDRYPKLGEKADWLLYGDTRPVKGEHVYFKSTDGRNPGVLGLRWPRFDNRGPALDSWQPLDAHGRPLHVIRKNKAAFAKAQWELALMNFRVLDTHTRQKHDPRIDFPDFIVALRKEWDKKGKVTEARLKTLVAPYSERFLLIEDQKPLTPDGGSGRARYSTQTLELLRKEIGSGRRVDPPQPALQRRGESWERALDRYIAEVKHPLVRHRLVLFRRLLNRLIAKHGAPDLIVVEAVRSLALSQKNKNELNKRNEEFRKDRENARNILKDAGQSVSANAIQKYRLWQEAKGRCPFCLEAISQTALFSGEADIEHLVPRARVDCNEIYNLTVGHIHCNRNAKGDRTPFDAFSHSAKWEKMKDNAAECFKGKKLEIFRSPNAEELIEQKTELVQTSYIAKVLRHLCLLRLGWLGDDGRDPTDIKKAPSQRFQVTNGQVTSRLRQSWGLNEVLYPRPSEGNEEAWKQFTEKNRGDLRHHALDAMVVCCTLPWLAHLTHGARDEFGNFGWWRQDEKGRSIASNPIGLDYERAKAVIETVVVKHHVSRSNHQQAYATTLYAKKGENTYVARELFTTLTPKNLASIYPKDFSAYCEAAWECYRTGSTGIDAELKKTKGSLPEGFTSKLCFAHFQQWRANGAPEFAWPKEVKIPIRSVRLISVKDDSAVMPFSKGTHAYVKRTGFKEVRIHLTADGKDFVPVFVPFWKGDAPFHSSPAPLSPKFVGVVRKGQVVRLRKALAAGTQPGAFRVLVLGQNQVNILPHHTANKEEARLAMGLPKTGIKPYWPEFIRALGYELPHPPSAQSESAGATEA

SEQ ID NO: 781 - protein, 1092 aa, unidentified
  REGION 1..1092: note = Description of Unknown: Cas Enzyme sequence
MASQPVSSVPHDTEAYTLGLDIGMASVGAALLGRDRIVGLHVRCFDKAEVAKTGESLNAQRRAARSTRRRLRRRRYRLLRLARLLKHHGLIATADPEAFVVTRPSPWELRARGLDQVLAPDQWATAIYHLCKHRGFQSTRKTEISEDKEATAMLEAIQSNRASLGKYRTPGEMAVKDESFADAKRNKSGAYLRTFLRADLEAELRLLFDRQRTFGNQHAGPELESEVHRWLMARRPALSGQALAKLVGRCTLEPAEPRAPKHGYRAERFVWLSLLNNLRLVRRGKTRALAEDERKALMELPFKQAKLTYAQVRKALDLHEDDRFNRLSYGGAEGKDPEASTCYEAKGYHRIRKAFDQAEAEGIWTEVRGNADLLDQLADILTYEKSDKDIMARLAPLDLPARLSDALLGVNFDKFIQLSNKALRQLLPHLEEGLRYDEAAVAAGYHHSTPSPSSVRSRFLPAPDRDEIRNPVVYRALNQARKLVNAIVRAYGPPAAVHIELARDLSRPYDERQKIVREQRKFQTAKEQAVTQFSQELGIAPRRDGLQRFQLYREQGGQCTYSGKALDLHRLMEDGYVEVDHILPFSRSLDDSKANRVLVLTEENRKKGNRTPYEYLNGAGDSPEWRAFAARVKANKAIRAAKRDRLLRIHFGKDEAGEFKERNLNDTRFICRAFKTMVERHLAFHPEAQGQERCVIVAGQMTSLLRARWGLIKARENGDLHHALDAAVVAACSRAFVKRMATHSKAGELKYSRKDGQIVDLETGEILNPAELLPEERFPRPWPHFREELLGRLDRFPVEALAAVPGYGPDLLAVIKAVRVSRAVKRRGTGQAHQETIRSKGRGNRLLAEGRSAIKKPLTAIDARALKQMVGYDDPRNQVMVDALEARLAAFGGDPAKAFAEPFRKPSKAGKQAPIIRTLNVLEVQKSGIEVRGGVANNGDMLRLDIFQKAGKFYAVPIYVHDRARGVLPNRASVAFKPESEWAVMDDSFEFLFTLQANDWVRVVKRDNQTAAGYFGGFDRANATITIGVHDRFPNRETDHKGKIHAIYADLPLEGLWRGVGIKTAATFEKFEVDVLGNLHRSRVGGTRPGLG

SEQ ID NO: 782 - protein, 995 aa, unidentified
  REGION 1..995: note = Description of Unknown: Cas Enzyme sequence
VIIRILGVDLGISSFGWAIIEYDTEKDTYRIIDCGVRLFTAAENPKNHKSLNEERRKARGTRKLIKRKKLRMNQIKDLCVSYDLISPDDLNIEEGIFNSKSNRTDVWKLRHDAIFRSLTPNELARVMIHIAKHRGFKFVVDTEDNKETGAIKIASKKLNDAFEKSGCLTIGEFLWAEAPENGQKRNKSVYNEKTKQGDPTYDFSIHRDLFQYEIETIFSKQQSFGNSFASDQLLNDWKKIALFVRNMKSVESLVGYCTFFPRHEIKRISGEKRAPKASPTAERFIALGKFFNTIVIDENNNEKKLVELKSIDALMDFAQSKDAIKFKQLRKFLKLNDSSTFKSVKDEGTIWIKLSGNDLLKKTLSPEMYKNFIDNVDIADEVIKVLSYYKATTQKEEQLKTLLENVSWIDAETIQQLSKLSFTAFTNLSIKALKILNKIMADGYLRYDEAVKYAFEEGLFPPKENDKKILLPALKETNIAVLNPTVLRAFGEFRKVANALVKKYGSFDKVHFELARNVNTQSEIKEINKGIAKNTKERAAANEWMSTNFPGIPTTAKNILKKRLFDQQNGICPYTSERIELKDLFNDGMFEVDHILPRSRSADDSQSNKVLCLRQANQEKANRTPFEWFGHDIERWTRFEENMRSSSNIAKMGMGKVNRLTKKNFDKNSETEFSSRNLNDTRYMSKAIKSYCEDYWLLAQDDDKLRIQVRSGKLTSTLRYQWGLDNKNRDVNTHHAEDAIIIALSTQGMVQKLSEFYKFQELNTGIKNPVFKAPMENFREIVEAAIALERTETIVSKAGDLVELNRIIISKPPRAGVTGEAHAATYYSPITKTVKKPDGSLTLLSDNEYRRSILTGSGLGKIGSMVRRDVFYVNGKLEIVPIYVHDLASKKPLPNKTLDGRELESNAQFYCSLHNNDLIKVTLKGIEYFGYLKYIESKGRLHMESIDGSQIFMLSLLKASIKKYNVDLLGYYHEVKGEKRRGTIHDQAKERVSCK

SEQ ID NO: 783 - protein, 1060 aa, unidentified
  REGION 1..1060: note = Description of Unknown: Cas Enzyme sequence
MSATGKRDLILSFDVGHSSIGWNVLKETAAGPEEVALGTVIFEADGCLASKRRTYRRMRRTIRSRRQRVEAIEKLFVQQGILSRSQIDAKHKAGGGNSAPWLLAAAVLSSKGKFALKEDELFDIIRWYAHNRGYDGNRRWATNAGDEEGDSKREEAARALMDQHGTSTMAETVCAQLGLQPGGQKKSTDKLRYKNFGAAFPRKTVVSEVRQILGAHVGKLKGLTLEFVEALCGDLKNDWQIIPIPEFEKQKTYQGGLLFGQKVPRFDNRILSFCPVTDTPTPLKSAKEFMEYRCAMFLSNVRVGAVGDSMMRPLSKDELAVLWEKIHSHGYLTEDQFKKTIRGFDGVTQDNLDALMTIEDTAKNLVVDPPLKLLSSNTVLKATVSLLPAEAVEALLSMLWKKNSVTLAEILTNIPESDREATVDAAFKKDKSALKKYGTKERWLESKAYHAEFDSGRAPYARSVMSNVVEEILAGRDPRAKGGCLYLTDEMLQRQENRSIDELTNNHLVRHRLLILQRLFKDMLDEFCDGDRKQVQTVVVEVNREVSQMSGKTNKQIAQEEGLKRADHKKASKIMEEAVKESGENIRVSAGLIRKARIAQDLGWTCPYTGEKFGPMELIYGQVDLDHIIPRSERLSDSMAGLVVTFSEVNRWKGKRSAFQFITEEQSKPVQGRANLSIQPLSSYKDFVSGLKTFGGHASDEGRRKSRKAYLMLPSYEDKEFTPRDLTISSYVAKMAVQQLKKEFKQVSRPPQVISLPGRLTGEARKAWKLTGLLKAVNAEIKDETTKDEIRGLTHLHHALDAAVMGLMAHCAGNLSDGTTWQLLLKRSLLPHEKNLLKSNMRNIGFDGSRAHLLDVPDNLKEQLRKRLLERRVVQHVPASMEGMRVEDNTRGVVSFDEESGKVTLCKKGEKPTCEMPGKLVGYNVADSKLKRQKGVRVIEENFGVALTVPPQVIRWHKVYPQLHAMQEASSGKWPKVWRKGDVLCIPHEQGNELRRIAGIDENTRDGIIIKLRTLDGMERPSESRVSSLLRAKAFCLKGKYTGDVLCRTTSSTLEAQPSA

SEQ ID NO: 784 - protein, 1058 aa, unidentified
  REGION 1..1058: note = Description of Unknown: Cas Enzyme sequence
MQYTLGLDIGIASIGWCVIDEREKTRIVDLGVRTFPVAEHPKDGSSLALPRRIARGIRRRLRRRGERLQNIRQLLIDYELASSHDSLNNTLADSSATNPYELRAAGLDRLLTPEEWCRVLLHIAKRRGFKSNRKSGAEGTDNAKKEGALLQSVTDNKKRLADYRTVGEMMYKDPYFENHKRNKGGDYSSTVARDMLLDEIKQLFETQRCCGNNHTFEELEQKYAEFFSFQLPVASGDDILKMTGNCTLLPEYKRAPAMGWSGEYFKLLSRVATLRLLSEGKDSALDIEQRRKVVNLALKNKVTYVQIRKALEIDDGITFKGLRYGRGKNEAENDAEKATFVELKGYHSLRKAVEKTLGKEAWQTLADVPSHMDAIGKALTFYKSDDEIRGFLSEAGLDGKIIEAVLPVSFRGVMQLSIEAVQRLIPYMEKGDGYDKACEQAGFSHYDPKGTVERVSKLPPLKEEDDAIRSPVVIRALSQTRKVVNALIDKHGAPTWVNIELARDLSRPFSERKEIQKEQEENRKDREKSKSLAEEISGNPNPSIHDILKHRLWREQNCQCAYSQKPIEARRLFEPGYAEVDHALPYSRSMDNSYNNKVLVLSSENQNKKNNTPYEYLSPYPGRWETFQGWVRANIRNAAKRSKLLREEFNERDSGEMIDRNLTDTRYITRFAADWIRRRLKFADDTIKSPVLCVNGRMTAYLRRRWGLEKNRSDGDSHHALDAAVAAAATKNMVDRISAYSKRKELYQNHRPEEGEREHFPEPWPSFRNELLARLSPDFLNSIEEGKIALPNYTEEEKAKLRSIFVSRAPRRKAKGAAHQETIRSYKDRGGEEREKWSKGTVLRTSITALDLKNLENMVGKERDIRLYEALKEQLKAFDGKGDKAFAEPFYKPTRDGNRGPLVRTVKLYSVGASGIPVRGGLASNGEMVRVDVYAKGGKFFLVPHYVDDIAKKRVRKKAIMANKSEEDWTSIDESFEFRFSLFKDDLVSVEAKDKKYFGYYAGTHRGTGAIEIVAHDGREEWAGIGVKTCQVFEKYHVDVLGNYYKIEREKPPVGKVD

SEQ ID NO: 785 - protein, 1080 aa, unidentified
  REGION 1..1080: note = Description of Unknown: Cas Enzyme sequence
MTYRFAFDIGTNSLGWAIFELGDRTSPEGVVEREVPIALKDLGVRLYGDGREPKSQESLASLRRIPRGARRRRDRFLQRRRYLFSLLTNYGLLPPEGKRGELFSQNPYPLRARGVTEELTLHEFGRALVHINQRRGFKSNRKAPAGDDEESGKIAIGGATLSTRLKEEGFETIGQFYASRQSARSPRDREPVRVHLRGNGANSTYDFYPLRQMFEHEFDVLWKMQASFHKELDNQQRDRIRDAIFFQRPLKPVEPGRCTFFPDQPRLSDAMPSAQAFRIYQMVNNIRLVDGRSERRLGKAERDSVVSELLAGRKLTWTQFRKLLDLPKGQQINLELGGEKHLLPDRVAFSMIGATDRNPGPLRDSWHEMTERERVVIIDKLRNAEEDEEVIAWAMAELSLDEIRSTQLARIRLPDTYRRLSAKAIDMIVDQLESDVITYAEAVNRCGFSHSDMRGDTQYKRLPYYNRLPELQRSLGKSSGNPEDPPDVRFGRIANPTVHIGLNQLRRVCNALIDRYGAPAQIVVEIARDLKQSKDQKKKTADLNRNNRDANDRRREKLTELGIVTEGERRIGEALMRMRLWEELGEDPKRCPYTGKTIPLSKLFDSEIEIEHILPFSRTLDDSPSNKTVAYREANRLKRNLSPSEAANRFPDSFDQQKILDRVRLCGMPKNKQWRFEADAMDRFENEEEFMARQLAETQYLSRMASGYLECLFPPAEQDGSRRKYVWVVPGRLTSLLRRRFGIGFNSNGRKNRDDHRHHALDAAVIGIMDRSLIQRLTRTAAKAEDEGLDRVLAELSEPFEGYRSSIMDRAEDIYVDSRARHFDVDPDPKRTTGKLHEETYYGIVQDLPENAEVLKLGNVVRRKPVTSLSVPEISLVRDGALRKQLQKAVEIDPQTRKSKLTKKEHEAALVQWSERTGVKRVRVLKKEATLLQIANRGSGIPYKAVVPSENAYLDVFENDQGRWVCHTVDSMTANAPTGVRMNDCPGRFVMRLHKGDFVQLFDSEGIVNEVKRVHRLNPSAKRVFLAGHLEGGELQKRHDSDEDLFRWDLASMERLRQRRARRVRFTPTGRMKTIPHGRV

SEQ ID NO: 786 - protein, 1079 aa, unidentified
  REGION 1..1079: note = Description of Unknown: Cas Enzyme sequence
LELRFAFDLGTNSIGWAVYQLGERTNSLGQKETDVPVQLVDLGANLFSDGRAPNTGESLAALRRVPRGARRRRDRYLQRRKHVLNLLQQHQFLPTDENELARILRADPYPIRATAAEREVSLYELGRALFHLSQRRGFKSNRKAPAGDEETSGKIATAAQNLQERLHKNGYLTLGQFLAARQSNPNARLRQTTRVRLSGAGVQSNYEFYPLREMVEAEFNVLWNTQSAFHAALTDEVQDVLRHAIFFQRPLAPVEPGRCTFFPDELRLSDATEAAQEFRIYQMVNNLRIIYQRSERCLSLEERDRIADVLVAGETLTWTKVRKLLGIDSSHLLNLQEGGEKELKGNRVANLMQGTKKKPGPFRDEWHTLSEIERREVIACLKEADNDEEVVAWAQTHLCCDEDKARLLAAVRLPDDYRRLSEKAVDMILDRLKTEVITYAEAVEQCGLHHSDLGGGEHYQRLPPYNKIPSLQRFLGRSTGDPDDPPDLRFGRIANPTVHIGLNQLRRTCNALIDRYGTPSQIVVELARELKQSEKQKKVTQNRIKENREKNDERRERLVELKQIEPDQKRIGETLLRLQLWDELGDLPRLCPYTGQPISITSLFSSNIEIEHILPFSRTLDNSPANKTVAFRKANRLKANLSPSEAATRHPDVIDRKAMQDRVRLSGMPANKRWRFEDDAMERYENEEQFLARQLNETQYLSRLARAFLSTLFASKDETGHGRQNVWVVPGRMTSLLRNRYAVNLGTSNRKSRDDHRHHAIDAAVIGVLDRSLIQRIASISAKREADGVDRLLADLEPPYPAFREQILNRVNTIHVSNRARHLNESPDSHHTSGKLHEETYYGIVKDLPENEEALSLGNVVRRKSVVSLTVPEISQIRDGKLRGELQKVAEIDPETRKTELTKKAVEQKLVVWSEQRGIYRIRVMKKKSTVIPIASRKTGEPYKAVVPDENAYFDIYKDNAGKWYGIAVNSFHANQKGVDSELTEGVFIMRVYKGDYLQLRDLETGFNAIKRVTQIKAASNLLVLVGANEAGNIQQRHDDDDDELRKDFANIAKLKSRAARRVRFTNAGRMKTVPHGKI

SEQ ID NO: 787 - protein, 1064 aa, unidentified
  REGION 1..1064: note = Description of Unknown: Cas Enzyme sequence
MTKALSRPYRLGIDVGSNSLGWFVVWLDDKGEAVGLGPGGVRIYPDGRDPKSKESNAADRRVARGMRRRRDRYLQRRGKLMGLLVKHGLMPADEPARKALEKLDPYELRAKALDDALPAFHIGRALFHLNQRRGFLSNRKTEKGDNESGAIKLAAAKLAEKKKDAGSRTLGEWLAGRHRSREPVRTRNIGTGTKVEYGFYPTRQLLLDEFDAIWNRQAPQHPQMTAEARAAIHDAIFSQRKLKQPPVGKCSLSPAKDNDDVEGFRCPWAHPLAQHFRIWQEVRNLAVVETGKAPAPLSKEDQDKVAMALIQLQKEKLSFDKIRGLLKLSPEARFNLESEKREYLLGDQTAAKLGGKSFFHKSWFGFPLDRQIEVVTHLLNEPDPEALTAWLMANTAVDEDVADRVASANLPDSHCRLGLRAIRKILPLMKIGMNYPDAATAVFGDHAKLPDGVLSPDGRLPYYGEWLPDDVVGTGDPDDSAEKRWGRFPNPTVHIGLGQLRRVVNALIADYGAPAQIAVEMTRGFRLSPRKLAELEKEQADNQRKNERRDEQIRGLGQAVNARNRLKLRLWEEQNQYDPMDRRCPYTGEVISIARLLSEEVDIDHIIPFADSWDDNAANKVVCMHYANKAKGKHTPFEAFGKNSTIDGHRYDWETISLRAAALPRGKRWRFDPNARNHFDRQNGFQARQLNETGWLARVALHYLAAVTDPRKIHVLPGKLTAMIRGKWGLNTLLPDHNFSDAKNRKDHRHHAIDALVAALTDRKLLHRMSSAYDEERQRIEIPLPWPSLRDDLDAKLKAMTVSHKADHGGGGKTSTSGALHEDTAYGVVKHPEKEGGANLVYRKGFRDLNDKEILRIRDIRLRELVVAHVESEKTAGKDLKAALQSFTERDIPGIVQPVRHVRLTKSEKPEYLVAIRDKAGRPYKAYSAGENAFLDIFETIDGTWSGEAVSVFQANQGAYRPRWRDGDARFVMRVFKGDMLRLDHDGRSKIVRVVRLEPSQKRLRLVEHNEAGTFEERHNDPADPFRWIFGTYERLKEGNAARIRTDELGRPWRVKPDEAARTL

SEQ ID NO: 788 - protein, 1051 aa, unidentified
  REGION 1..1051: note = Description of Unknown: Cas Enzyme sequence
MSEIGKPPYRLGLDVGSNSLGWFMVWLDGEGRPSALGPGGVRIYPDGRDPKSKTSNAVDRRTARGARRRRDRYLKRRAKLMALLVAHGLMPEEEARKALETLDPYELRAQALDAALPPHHVGRALFHLNQRRGFLSNRKTEKKDAEAGVIREAAGRLQALMQSASARTLGEFLHRRHRLREGVRARNRSTGATAEYDFYPTRQMALDEFNAIWDAQAPHHPSMTTQARTAIGHAIFDQRPLKQPPVGKCSLDPADGIEDAEGFRCAWAHPLAQRFRIWQEVRNLAIAETGKRPRPLNKEDGDKIALALFQNGKLSFDKTRSLLKLPAEARFNLESEKRQELVGDETAAKLSGKLFFGKAWRSLPLPRQIEIVMRLLDDEDEARLIRWLTAETDLEPETASRVASALLPDGHCRLGLRAIRKILPFMESGMIYPDAAKAAGYDHAQLPTGELSPTGYLPYYGEWLQDDVLGSGDPHDVNDKRWGRFPNPTVHIGLGQLRRIVNALIREHGAPAQIVVEMTRAFKLSPEQLAKVEKEQAENQRKNDARREELRKLGQADNARNLMKMRLWEELNLGDPLDRRCPFSGEIINIARLLSDEVEIEHLIPFQDSWDDSAANKVVCLRAANRLKGKQTPFEAFGSGPQWNDISLRANGLPKNKRWRFQPDARQRFDAMDGFEARQLNETGWLARVAKHYLAAVTDPYKIHVLPGKLTAMIRAKWGLNTLLPDHNYSDAKNRKDHRHHAIDAMVAAFTDRSLLHRMSSAYDEERDKIEVPPPWTSLRDDLDARLKAMWVSHKPDHGIAAQLHEDTAYGSVAEPETEGGNLVYRKAFTMLNEREIERIRDARLRDLVKAHVVGERAAGKDLKAALQSFAARTDIPGLPTGVRHVRLIKAERPEYLVSLRNKSGKPYKSYSSGKNAFVEIFETADGQWRGEAVTIFKANQEGGKPRWRAEYPGARLVMRVFKGDMIRVDHEGKEKVVTVERLEPSANRLRLAEGHEAGSLQNRHEDGADPFRWIFGYYANLREWKAERVRVDEVGLLWRVRPEEPARRSP

SEQ ID NO: 789 - protein, 1072 aa, unidentified
  REGION 1..1072: note = Description of Unknown: Cas Enzyme sequence
VWKLGLDLGTNSIGWCAFTFSEGHDPDWSDWRLADAGVRIIPDGREPAADGRVGESLAVNRRQARGMRRNRDHGNNRIKALAKALIDYGLLPVESSQRSALLTESPYQLRALAVTTGHPLTVHQLGRALLHLGVRRGFLSNRKTDKADDDATVFKQKISQLHRALQYRVLTSADLDAIPEDTPPAQTPWTLGEFLWQREQAGLMIRFRGEQGDLYPDRAMYRAEFDRIRAVQAPFHPSLTAEDWGRLRDNHILFQHPLRPVKRGACSFYPQHPRTFRDTPIAQQFRISKELSILRVIMPDQSSQRLTAGQYRAIADVLERQEKATFAGIRKLKGADGTPLFPKESRFNIEDDRRKHLEGNRVATALRKSSKANILMPLWDTLPDSMLNDIFERLHNPVDNGRIMDDAALVGSLVRDFGLTNAAAHALMELPLGALTTSYSRQAMEDLLPIMATQGLDEYDAAVELLGEDEAKRRLAGFQASETLYERLPYYGEVLRGSLLGADPRKPEDSDPEGHYGKIGNPTVHIALNQVRKLVNELIDRFGEPPATIQVELSRDLKLPKVKREAISSQIAKNEKANKNRIDQWKVMTNGAEPTAADLRKIKLWEELARDEVARRCVFTGRVISAQHLVNGEVEVEHLLPRSRTLDDGMNNLTLSFRNANRLKGNRTPYEAFGHNQHAEQGIVWAEVLERAKGLPPAKAARFGASAMDDWEVGTDFIARQMTDTAFISRAARRYLTAVCEDVMPAPGRLTAMIRSQWRLNGLLSDDNQKNRNDHRHHTVDAFVIGLANRSMLQRVSSAMSHDREQVRLPDLPDPLRQALRDRLNSLAVSFKPDHGGSGAMFNETAYGFVKALDGHKPEYNLVTRKRLDALSEKELDAIRDGQWRAQVREYLEENAKKSLSDDKERQRLLAEFGQKHGVRSIRILVKNQSVEPVKSAPYKGYAKGSYACCDIWSMPEGKKGKWKTGSFRWKGKFWSYAECDNGVPPLPASGKPHPAAKFVTRLFKNDVIAVAEGERDVLYRVAAFSVTANKLDIRPILNAESHERFVSINVLKTQKLRKVSISPSGVVQVPS

SEQ ID NO: 790 - protein, 1030 aa, unidentified
  REGION 1..1030: note = Description of Unknown: Cas Enzyme sequence
MSKILGLDLGIASVGYAVVELDEEHFQHGKIIASGVRIFDIAENPKNGASLALPRREARSLRRILRRKTLRLQQIRNLFTQRHILTEKEILSLYDNPLPNVWKIRRDCLYEKQSARNVCLALLHIAKRRGFRSMRKSAEKADKETGKLLQGISQLKTLLENSKCQTIGEFLYKLPACEPKRNKEGSYAHSVARKMLEDEVHIILGKQRKFGNGIFTCDFEQDFCALAFNQNPLAPSTAGNCTFEPGEKRAAKHCYTAELFNTLCKINHIRIESNGISRALTKEERQIALDLCLEKEKNNFRQLRERLKLQEGKDFFNISYVIPSGKQKEDYDPERKTPIYSMAGYHALRKALKKHKELWERYKNNPEGILDDIAEILSTYKSDQEIEQKLQNLHLSQEAIEELKSLSFSGFMHLSLKAMKKINPFLLEGKNYNEAAASAGYDFQARAGNKGYSKLPVLSEEENFSITSPVAKRSIAQTRKVINALNRKYGPFDAVNIELAREMGRSYEDRKDILRKQKENETERDLIKEKGIDGIIPKNAADLKKLRLWKEQDGRCIYSREYIKPERILEEGYCQADHIIPYSISFDNTLSNQVLCLTKENQDKRNDIPYDYFRRIGRNWEEFISFVENALPAMRRNKKQKLLRTKLTKEDLAGFKERNLTDTRFITSFIRNYLLDNLKLTGKYKQGVFCRNGKITSDLRHVWGLSKVRGQDDKHHALDAIVLACCSNAMMQFISALYRQNRETVLLKKSEAFAKPWSTFRSDTEKALSEIFVSRPPRKKVTGALHADTYYSAKHLDKGFKTLKTDINGLTLDKLKEQRELEVKYYGAQRNKNLYDAIEQALLERAEGDETPLDVRLGKNQTPVKKIRLIIEGNKGVKVLKGHAVAENGPMPRVDVFCEEGKYYLVPIYTIDFAKGKLPLMSFPDEKQMSLNNFLFSLYKDDYIEIVNKAGEHYSGYFTQYSAQTGQIYLESHDRSAIYTVSSKPSSSKKLNKNTFVSFQKYQIDVLGGIHIVTKEKYIGIRRKRSCMGG

SEQ ID NO: 791 - protein, 1417 aa, unidentified
  REGION 1..1417: note = Description of Unknown: Cas Enzyme sequence
MNSVISLDLGGKNTGFFSFSTKNLSQIEDFQSGTIIYDESFVLSQVSRRGKRHTKRNNLRNKFVKRLFLLILQRHYGLKIDFLPDEILGLFNKRGYTYVGFELSEEEKEKLESDELREILEESFGEITQDSIERFLTDIASDEEGLKKFGSQFNDIKNDKKIQIQSLINLEDTTILAYIVTTAYNDGLENFSKKIKNSLKEKSIEKEFGKSKNETLKKFVQNLIAQDNTEFIEQLKIIQKASKEIIFEKIVRDGLDTVEKIIQNHLSEIQNGNLPRAKYFEELNCKIEQNQNIQSFFQTHHLKIQDMQNLIGNLSNYQLKELRRYFNDEAMKNGDIWNEEKLHKVTWRFIQSWHPKDKTRQKENLNNLKHGKNQDRKNIVEFLTSTNPIMTIPPYDDMNNRGAVKCQTLRLNENYLNTHLPNWKNIADKLANELQKENLDEATIRGYSQESTLLHRILDTSSQIDPYKLRNNEIDGYIDVLGKDDALSLQKFTKEYYKLIKEKVRTGIWTKDDKMLKKCEHNPPYKNNQIHNLIAGILGVKIEADKFASFEKERWNNKDIKVNRSTLSSYCKNIEELRKSHGNLFKFYIEEIFSKEDEKLTKEQIKDKKFLDLNVLEEWVNKIGEFFDIDNTKRTRFNNHFSMAQLHTIIDTKRSGFNSTCKWCSAENQWRSSTSMEINQETGEVFKNANAQRLPADTQRPFSGKIERYIDKLGYEIAKIKAKELTKIEDKNIKLQIILEQNAFEYEESIRSAKIKNANAKAKKSLEESTQKYHKSLEDKTKRIKAFSNGICPYCGEALGENGEIDHILPRSETLKKYGTVFNSEGNLLYVHQKCNQAKKETIYTLSNIKTPITKEEIEKIISPISKNSYKTFTTLTFEQQKAFKYALFLDKENEAYQKVVSWLRTDQSSRVNGTQKYLAKKIQEKLKIMLPSIDFDFDFILADAEDVSNLRKDYAIQNPLLKKPDTQPPSSHTIDAIMSFLSVYPKITKTDELPNSQRVLQWVEINNVKTKPKSKIDKDKIANLGGTTIFKDSIYQEKFAPIYKHQNKYYTGFVKAGKTLDFTNCVEIKEKDFDAIQEYLKNEKQKAKELIVYEIDKQKTLTLFHDISKGLSDELKLAQLLNKFSYNLLKTNIEETPKILKDDKKLSTKIYDKTIILPIKQEWITFDKSFKKYLEKNSIEYAEKEGKYNVGDEVLNEFCKTYFNIQNKPIRNKSRKKFSLPTVEAPSGGFRIRRKNHKGEDIYQLVGINGAKSAGFALQNGQINTSIDVPLTTLAKSKNVSFKDPEKMQLQEYVDMSAFRDISNCVNISGVKIFVAPASTNRPLIRSIISIENFIQIINNQDFNYLELNDLKFTTDESFGVIRERFDELFEGCNFAPRDKLKIIRANQNGVEVEFSNNNKTIMKHYDNGFVVKLND

SEQ ID NO: 792 - protein, 1299 aa, unidentified
  REGION 1..1299: note = Description of Unknown: Cas Enzyme sequence
MGKILGLDLGTNSIGWAIVDTEDNKSFELIDKGVHIFQEGVKIEKGIEGSKAEERTKYRSARRLKFRRKLRKINTLRELIKYDYCPKLTEQELNDWRFKKKYPKNEDFREWLLTKEDSNKNPYFFRNLAVTEKLDLSVKENRYNLGRAFYHLSQRRGFLSNRLEGTKESDGAIKKAISELTDIKGDRTLGQYFYEKYNAGEKIRNQYTHREDHYLEEFNKIFEFQQIDSAFKDALENAIFYQRPLKSQKGLIGKCPFETNKPRCSSSHPLFEEYRMLCFVNNIKIKTPTDERLRFLSKEEKEKIEPLFFRKSKEHFDFDDIAKQLAPKKQYKFYKASQKHPEDYLFNYSMKTTVSGCPVSARFESIFGEHWKELKIEHKRAKDGKISFIDIFDVWHIVLTFDNDEKLAQYATSKLGLKDDKLKEFLNLHLKQDYSSLSLKAITNVLPYLREGLIYSHAIFLANMGNAIPYDIWSKEENRKIIQTAVLKLIQTQNQEKLIIDVINGLIKRCKENGWYWSEEAKEGFRKDIMQGVVSEFGTERWSKFDEEEQNNILDNALSQFKKQIQRNNGKTGFLRVETIDERVKIFLNDNFDVNTEDLEKLYHPSAIEVFKKPIRAEDGRKYLGSPMVSSVRNPMAMRALHQLRKLINELIRQDIIDENTKINIEMSRDLKNANERKALQSWQRDRESLNKEYYARIQEHFNSSGIKRDPSETDILKYQLWEEQEHICIYTGESIGISDFLGNSPSFDIEHTIPRSLSFDNSQQNKTLCHNRFNRETKRNKIPFELTNHAQILDRIEGWKKRYEELDVKIQKLKKVTTSDKESKDRVIQNRHKTAIEYDYWRKKYERFAMKEVPSGFKNSQMVDIGIITKYSRLYVKTLFDKVYTVKGNTVADFRKLWGLQDEFVKKARVNHIHHCIDAITIACITKQNYDNLAKFYHDSEEMYLSGSGKKPHVSKPWPTFTEDVKEIENEVLVSHHTPDNLPKQSKKKLRNRGVAVRNNQGDVMYQKGDTVRGSLHKDTFYGAIQREVVNKKGEKEEKVLYVVRKPVDSLAAADIKNIVDNVVREKIEAAINEKGLKQALSEPIWMNEQKQIPIRKVRCYVPTVTNPIHLKAHRDISKHDYKQSYHVANDGNYLMAIYEGLDSKGKIKRDFEIVNNLTAGEYFKRSAQEVLKAQGINSLEGLVPESKEAKKTLLPLKYIVKTGTMVLLWEETPDEIWDLDVAKQNIRLYKIVQFDKSGRVYFRPHNEARPASDLKEVYILNVDKHCEQLRFPTSKFNALVEGYDFRLNILGQIERVE

SEQ ID NO: 793 - protein, 1064 aa, unidentified
  REGION 1..1064: note = Description of Unknown: Cas Enzyme sequence
MGYILGLDIGIASVGYAIIDENYNVLISGVRLFREGTAEENAGRRGFRSSRRSIRRSRHRLDRLTDLLSSVLNVSGNQSCTNLYEARVRGLSSKLSPDELLASIIQLAKHRGIFYLSPEDLASEAGSNQSAADIIQTNENKLKDGIYPCHAQLEKLNTTGVVRGIENKFIHKSYRSELIKLLEVQSTFYPQLKTIIDDIIRIYDSKREYYEGPGSFKSPTPYGSYQLDESGNVIKINLIDKMRGKCTYFPNELRAPKWSYSACLFNLLNDLNNLTVQGAKITESQKQELINDYVNKGKSVTLPAIAKICGVKKEDIFGFRIDKSEKPIFTKFEGYNELLKIAKSVNEVDSVEGKVQLVDDISEILTKEKNIDIRERKLVDDLKLSNSLAKEIAKSAGFTTYHSLSFKAINLILDDLLKTSKNQMELYTEAGIKPYNHNFFQGQQLSANLSEWIVSPIVKRSINETIKVFNALRRYLKVKSGNNIEFSDVVVELAREKNSQDKKDWIKKTQKANEEKHYKIMELVENRKLTSTVLERINLLLEQDFKCAYSLKPIELSDVFKPGLLEVDHIIPLSISLSDAQSNKVLVYQRENQEKGQRSPFQYFSSGKAKITFERFKEYVNKNLNFSNAKKRNLLYLGNPIENMKGFIDRNLVDTRYASREIYNLLKSFFDYHQIDTKVKVINGSATHYFRKRAHLSKNREETYAHHAQDAMIIAGFTNTQLIKFFSKIGAFSESLNNKDTIVEVDGNIINSETGEVLERELFGKPENVSNYIQFLKHIEAIEPLYSHKVDRKPNRALYDQQIKSTRSFIEDNKEVTYIITKYSDIYNTGAGNSGAKLKKRILESPEDLLMYHHDYKTFEIFQKIVEQYCEESNPFAAYKLDHGPIRKYSKKGNGPIIESVKFRDKQLGAHRINKKQQGQNKSVYLKIKSLRTDVYQDGENYLVLNVPYDMVRFISGRYIIDQDKYYKSKQAQKISDSAKFATSLYRGDYITYEENGEIMEYIFKCINNEKAHKIEISYVNRPTDKQLMKGIKTSIRNLTKYNVDVLGNKYKVTDEKLEFDVTI

SEQ ID NO: 794 - protein, 1511 aa, unidentified
  REGION 1..1511: note = Description of Unknown: Cas Enzyme sequence
MKKILGLDLGTNSIGWAIVERDENDGRILKSGSRIIPMDAATLGDFASGNTKSPTKDRTAKRSARRIRERYLLRRERLHRLLHLLGFLPKHYEEEIGWDLENDRKHYGTFLEGKEPKIAWKMKDNKRFEFVFQSSFQEMLEDFKKYHPQIISDEKKIPYDWTLYYLRQKALTQPISKEELAWIILNFNQKRGYNQLRDEILEASDGKREEYMCLTVSSVTPDEDAKGKDIWYNIRFENSDIIYRRKSKYPLNWVGKKRNIIVTTKLDEDGNPKLKKDGSIDYSVKSPNDDDWALLKIKTEQDLKASHKTVGQYIYAALLANPAEKIRGGLVRTIERDFYKDELEKILKKQSEYHAELKDRSLYEQCINELYRNNETHRSNIAKNDFTFLILEDVLFYQRPLRSKKSLIDDCPYESHQGIDKETGEICTYPLKCIAKSNPYFQEYRVWKFLSDLRIIANTKEINGHIHTDVDITNELLTDNESWSNLFAWLNDKGHITQSDLLNYLGFKNKEQSKFRWNYVADKHYPMNATRHAILNRMKEGENLSREMEQAIWHLLYSTTSKTEIDKSLSPSDNSKGIYNKLIEAGISVESIEKIKTIKLPDEGYGAYSEKAIKKLLPLMRCGKLWDEGNMHPTTIKRIKDFQKGNGVENFSERVKQLISTMNDIHLYQRLPEWLACYVVYGKHSEANEIVKWKTPEDINIYLNNFKQHSLRNPIVESVILETLRVVRDIWKRYGDIDEIHIEMGRDLKNPSDKRAQITQRVLQNENTNIRIKTLLAEFLAEEYKIENVRPHSPSQQDLLRIYEEDVLAHNEPDEEIQDIINNLSNPTKQPSRTQVLRYKCWLDQKYSSPYTGQPIPLSRLFTSDYEIEHIIPQSRYFDDSFSNKVICESEINKLKDNQLGYEFIKRHHGQTVQLASGRVVRVLEVDQYEQLVKDNFAQYKRRKLLMDDIPAEFIQRQLNDSRYISNVMKGLLSNIVRTTDEDGNLEREAISKNVITCNGSVTTRLKRDWGLGEVWNAIVLPRFQRLNEITGRDCFTALNSHGQEIPAMPLELQKGFSIKRIDHRHHALDAIVIACTTRDHVNLLNNESALPENKENKYALSHKLRHCEEILINGKKRTVYKEFLMPWNAFKSDTFNSLQEIVVSFKQNLRVLTQATNLYTKYIDGEKKQQAQHSSDHFAIRKSLHKDTVFGHVNLQRITTAKLKDAIKDVNRIVDKRLKKKIKELISKHYNEKQLLVYFKDYAYEWKGYDFNKVKVFYYTDEKEMMVATRFCNDLVSVFSGKTKKQDVEKTIEQITDTGIQRILTNYLNANLEHIEYAFSADGLEKMNENIAAYNNGKQHKPIYKVRIIETMGQKFQVGYKGNKITKYVEAAKGTNLFFAVYQNEEGNRSFSSIPLNIAIERLKQHLSPVPEQNEKGDSLLFCLSPGDLVYIPTEDDNDIINELKPNRIYKLVSCTSNEAHMVPSYIASPILQTKELGSNNKSQRSWTGEMIKEICIPLTIDRLGVIKIK

SEQ ID NO: 795 - protein, 1132 aa, unidentified
  REGION 1..1132: note = Description of Unknown: Cas Enzyme sequence
LSNTMHKETEGYTLGIDMGVASIGWGAVSVENEWIASGVRVFPPGVDNYGNTSETHLNQKRRQARCARRNHRRKAKRKKLIRRILSEMGWMPTEEKALREWEQMDVYALRAKALHKPVTLSEFGRILLHLNQRRGFLSLRKSEAAAKTGQEKQELEGMLGEISELETAIQEAECVTLGEYLHKMYEFHGIRKRLRGRHTRRQMLHKEFSLIWDKQREYHQELTDALRYGTHGKQENPVAVVKPVARNRGESLLEQFGLENLTFFQRKVYWPVSSIGRCELEPDELRAPLADRRFQRFRMLSELNNLRILDQTKVDTPVERKLTETERATALNYLSTTAKPTLKGLKKQIAKTPGSPKSNQMALNLEGGGREKISGLETEYHMRKATGATFWGTLSEEDKNRIVEILTLPEPGQSKFIQRTDAETLELLSGIPGLDGSDPETRDRLDSLLKVALPAGYGRLSINALEKLLPHMEKGFPFQGADENDSARHLAGYPRRDEAARKTFDLLPRLEALQDPNDGQYDPHFPEVNNPLVLRALHELRKVVNGVARKYGKPARIHVEMARDLKMSGKKREEYLKKIRDREKERNRAEEILRDQGVFPTRDAVNLFLLWEEQNHQCAYSHPTRTISMEQLLGGEVDIDHIYPRRTHDDSYMNKVVCFTSENRDKGDRLPSEWLRGNPEKFEALVQRSKHLPYPKRKRLLAENLPEDFAARDVVDTAYMAKVARHYLSCLVEEPHHVFCTKGRHTATLRKQFGLEDMLHPSMSGMKNRDDHRHHALDAIVTALCGPSMVQELSARVRWENLWRDYQGDENGSDLRVFKLKPVFDGLETPWEEAAFRQTVQDSLDRIWVSHRPNRKLSGPLHQEHHYGATRQPGEIVIRKRVADMTPGDVKHIRDDIVRGVVQAYLEKEKLLYPEDFNKRMYEDVENLFKTNATLSETEINQVKEDRLRKSLLKKLASKNPLKDADHGKIRLPSGIPIRKARIKRNHAAAIPLRANQDKELVIPGNTHHVVIFELPDGSHHFESVSLLETTRRIRRGDPVIRTTPPEEVGEGKYVLHLCAGDTILAGENSSQKLFVYSSMAKTTSQMRFLEHTDARDSKSRKLFSCTAGTFVKNFPNARKVVVHPNGDIRNA

SEQ ID NO: 796 - protein, 1043 aa, unidentified
  REGION 1..1043: note = Description of Unknown: Cas Enzyme sequence
MKYTLGIDMGVASIGWAVISKDDTFIDCGVRVFPAGVDNFNSSKEKHPNQDRRAARGMRRRIRRKAMRKYLLQECMQQAGMMPTDKEEVNKWYRQDVYHLRHRAIDERISLHELGRVLYHLNQRRGFLSLRKKEESKPGDNEVKGMLGAISALQDDINKSGHRTLGNFLYHLYDKNGEGIRLRNRHTRRSMIYDEFCIIWDKQSEYYPGVLTAKLRYGELGPRPNPIAVSKPIRRSKTLSFLNQFGLENISFFQRAVYWNASSIGFCELEPDENRAPIADRRFQRFRMLQEINNLRILDPSQSVVKERDLSRAEREYIIDYVSTKKEAAFVDIKKHLAKKLRDNDTLRFQFNMEKGGRAKLSAMPTDYALAAKKAYGKNWWKLDDALRNRIVEILCDPQATDDDIATSLSELKGIETERIDALLHVHLPAGYANLSTKAIEKLLPHIELGLLYHTHDPALSSLHAAGYKRRDEEINKVYDLLPAYEHNDIAHLPVINSPIVRRSLTELRKVVNAIIRKNGKPNRIHLEMARELKMGPKQRSEYNKENSTREKARNAARNEIKKLGVVPNRAAENLYLLWQEQKERCAYSCEVIGIHQLLGGEVEIDHIYPYSRSADDSVMNKVVCFRDENRSKGDQTPFEWLNKSNPDKYDKIIKQSQFLPYAKQQRIISDSIPEGFINRDLNDTAWMASAARLYLACLFDSPSKVLGTKGAHTAKLREHWQLHSLLRNDGIDLKNRDDHRHHALDAAVIALCDQATIHALSTRHRFELDLERLENGKYRFFYHNADNNPLEAPWDDFRSDLAKALDSFWVSHRPRRKISGSFHKETHYGKTRDGQLVVRKPLQSLTEKERTQIRDPEIQRIVSEHIKRGGTLGDSIVLPSGTPIRKIRILINSVSVPIRGGTTHVQSAATHHLAIFKHVDGTYHFEPVTLMEAAARIRRKEPVIQKRYTGMPEDSEFVMHLCSGDSMMAEINGIECLYIFNTMATTTRQVWFAHHCDATQGHEDPVSKKSLLKSCTPGSFAKNFPNARKVLVLPSGEIRNGG

SEQ ID NO: 797 - protein, 1143 aa, unidentified
  REGION 1..1143: note = Description of Unknown: Cas Enzyme sequence
MNSKSDYTLGIDLGIASIGWAAVSTTEQTISAGVRIFPAGTDGVGTRSESHPNQDRRTKRGARRRVYRKAKRKTLLRQILAQIGWMPNEAHELVEWQRMDVYHLRAKAISEEISLPELGRIIYHLNQRRGFLSLRKSELAASEGTEKAELEGMLGEIKSLNETIEKAGDRSLGNHLAKLREEGMHPSGKGTHTRLRGRHFDRGLIHSEFSLVWETQKKFHPAALTDSLRYGTTGKKDNPTAVTRPIPRIPVQTLLQQFGLENITFLQRSVWWPETSVGKCEHEKNQNRAPLADRRFQEFRMLSELNNLRMMDSSDPLCTEPRPLKPEERAAALTYLRITKGKTTLAGIRKAISKVPGAPLERQITFNLENNNREKISGLTTEHAMSKALGEKFWKDLPEKTKNDLVQALTLPRPENGKVTQPNDDETVTLLLAVHPLTPEQIEKILKTPFPSGYGSLSIIALEKLLPHMREGKIYQAKEADETGHTNSALHLAGYQRRDNHITRTFDTLPLIDLLTNPKQDAYYEKNFPLINNPLVLRSLHELRKVVNGIIRTHGKPTRIHLEMARSLKMNAHQREEHAKKTKANEKSRDTARATLLEYGVLPTRDALILLRLWEEQDKTCIYSGKPISITQLLSGQIEVDHIYPRGNHDDSYMNKVVSFATENATKSNRLPAVWLSGDTEKYESFVSRANKVPLPKRERLLATSVPEGFAARDLNDTAYMATAAKAYLSLIVEAPHHVFCPKGAHTAFLRKNWNLHDLLRNDGQDFKNREDHRHHALDAIVIALSTPSLIQRISKNLHYKSRWKDIRLDNGEPGRAYRLKPVMEDLTSPWENLRDSANHALEKIRVSHRANRKLSGKLHEETNYGATSKDGVVVRRKNLASLQPKEIEKIRDENIRRIVRNHIESEGALFPTDFSIKQLTDDLADLFAQHESINATIIANVGDRWLREMLSKKLNGKNPLIDAQHDRICMSSGIPIRRVRLLIPDKTARPLRKNKPWELVIPGNNHHFTIFTLGDGKCLFAPITLLDVLERKSKKLPIIDRIPPVTHPQAEFLMYLCGGDSILVDNDTEADMFVFKTISSTSNQASFIHHQDARQDNRPHPVTGRAVSIRRSAMPNTFLTNFPNPRKVEVLPHGEIREIPNS

SEQ ID NO: 798 - protein, 1230 aa, unidentified
  REGION 1..1230: note = Description of Unknown: Cas Enzyme sequence
MTESTMDYTLGLDMGVASLGWATLDFDNGFIDSGVRIFPAGIDKFVTGKDTHLNQERRKARTARRRGHRKSKRKQLIRQLLADLGWIPENVTEWEQLDVYALRAKALREPVTLTEFGRIILHLNQRRGFLSLRKSEVDAVEGDDKKKLEGMLGQMDNLQDHIAKAFSDPSQRTLGNYLHHLREADGGEHGNLIRLRNRHIRRDMLHHEFSLIWAKQSRHHPELTNSLRYGTHGPRKNPTAVTRPVQRNQSESLLEQFGLENLTFFQRRVYWPTSSIGKCELEEDQLRAPIADRRFQEFRMLSELNNLRLFDHSAAGKPSERKLTEAERSVSLTYLSSTQKPTLKGLKSKISKLPDSPSVSQITFNLEQDQRDNIGGLATELKLAKALGKSEWANLSDDRKNEVVEILTMPEPGASIVIQRTDDETKALLKEIPGLTEPQIESLLRVSLPSGYCNFSIVALEKLLVHIRKGFVYQGKDDKDSALHLAGYKRRDEFSSRTLKKLPLLSELTNPKSEFHDRHFPHVNNPLVLRSLHELRKVVNGVISKHGLPARIHLEMARDLKMSAKQREDHARKNNEHKKAREIAATKLDENGIAPNRDAILLYRLWEEQNERCIYSGKTISFHQLVSGEVDIDHIYPRRANDDSYMNKVVCFAEENRQKGDRLPSEWLGESSEKFDTMAQRAQTLPYGKRKRLLAEKLPEGFAARDATDTAYMTKVARHYLTYLVAEPHQVFCTKGRHTAFLRKQWGLNSLLRHDLLDLKNREDHRHHALDAIVIAACGQSVVQKISEELTFQNKWKEKICDDGVNRRIYRLKPVADAISPPWDSFGHDAEASLGSIWVSHRPNRKVSGPLHEETNYGSTDRQGILVRRKRISTLTDAEVNKIRDREVATAVTQYIEREKRLYRSDIGGKQYQDELDKLFSGLENLVQSDIDHIEDRKLRSALTAKLKKKNPLWDAELGKIMLPSGIPIKKARLVIANKAAVVLRERQPKELIIPGNTHHLAIFSLGDGKYHFEPVTLLIVAQRMAENRRRKRSNLPQLPLIDETPPSEHPGSEFLMHLSYNDAIWCRIDEVPQLFIFKGVHSTQLTAKFVHHLDGRKNNEKDPTTGKAVSIQRTCKPNTFEKNFPDAVKVDVLPNGELRGGGKDATNELAEEGTTLSKFESPASREKGTKAKQDSLFHRRGRWGGSASLICHFVFSLLTLFDRDQAHSGDFSASRSPLSTEGATHHSSR

SEQ ID NO: 799 - protein, 1037 aa, unidentified
  REGION 1..1037: note = Description of Unknown: Cas Enzyme sequence
MALIFAFDIGTTSIGSAVINHDPGRKIGKILRLGVRIFPETREPKTNAPLNQQRRAKRMMRRQLRRRRARRRTLNEALSSAGLLPAFGTSQWDRLMRLDPYDLRSRGLTEALEPEEFGRAIYHLAQRRHFRGRDIESESEDDNADSEELAARAEAKDMLATLRQSGMTLGQWLNQIESGKRKRGIHAARSTVEDEFERLWAAQEAHNDKLKDPEFQSSIRKIIFYQRPVFWRQNTLGSCPLIPGAELCPKGSWLSMQRRMLEKLNNLELVGAGARKLDPEERMAILESLQSQASMSWAGVRKALSSIYRNRNLTGEEKRLKFNLEIGGEKGLIGNPLEQRIAAIVGKSWSAHPHKQKIREALHERLWKADYRKIGTQRVVIQPQKKRRLDRLNAAESIVKEFELPGDLIQPISEISFPSGWEPYSIDALLRIIPELENGTRFGELLVGPELEDWRTKTFPDRIRPTGQISDRLPSPSDPDENRRLRSIRNPTVVRCQNELRKVVNNLIDVYGKPDIIRVELARDVGRSKRDREEFQRVIRQRETERKAAIRDLETNGIVQPSRSDIEKWLLWKESGQICPYTGDAIGFDDLFRTGRFEVEHIWPRSRCLDDSFANKTLCRSDINKEKGNRTPYEHLGSNTDQWHRMQDRLKGMVRKGKKPGMAFSKTKRFLAKEIPDDFTHRMLNDTSYAARESVNMLKQLWPQGGANMPVTVQVVSGRVTAQLRRLWGLNNLLHDGAEKTRADHRHHAVDALVVASCNPGITQSLSRYWKLRESPSAETHPIPLPWPEIRQDATQALDKVIVSHRVSRKLSGPLHEETHFGDTGLEAVRRGTIYRQYVRRKPLHELSPKELDCIRDPAVQSIVRKWVNARGGDPKKAFSDGYPKLGTNGPEIKKVRLVVEKRPELTIHTGSGVVDKGKNHHLAVYRNEEGKLLFRIVSLNEARTALAELGHPVAKTEASAKLLFSLSAGDCLSIPDGDETKLWIVSSTWAEGRVTISETHDAAGQTKTNPSILALVRKGALKVSVDPIGRVRPARD

SEQ ID NO: 800 - protein, 1110 aa, unidentified
  REGION 1..1110: note = Description of Unknown: Cas Enzyme sequence
MASKKKNLGPLTFGLDIGIASVGWAVLGENRIIDLGVRCFDAAEDPKTGDSLNEHRRLMKTQRNRLHRRVLRLKKLRRLLRDIGAVPNANIENFTTTSSKKGNPARSEPWELRAKGLDEKLDGADWARVLYHIIKHRGFYAARKSETVDDNKEGGKLTKGVKRTAALMQGKWRTLGEMAAKDEAFLQTKRNKAGSYLNSFSRSLLDEELRKLFESQHNSGNPYASAELEQAVLELLWYQKPSITGKAMLEMIGRCTFEKDEYRAPKRSFSAERFVWLSSKLNNIKIIQAGERRSLTPGELQVAKDLPYRLAKVTYKQLRRAIGLSDSPNAGFAGLPYSIKRNKKGELVDPEEATLIELKGWHDLKKELDNEATRHAWERLSGNALAGNPIEMDAIALALSIYKSDEELKLELAKLNLDAVTIEAILRVDYSNFIQLSNKAITKLMPHLEAGLRYDEACSQAGYNHAKPNEETSCSKYLPAFNLKEIRNPVVFRALNQTRKVLNALIADYRCSPVAIHVELARDLSKTWEERKEIEAGQKEFQVEKQATVDYFIEQVGRSPKGDELLKMRLYREQDGQCAYSLHPLALDGDIRRIFEDNTTQIDHILPYSRSFDDSQNNKVLVLTKQNQNKGNQTPFEFMDGVNQSSQWRNFEAWVRGHKNIRKAKRDRLLRKSFTTEEAEGFKSRNLNDTRYITRYFADYVRQRLQFAPDASGQIKPRESRVLCPAGGYTNFLRARWGLTKNRAASDLHHALDACVIAAATRSLQKRVSNFSRKGELVQLPDGTFADKETGEILNAETATALGERFPQPWPHFREEVQARLSANPSEIIREYFSTYDESVLAGLKPVLISRAIKHRAGGPVHQDTVRSKKSHLGKDTSSKRVRLEGLKIADLDNIVGAHDGRNEALIDILRNRLEAHKGDGKKAFGPNMPPVHKPRRDGTPGPLIRAIKIKDVQKGGVPVRGGIADQASIWRVDVFHKTGKFYLIPIYQSDRRKNGVLPSRAATANTPRDEWTMIDESFDFKFSLFPNDLVKLKNRNTTFFGYFVGLGVATASISIRSHDNNESIATGKAWQGVWVNLGVKIGIRSFEKFHVDVLGNFYPAPPEKRRDLA

SEQ ID NO: 801 - protein, 1058 aa, unidentified
  REGION 1..1058: note = Description of Unknown: Cas Enzyme sequence
VDQLKYCLGIDMGTSSLGWSVVELKSNQDSEKEKFVPVDVIDLGVRIFDDGRDAKTNEPLAVSRRNARSMRRRRDRMLRRKQYLLHTLQNAGLWPTDREEQANLVTEKNPYEIRCRALDHKITPFELGRALFHMAQRRGFKSNRKMDKDDSSSNMKKAIDVLENKIAAAGARTLGEYLYRLRPTDRTILHKQQPSLRVRTSVKGSKTEYSIYPDRSMYEAELTAMWERQKFFYPDLLTDDLFQKIHRTIIEQRPLAPQEVGVCQFEEGEKRAPKASPYFQRARILQDLNHMELVSGTLSPEKREAVKKLLSTKKEVKFDDIRKKLGLPSSAIFNLEANERTKMDGDLVRSIMSNKNAFGEKWNELTIGQQHEVTSLLLADNDDEEASVVLTQSPYNLSEKQAEQVLRVTSKLPSGYGSLSIKALQKIIPFLEERARYDEACQKAGYNHSYMAVQSFSKLPYYGVVLEKAVIGGSKDPKDDSSNPANNLADTMGNWERYAGRINKPTVHVALNQTRKVVNAIIEKYGRPTQIAVELVRDLKMSQKAKQAFSRRQKENKDRNDRIREKLAQLGLSDNYGNRMRYKLWEDQAPNPQERVCPFCGRVIAVSELFSPAFEIEHLLPFSRTFNDSHTNKVISCASCNGEKSNRTPFEAFGHDRKRWAEILDRVKDYRLFVKRSAFREDALSDEKEKELIARQLNDTKYMAKIARQYLSSVCEDSNVRPIPGQLTAQLRHAWGMNPMLGNPDDKKERGDHRHHAIDAFVVACTSWGMIKQISVLSGKGIRKVHFPSKPFDEFDYSKFQNMLDQAIVSHKIDHGGANLAAQTGSTTGLLHKGYNYGYVRQVDDKSAIFSMRRELTSLVKDRDIEQIANRRIRGNIQELLAGISDEKVRKTRLFNFARKNNIRRVEVCEKKDISTMIEIRDKRTGWPYRYVVGGSNYCTDIYCPNRGAKKGEWLAETISTFDAHQKDFVPAWKKAEPEAKLIMRLFRNDTVAYDEVGKRIVARVKKMTGGNVILTTHNIVSPDIEGWTASSRQLKKKNARKVKVDVLGRVFDPNIKY

SEQ ID NO: 802 - protein, 1069 aa, unidentified
  REGION 1..1069: note = Description of Unknown: Cas Enzyme sequence
MATSENLILSFDIGHSSIGWAVLAKTKTSPDIRGCGSVIFPKDDCLASARRGFRRSRRNIRSTRQRIARMKMLLLHLGVLTENDLSSVGHAAPHALAARALAADGPSLNWQELWHVLRWYAHNRGYDGNSRWSKQEVDSDDTDKEEAALQLMAEHGTKSMAETICTMLELDEGKKKISSHIAYKTHNAAFPRDIVRGEVLEILNRHKGQLKMLDDNFINTLIASDDTKGKMAWATIAVPGIELPRRYFGGLLFGQLIPRFDNRIISKCPISGGKVPNKATLEFLRFRWAMIIANIRADGRPLSATERQLLNGKMEQKGRLTGKQLREAVESIAGTTRTNCKVYFELHPDSEEALVLDPALALFQGEGVSSKNLKPYWECLSDTTKYRAMGRWKKNRPVTLEWMLADCIKEKHDTSLLVQEIDKAFTADQKKKKASYPTRDHLLRMSFAPKSLSGRAPYSRKVMTDTVDFILSTDKHPTEKDAPLYRSKEIIKAQRDRPIDDLTNNHLLRQRLTILLRLVDDILNDYASGDSRLVSDIVVEVARDLQAYSGMTAKEMAGELTKRLSHFKSAVVYLEEHAPDLPATGSLIRKCRIAMDMDWKCPFTGKKYDVMELPRLEREHIIPYADRPTNSLDSLVLTFDWVNRLKGKRTGVEFIKQAADDDRILSISQYTQLVNGLKEAKRTTYPDDFRRQSSRKKLMLIEHYEAKDVGFTQGALTQTSHLNRLSARQLEKRFSDPMSGDCSVRITSIPGQVTAETRKGWNLLHTLDIACPECAGKNKTEIRGITHLHHALDAAVLGITQYYLPGIRSGESENEKGAIWQAMLRRRKTSSQQRLLLKTGVYASCSRIDREGKSTKETDVQLKDLSPNLKNQLAVRLAEKRVIQHIPADQSSAALEQNQWRVWGVHGDPNDPQTEVTLRQQSSEVKDGKRIIKRKETKDKAGKLVGLKPGKLSKNKAVLVIAENYGLALDPEPTIIPFHNVHERVNNLRKLNDGTIPRILRNGNLIHVGDGRYQGHWQIRSVKNNSGGLAVSLGFPHINKVYKQNVLVSSLLSAGITMLSPPLIGIAIE

SEQ ID NO: 803 - protein, 1169 aa, unidentified
  REGION 1..1169: note = Description of Unknown: Cas Enzyme sequence
MGSETEKFYNNIKEKIGSKDYRLGLDLGVGSIGFCILSLKNDETPDEIVLAGSRIFKPSEGGEERRLKRLQRNSHRHKRERLFKLWKLLSEKGLSLKAPDKLEKEDPLNGDTSQKRFPKEVLFQNVYILRYKALNEKLSLMELGYVIYHLANHRGTASLRTFEDFDENKKKENKEMQAKADNSFKIIKDKKYRTYGELIYKEKIEGKKLGNLGKIRNRSNAVEFIPTRDLILTELDEILKKQKSFYPQILTDDYIEKIKEILNFEYDKIIPEPGHCPYFPNEKKLPKAHPLSEERRLWEAINNSRVFEPVIEIDEIKSYKEREFNKEEKEKIFNELKKEKSITPNKIIKLLKLPQKTEIILQGRDKKNQEIKGYKNITLENTDFWKRFNEEQKDSFFYDWISAPDDHSLKKILKEKYEMSEEEISKSVREIEMPSGYSPIGKTATKVLTEYIKQGLSFTEAIDKAVEDGKIKIKDAKTYEKLPYYGEVLDDLTQPVICKALHEKFKDKNYKKPNIAKDEEKFGRIANPVVHQTLNELRKLVNEIIEATGKKPKEISLEVARELKKSAEERDKISREQNNNEKTRKDIYEKYLKGHEQINNGFLKFQLFEEQEKKCPYCGQIITADDIYNSRVDIDHIFPISQSLDNSRNNLVLSHNACNETKGQNPPYNIFSKDSERWSNILGYLDITKGMKAKKWRFMEGTFEEFIKNIPIKKRFETDTSYISKSAQRYLSCLFDKKTSVIPYKGGLTAQLRLAWDLNRVLIPYIKEGLYEEEKEEFEKISSLNMKFRMDQRHHAVDAVALAYATRGYSNLLNKLSAKGYDIDFNAKNWLSKILKPPHNMTAEGFSKMVKEEARNFVVSIKHDHDKNGRLIKDTFYKIYLVNDKYFLVSKKKVSSINEDSIDKIEKKLMRGKKEIENSINIELKKMLESNVSVFKRIKSNIDKAEKILKEEDEKAKQEGKKTYDITNKRIMIKALEITGGIYYDFSPNKEKDKFYIIKEPTKEKSGCGYDTGDNLCIDLYHDEKGKLCGEIIRKINAMNPNYKPEYARKGFKLFERIYRGDVLELDVSEDKTALKNKTSNAVGNRVFVKITTFTETSNYYKGKYNQIRIWFININRGETQPDDDFFVSNMEYYKPRKIILTSLGAIRYRSKILGDINVENNRYIGRGL

SEQ ID NO: 804 - protein, 1170 aa, unidentified
  REGION 1..1170: note = Description of Unknown: Cas Enzyme sequence
MEIKSKEQERFYQKIKENLKNNDYRLGLDLGVGSIGFAVVSLNNEKEPDKIILSGSRIFKSSKGNEERRLKRLQRNAHRHKRERLFKLWQMLSKKGLSLKAPEKLEKEDPLEGDTSRKRFNLNVLSKNIYELRYKAINERIELQELGYLIYHLANHRGTASLRTFEEFDESKKKENKEMQEKANNSFKLIKNKNYRTYGEMIYKEKIETYYEKIEKKKQGEIIEMPKIRNRKNSVDFISTRDLIIKELDEILNKQKEYHSNILTGEYIDEIKNVVNFEYEKLVPEPGRCPYFPNEHKLPKAHPLTEERRLWEAINNSRLTEPVLDGDEVKTYKEREFTKEEKEKIYKYLIENKNITTSKIIKLLNLTDKTEIILQGRDKKTQEIKGYRNLVLEGMDFWKRFTDEQKDHFFYDWLSIPDDFSLKKKLKEEYKLSDEEIKLAIEKIEMPKGYSPLGKTASKIINEYIKNGLSFTEAIDKAVEDGKINLKEHRIYDLLPYYGEVLDDYTQPVICKALFEQFKDRNYKKPNINKDEEKYGRIANPVVHQTLNELRKLVNEIIEAAGKKPYEISMEVSRELKKSAEEREKLSNIQTQNEKKRKEIYEKYLKDKEQVKDGYLKFQLFEEQGTKCPYCGQQIDHEDIPNSRVDIDHIFPISESFDNSRNNLVLAHNSCNEAKGQRCPYDAFAGTDRYDKILSYLDTTPGMKAKKWRFMEGTYEEFLKNIPIKKRFETDTSYISKSAQRYLSSLFGQKTKVIPHKGGITAQLRLAWDLNRVLIPYIKENLYDKEKEDFESISSLDMKFRMDHRHHAIDAIALAYASRGYSNLINTLSSKGYKIDFNKRNWISNILKPPYKYFSNFVKEKIKEASVSIKHDHNPNGELLGETFYKVYLLNNKYWLVTKKQVIDIKADNLEKIEEELTKGKREIENSNNQELKNMLQRNLRVLENIKNNLDKAKQILEEENKKAKDEGKKVYEITDKKIIKKVLDIVRGVYFSINPNKEKGKFFILKEPQANKAGCGYDTGDNLCLDLYHNKNGKLCGEVIRKIDAVNKNFKPAYLKNGFKLFERIYVGDILELDKSDEKIALKSKTGNSPENRVFVKITTFTELPSYYKGRLDQIQIYFINISRAQNKPDDSFCISSMKDYKPRKVILTPIGAIKYRSKILGDLNVENN

SEQ ID NO: 805 - protein, 968 aa, unidentified
  REGION 1..968: note = Description of Unknown: Cas Enzyme sequence
MVDQINNSKYSSKLAERIREFNSAFKLGVDLGTKEGGIALVKDNQVLFAKTFLDFHKENLKDRRTHRRNRRSRLAKKRRVALLRLWLLRQKVNGKQLPDPYKIKDTPLFKRTNAKNWIDAVVSKQDTSPEAFVRALTTVFRKRGQSYEEMAKQIEDMNYKELKDYINSLGSITEEEFNALSEEIKYRNESSETSSEKNRYAGLVDILKTKLSNKENIKNRREREKELERIVKTFCEANNVHESDKWISQLKSLLNKPIRKVRFTNRIVIRCNICDRPTPKKSRPDIRELLYMDAIRNFLRAGRVDPNEEAINYYKTLYKKAAEIRKNIIKKAPLTEEQKKLKKELSKQLKKYINKDYRASAQKKMLEQIKVLMFEKLSGRSRYCTEHLRARANGEDVEAGYHGHVQKRHDMNIAQKNHDKRVINLIEYMLFRRDESLAKELKNKGIMCITIEAPEPDTKKAKKGETTKRDERNIKEKLLDEQFDVEGQRFICIYTGQELSKDRLNEYEKDHIFPESRDGPSIRDNLVITTKEINKEKGDRTPWEWLHDDPVKWQEFKNRVMRLYISGKITERKKELLLYEGSEFLGDNPTELARAGARVNNFIADLNEMLEKHGLPEAQTLFEKGKPIVQIVRGGETQRLRRQWNAIDSSFIPLKDRAVSFNHAEDAVITASMPPTIWRSQIYRYTWHFATSKERSDFALPDIAPHWNDFIAKRNSPIIAVLGKTKYSWKNSGSIFDDTLYKKYNSRAFFKGIYKQPQPKENDDDKINQPTKPIPINEHKMDPNYKYYHVKVDNKRFLIKSQKGGSLITIKPKHTLWPRQIQVNPTYGSGVLTKGDKGEIELHYTPISPIMSMYKQGIILDMDERLKHALSDKMRYEDHKKELRVHDIIYLPATKRHGGGYFLVTKLGRSGVKVVPEDKLKIRYTKQNSKDRDSESGKDKAKDKSVEIRLNEEDLLYLYNNPDSIRIK

SEQ ID NO: 806 - protein, 1775 aa, unidentified
  REGION 1..1775: note = Description of Unknown: Cas Enzyme sequence
MKTIYSPIAIDLGAKNNGGRTQIDIIDEYGELLNSSFPQDFCISINDNITFDQKKRRQFRHTRRNIDRRKFAKRILFEILSSENINLSNEIIFEGKTPDKSYKISIKEYLSSLMNRRGFTFLNDDNNPNFGVEEIPNWFNRLLPKKHQISGQKKVEMFISQLAEEEHDILNKNGSLYEIQKAFKIWNSSKSASVFQIKIKKNTFENIDELEWLNLPENEIKNQEEQCKHREKWLKFFQKAKIMSDALEYFKEECNNNLIQIIRKIIELPHNLIKDKKEVFTFKKDDKEIKKYFLVPESSNVIKKIENIITLHENIEKKDIVDFNKKIKEVIEERTEFINDLSAYLDVAITALETGSRPRKTYLKWLEEELEQKRFECHIPPENLYNLIGNIGNLQDRDLRNYFNSKSKQYKNLHAITKKSFAYKKILNEFKNENGFQKLLFQTKPQLTIPSYENQNNRKPPKCASICLKVEYKKEGKYKKPISFADIDKLKWEKFYQPFFQKNNVNISEFNKCDWPEILQITFDTNIIWGDKEEKYKGFGIGLKEVKSFEDYQNKEQFCFFQECCKIAELDEEKVYNIVREYFSQIAALNDGKIEIDNKGNLVIEKDNNFLLNGYKHQPLIRVCNRHPKINNNIADFHLRLRLQSNKPESIKELDEEFLPAITQSNFKVIAEMVQKHGSAINEILVSDNNIKNKIEKSIKEIAKYINQKIDWSKYEAAYIISQIYNIACKNRSGFAKQCTSCLENSEFRLKYRIRHIPRFTRFQHKPFDGMIGRQLDRTAWETAKYFLNKIKESLSVNHKYDEITQIDVPIFIEANSFRFNQETAKTSKTKKRINEKIFSQKSVFKDKKKRLINDSNVRCPYNGEVLGTTGEIDHIIPRASIYKTMNCELNLIYVSKQRNLEKLNAFPTFNDLDDSFFLKNNIPINDGLHNQLAELIEECEKAGTSLEYFKWDSQKRNLFRVGLFYDNDKTLQNRFIKIIKRLDATKVNGTQRYYGALLQQKLQKELRKMFPNAIIETPICLIANEDRYYWREKISENFPEITWLKKTNSQIPASHCLDAAICLWLGENELFNEGQKTQKRKERLKSVLNKIEKADLPEDENVVVIDVVRKTKLKRMDEVYNLKIDKSTKSMASISHFKDNPYALNFFHILVLPTKDNNGNYEMKIGFTIENSKKAANDTLKRIWSLLVPCKKIRRKFKRDLYQSFEQLQRDVTNWFNENPATPFCTFYVKKQRFCELAFAIQDLKYKKIEKREADNEYKAMNEIFNNEKKYFYFTMKNKIFDKTFENTIIEIDSEKIFFKNEFKINNNDYIHAGNIILKIWVKEKSNKDSKQFAGYIRIYDLSDNKKEAKYDSCQIYYNSFILNQENIKKHYEYTVEYNGIRVYDSKLFKADGITLPILKAWEKLDVEYQKEKTNSINSNISLAEILHKTINESSIFKCEKRKKYTSRPYTDYINRKKRREAALPMSPTQKPGALVLIRHNHTYQVLALEGNKSNYVIADNEFKEKILPHYNPANSKNLFFLKKSDRNIMECKDGIIVNPDEYIELKRENNCVEKYEVAVPNVTDTNIRLILNKTFVSKYIKSIKKLIYPNLQQLINDFIDEYNKLKESIKIVPESTEQLNISQTTNDFIEQFNKLKDSKDEINVSKLTDKFVEALKEWKENKDEINIMELTNNFVEKHNKWKENHNNMIIQKTTNDFVNYFKILDKDKRNVFLDYWKKSETLSQFLPPRDNSTSIKRILSVGNGAIKFEYKAHSKLKPDDKSKYIAVKLNHAK

SEQ ID NO: 807 - protein, 1147 aa, unidentified
  REGION 1..1147: note = Description of Unknown: Cas Enzyme sequence
MKYILQPSPAETDWHQHEFYESALVLGIDSGIDGIGVCLRKGEEILFAQTFLVGDTTKTLEDRRLKRGWRRSRKGRKKRETLLKNWIVRHKILSKERVNEIWHNPAIFQNAFKHRLRGMDQKLGSAEALVSCFRHAIQHRGFDYHLNGGGGFPWGDAMDFSKIIQWAKTGCCPQGAVDQWMLLIAEADFATDENKLTAVSTAFAEAVDRFQKDEIASILKEHFKEEKHTNLRPAARGHHFPRELIKAHVRKICENNKDFFASTDFQKAVNELIGPSDNEIYEWKKDGCIMDYHRKTLEEVEKLWERKTNECPYLSRLVSPEAYKTKVRCSLNEDLAVRKFKALQFLAERTFVLSDGLKYNATKGIFDRCIQFIESDAKTITDKVARPKLDKKELKDFIVAEVVANGDLTAAKKTKKTLQKKNEHNDAFLDQLYDLFSPKRSSLKQRSTLSSEAATILFDQATSHGTEFSPIDIVSDWESTYYLWRLEPKSGGRVHPHVQYLLGHPKQYPDGKSNDIPFKGDGKHAGARLDGNAQEHGILRKLFAGQLEDAMGRKVDLSSKLDGKSVPDYVVIETIGEIPTGPLQKKAIEERQKSNRAHKEALAKKYDLDDNPRRSDLLRVILFEQQIVDGGKEATCPVTGQNLGSNPRDARFQIAHIFPNSKGGIFERLNLFITTAPVNNAMGNRTPKGCSGQTIDGEKFLDWSEMRLLAGRAMNWGKQKRDLFLKETDEIPEWQNLTRISQLARQLKAEVERWLGLTKMENSLERTREAFRRIGTPTGSMTAACRYSWRSHLPSFMAEKKHRCYLRHHLYDAIVLSHIPSGVGMNFVGNGGIFQLSKDKRNNPVLSVIEGLLPDLEAFEQANAQNCLVHKHRSKKSKQSRAEQTIYSKFAKSNGDSSVTLKVRKPLTQQVQGKDAFVPAKNAEKWIKESGIPLEKLQPKLVEKWKESNGSKPLRLVDGTPVESVPVSTTSEQITSLFPHRNHAGEIIGLKTTTEAYASCQIWEGPKRSKDGSVVLDAKGQSVLEYLRVLVPPARNLASYKKQFGTDWKPDVTIPNDFRKVGRFEKGDILRIPLDANGEILPSISGSSHILSYRLGSIKTNGQLEFSLSEFLEAGIKDSPWASLGNLIKKGPSSPSVLAAILRFNHH

SEQ ID NO: 808 - protein, 1138 aa, unidentified
  REGION 1..1138: note = Description of Unknown: Cas Enzyme sequence
MSNSMDYVLKETGRVKEWEKHPFYTQSIVLGLDIGIRGIGVWLRKGPEPIFAQTFLVNIPDAAPLADRRQKRALRRSRRSMKIREKKLREWIVRFGLLSKDQVDQMWRNTSAFQSALDLRHRVVNEGKTLGSPQALVSVLRQVIKNRGYDYHMTDEGQFPWGETTDPKEIIKWAKWSWVEKKNADGWKQQILEVAGGEEGKSYEEICQALDEAVDRSKKDTLEKRLAEHMREKKQNLRAPFRGLHNNFPREAIKSHTRQIISKHQPMFRNPGEYNQAVLELLGEKDNICYEHPKTGSIIDFHRKSIEQVKELWERKTNDCPYIGRLKSAGQTKTEKAKCSGNDDQDVQQWKLLVFLAERTFVDSNNVRRNIPESLLKHLLHLQKTIIEARKTKQPAPKILLDSIFAEHLNSEAPKTTGKGKIKRVTLRKKDELNKDYLDHLKELLKPKAALLKKRSGMCAESARIMFTLGTDNGKTFEPEQIRENLADSFYQWRRNIESLAPGYPQVEFLLGSRKHYDDGGQPRDLKGRQDGQPQHHGILRRLFHNQLKDAHGRLVDIQKQLAGKQVPDYVVVEVIGQIPRNSEERRSIQNDQKSRRDAKEEITKEFGEKLSSPQIRKVLLFNQQLNEDGHAVCPVTGSDLGKNPLSTELEIAHIFPQDSGGIGEMDNLFITKREINGAMGERTPRMIAGSTSSRIKFLPFDQMMQTASRFRWGKAKRIFFAHEGGQVPDFQNLTRQSQLARQLRREVVRWLGIERNHNGAKDADKKIAGEIWERIGSPSGYLTSICRDSWRDALPDFMKDKKERGNLRHHLYDAAVVSFIPPGAGLNSVNCGGIFRFATDKDGTIKGKAIDGLLPDLHKFDQKHQRTCLVNKPKQTKSKAKRTKETIYNLPSADPLKDNKLRVRTALDPANMKPKLFDPKSTGISAEALPAKAVTQWLEKSGEKPLLLKDGTPVRRIMVEGNAQALSSLVPHRNHENKIIGCKVYIDASETCEIWQGVKKEKDGKPVLDKGGKPVPDYRSVLIPPLRNQKSYEKLFGKKWQPDEKLDKDFKRIGQIRKGDVFLIPMNATGEICQPGEKPVYELWYRAISLKTAGEITFVPAEFDDALPGYLAKVPRAISQRPSSSTKHAAIVLHNKN

SEQ ID NO: 809 - protein, 1045 aa, unidentified
  REGION 1..1045: note = Description of Unknown: Cas Enzyme sequence
MGDKIVFAFDLGSGSLGECVRKNDTVVHLNSLLIDAEFASVAEQAAQRRAFRTRQAHLAREQWWRQAAQEAGLEVLDSAQPTLERDAAPDERLLREFARRGDDTLYTSCLLRIALLQGKKLASWQVYKAVWSALQHRGYDAQLPWKSEIQRIKTKQDNGEPLTPREEKIYKEAQEESASSNLYVQKISVLPEEYRYPCYWEAYCLGLWNPKTPGEWKTALESRPAAARNKEGKETLTAPRKLVEKELRLLLRQAAVQYPGLARKEDFILYGPAQKAYACCTDPKNFSQYRGKAWEWQGVLAQKTPRFDNRALSACRLIPRFHVCKAQTDINLQVGFLLALKNMRFTKGKNTTQALSAEELAALYHKYCPELAKSSQNIMGAKAWKNEVEKLGGVVNETQKVVPMPQKSGRSRFSRPALEILHELILSGESPHAFYSKKTAGLTNTNPLGGLIKQDYAFLLAMPDDWNKIHIPDTREADKLLSAAERKEAVSSLLGKIMNPVVQHRLFFLWQRLAVLEGKYGTPDEVVFEVVRNDFLSDADKAKLIKRQKEQYKLNRQLAQEAGEKNVLKMRLFREQKGIDVYDTSSERKLSCAHLDEYDIDHIVPQARGGADSYVNKVLTKRSLNVAKKDKTPYEWLSADTAKWSAFLSNLKEIGISGSAHNGGLSEGKMELLISNEAVELEQRRNDLQATAYLEKLAQQIAALHFGWGLNTLGDQRRIFTANGGQTARIRRAFGLDRLLHSAENFKKAVQENTLDEKNRANKKHHALDALVLSVIREIKYDPATRRLKAPEFFTPPFCSRALDDVYPQTVKTCKPKLRETIYGLRERVENGTKKYYLVTRFNSSVDGLQKLAEAKKQVKNIFDPDIKRQLEEQLSDPNLTQESWQNWLKQWSDNGRKIRKITKTESGPYTEKDIVLKNGRRQIGCFYELGKMKGQFLTNKESHQGQLVYQDAKGKWRVDPVYLWDSMTEKLAEAKRKYGKALLFKSGQLVEIRENVDKVKKGVYRMRTLRSDGVLVLESIKTQELYTPRITKMMTLGKMKHFKR

SEQ ID NO: 810 - protein, 1118 aa, unidentified
  REGION 1..1118: note = Description of Unknown: Cas Enzyme sequence
MENEKIFSFDIGTGSLGTCIRKGSEIELLDVETLPSDFATVKEARERRRQIRTRIAHKKREEWWKEHAQKAGIEVLETGHLNEKGEYIKPDTRLTREFQKKGDPTIYNSLLLRIALLHGKKLEGWQIYKAIWSAIQRRGYDINLPWKSKIKEAKEEDNEEQQSDKKRKKKEKKANNEENDEKQVEEAVQKYKEEMKKCFGEKQEFYYPSFFDAFRLGIWDPDDSENYSKTIDENAKPIRNKYGEISTIAPAEMVDKELKQLLVQAGKQYPYIEKNLNYILYGPTGCKYGAYLLKDYRKYMGRDVEWQGLLSQKTPRFDNRIVYKCRLIPRLNVCKRKDPLCKEITFLMKLKNFRYVEAETGVEKSLTPKEISELFETHKNNFHIAESKLKNYLQKKLNGIVHPSFKTIEAPKEKGRASFCRPAMKIIKDIILSGKSPHESYQEYISNNQNTDPKKGLINEDYKFLLAMPDSWDKFHIPDTREEEAQLDEEERIKKIHEIFSKISNPVVRHRLLLFYQKLQKIKEKFDEPDKIVLEFARDPENTIAGKKKKEQIMKQQKENEKINKQVRDKLNDLKEHGVQIEGKKAFLKLKLWMDQGGKDIYQHARDPYSETNIPATEINNCEIDHIVPREKGGPDAYYNLVLTSRANNQAKGKQTPYEWLGKDITQWNKFIDYISSFNKSEKNKGDKKTDKFGLPKKKIRLLISDNPEELLEKYTHLAETAYISRLAQKICHLFFGWEQLTKGSERKVFVVTGNFTSRIRNIFELNQILEGEETNEEDSNSETNDQDESTDSKQNKKKKNRDNPRHHALDALIISITPEIKFNPEKGKDEYPTWFNKDFCIEKLEKCLPLKIRFVKPKLAETIYGLRKYIDDNGKITDDYVFVTRFGTGTDIRDYLKIFSKKAEERKKYRNYIKSIYSSKIRKDFENKLKNNPTKEEWEIFLHNYRAGGKPKKLLLIEGEKIKSEDVEKFLKGEINNLGEFIKGKMPGQYLKQKKESHGYFVVKNNKGKWERIPIYVFESPYKKKKEILIRYKDKEIYFFKSGMIVEIKESFKYQKRIKNNTDKKDSTIIVDKGKYYLNTINETKQCKITQIDGKEITLQLDTLMDLGKMRPAQNIL

SEQ ID NO: 811 - protein, 1003 aa, unidentified
  REGION 1..1003: note = Description of Unknown: Cas Enzyme sequence
  MOD_RES 748: note = Any amino acid
  MOD_RES 790: note = Any amino acid
  MOD_RES 805: note = Any amino acid
MVERILGIDLGIASLGWAVVEYDKENDVNNRIVDCGVRLFTAAETPKEKESPNKARRDARGIRRVLNRRRVRMNELKRLFVTNGLIKYDDLDEDGGMFHSKTNRIDVWRLRHEALRQKLTGDELARVLIHIAKHRGYKFVGDEDTDEESGKVKKAGAVLREKFEAAGHRTIGEWMWGTKGKKGKKRNKSGDYEFSIHRDFMVAEVRTIFELQKEFGSSFATSEFLDIYLEIAFFVKEPPSVEKMVGSCTYFPEEKRAPKCSPTAENFIAIGKLYSTVIVDNCSNEQKIIERKSVEELLAFAISRDKLEFKHLRKFLELGDNEVFKGLVYKGKPKTKKKKDASLLEENKLEEWEFDKADAEKKLWISLKGYAKFREALGDAFESFIEDTIKADEVAKILTYYKSENQKQIALKKIISDTPMIEKLSKISFSDFLMLSLRAISAILPDMQSGKRYDEAIGILGTPSTEKSEYLPPLKNTDIAILNPTVIRSFAEFRKVANALVRKYGAFDKAHFELARDVNTKADIKAIKEWQSKNEKERKDAAEWIVENFGNATPVTRKNILKKRLYEQQDNKCVYTGETIQLTRLYDDGYCEIDHILPRSRSADDSFANKALCLASANQDKRNQTPFEWFGHNEARWAAFEARINSSSSRAKMGKGKVERLLKKNFDENSETAFIERNLNDTRYMSKAIKTYCEKHWKLKHDDDKLRIQVRSGKLTSELRSRWIEGFLKDRSAHAHHALDAIVVGFSXQSMVQKLSNFYAAKETRREKEKPIFKAPLENFRNAVEDALRXEKTEEVKDGIVVKRXLISRPPRASVTGAAHKETIQSPKEHKGRGVVINDGKGVCDNGDMPRVDVFTKDGKYYLVPIYTADFAKQELPNKAIVAGKDKEWIAMDAGYEFLFSLAKDDLLEIKLRGKESFLGYFRQADSSTANIKLQKIESDEQFNFGSKTAEYIKKYTIDPLGYYAEVKQEKRRLGTIPQEAVRNGVYDRRAKKLAEKRAAKGK

SEQ ID NO: 812 - protein, 904 aa, unidentified
  REGION 1..904: note = Description of Unknown: Cas Enzyme sequence
KLGALSNIEVEKFIKDIKEIIDDQKDANNDLSLFGNCQYYSKYKVAPQYSLLSDIFNMYQSVSNITFNKEKRAITKEEIKKVEEFFYKKIEKGKSFSEITFKDIREILDLDKSIRIFNKEDFYFQKGKKVYERIAKFNFLPSLSKIDNKFIKTILKQDNYLDILDEIFTILQQEKAPKSAYKKLEKIFKAYKLVEDEDRYKKIIISLIKEKNGRSLHISHYAMKQFIPYFQEGLNTQTIKETLNLITTEDYSKYKKGIKYLTLKQYEEDENLEINNHSVKYVVSAVLRLIKHLHTLYGTFDEIRVESTRELSLNEEAKRNIEKANKEQEKKFKEILENKEYQEIAKTYNKSLKKYAKKIMMWEEQKGLDIYSGKTIGFDDIFANRVDIDHIIPQSLGGLSVKHNLILAHRDENIKKSNRLPLDFVENKIDFIKRVEYLFSEHKINWKKRKNLLANNLEETYKDTFESKSLRATSYIEALTAKVLKYYYPFKEKQKLKDGSAIRHIQGRATSNIRKLLDIQPKVRDTNIHHAIDAILIGLINHSWLQKLSNTFRENRGVIDSKAQRKIKKNIPLIEGLEPKNIIEKIEENFNIYGEDSIFYKDVFGNRKSVYYWVSKKPMVSKIHKDTIYSKRTNGIFTNRVDIQKEFINLKLKPTTPLEKFQKDFEKNILSKLYLHITNQNDAIYIAIKNRAKEIENLLRSFKTLHSKDKGQLEEAKKRLDSLIHSPIKDNNSNIIRRVKYYQKNLSGYEIRGGLATSEKSFIGFRAYKRNGKIIYDRIDLSNFNILKKENDNSFKVYKNEIIFFIFKDNSFKGGKIVSFLEDKKIASFQNPRYPSAIKFQPENFCTIGKDKNGNKKKISSKQHKIGKAIGIIKLNLDILGNIKSYQKFGEVNPQVENILLQKE

SEQ ID NO: 813 - protein, 1068 aa, unidentified
  REGION 1..1068: note = Description of Unknown: Cas Enzyme sequence
MSKNELIYSFDLGSGSIGICARSGKNILYLDSLLIDSEFASVKDAAARRRQIHTRIAHKEREKWWNEQAKKAGIEILLTTQPTKENPTLKTDKRILIEFLPKDSKDKTIYSSHLLRIALLQGIKLEGWQVYKAIRSAIQRRGYDANLPWGSNTDNTDEKENFESLSRYNEKLKEFFGDKEEYYYPCYYEAYMQGIWSPEKPKDLNSRLSENPAPARNKETKTAEEKCFPSRQLVEKELKALLINATKLFPKLKDKEDFIIYGPAEKAYASYDNHDKYTQYRGTSWDWQGLLGQKVPRFDNRIIAKCRLIPRLNVCKAKKQINKNVSFLLNLKNMRYSKGNITSMALTPLQINDISKIYTQYIESEKEKEENKKSGVKIQNKRAGKDNPFTKTFWKNYIRDTLGGEVNIGQQQISEPKDSGRSSFCKPALHILHSLILSGKNPHDYYKELVAANKNTDIGKGLVKDDYKFLLNIPNDWNSISIQDTREDDKKLSPKEASKKIEQIISSVSNRIVRHRLIMLVKQLEKLDSKFKKEYGHPDKVVFEIAREDFIGEKKKNDYISSQNANKKENEDVVKKLKDMGTTVNAQNILKIRLGNQQRWMDIYDTSKNRELGERKIAQYEIDHIVPQKLGGSDSFTNFVLTKNSLNHAKGRRTPYQWLSSSSDWEIFLKNIDAFAKFASHKKIELLTSEKAVEIENRKTDLQATSYLEKLAQQIAGLYFGFGINTKDTKKKIYFYTGGETANVRSKLDLNEILYSNKEDYEKAKQSDLKKKNRDNKRHHALDALVLSMLPEIKTKAKVVEEKPEYFNREYCKKEISKVIPKTIKQITPKLRETIYALRYRIEDGKKCYYFVSHFDSSIENFRLLEGKKKNDKCARKNVEKIFDLKIQKDFKNKLDDKGLSQEKWERFLNKYTDNSKRIKKISIIDSKCFDESDVFNTDGTLKEVIGEYGHKGVLKGQWIKGKEGHQGQIIYKDEKEKWKVVPIYVFESVYKKRKDYESKYKSVRLLKSGQLIALKEDYKNIKAGIYKLRTLRSDGWCELENINDQNKIGQNIGTFIEQCGMEAYKKQ

SEQ ID NO: 814 - protein, 1137 aa, unidentified
  REGION 1..1137: note = Description of Unknown: Cas Enzyme sequence
MKRILAVDLGITSFGYAILEELEENRYKCIDFSVIMRDSPYNEKGKSKQSLRSSFASLRNLIKKRKKRIKNLAKLFEKYNLLTYQNAMLIQKENKIKNKWQIRANKALNEKLSNEELFAIFAHMAKHRGYKSIATEDLLYELQLELKLITNDTSESQLDDEKKQIYAALNKIEKLKEQYKTQTIAQLIDKAVKEGKLKSFRNHDNYEKMIRREDIEYEIQTIIKKQCDFKALNFNKEECSKFTNEILEIITKQDMPQNDESVFGKCSYYKNEKAAPKYSFLYDLYRLYKTLADLNITNYNLTKEDREKIVNYVKEKITNGKQLKQITYKDIRKILGLNSEQKIFNKEDTVILKGKETQRVFVKFFFISDISKFSNLIRQIIKQKNYIDIFKDIAEIIQLERTPKIAFKKITELLNKENIKYENHEIIELIKAKKAGTLNLSHRFIKQALPYFIEGKNEKDIKEILGIANFEDYSNYPKGLKYLHLGKNNYFEQINNKINNHAIKSLASWALNNIADLSWKYGIFDEIIIESAKDVLPKKIQKAIEKFSNEQKKEIEKIIKSYKDQFPNINKNMAKKIKLLESQNFLDLYSGKTINISDLFEGKADLEHIVPKSLGGLNTDYNLVIAYKDTNMQKSNRLPLDWLNGNQQYINRVENLFKEGKINWKKRKNLLANSLDEIYTEIKDTKSLRATSYLEALVAQVLKMHYPFKNKEHRKNAIAIRTIPGKTTSKARALLNIKSKSRDTNFHHAEDALILATLNRKWHNNLHRYLKDNYGKTEKELQKIWQKNTPYIEGISISDYLKDAFEKFMSKGENSIWYKDMFGCIRSVSYWVNKKPLSASSHKDTVYSAKHKDPNNPKKILPTVRKNILKEFENLKIVSKRGSLTAQEFLELYYKNIRQKLWLYKIGNFNDLTYKAIEQRAKNIADTITKYKKSSKTDKESDKRYLEELNKWLTTPITIDNKNIYKTIFIDDTFAPLKIKRGKNNEVIVRTDDNFLAVIFEKKDNNKLNITKVDINSLEKLESKNSLIVYLNEIIYIFNNKKIIHYGALRSFSISNQGAKLIKLFNPKFPSNPKAQPAYFSKGSSFKDISIGSATGVIKVKLDISGKIKSYQKYGFISKELEEQFLKESGYGCLENS

SEQ ID NO: 815 - protein, 1038 aa, unidentified
  REGION 1..1038: note = Description of Unknown: Cas Enzyme sequence
MVEYSDPRIFGFDPKTVMTALMPYERFSSKTRRLILGIDMGIASVGVCLIDKRNHEIVLMASHIFKAPVEGKQKDISVRQSGASIRRGYRSVRRTTKRRKNRKKTVRDIEKKYSLIPDDADGQWFAIRKDEPDVLHLRGKALLYKLNGRELARILYAFAGRRGYIDHGKGATDDDSGKVKKALSENRKILDENGYETIAQYLLKQPTSRNREGDYRYMVDIEMVTDEVHTIFRHQRDLGSDIATEELEGEYLSALRWLTDTSARDEKIYGRVGYCTYLGAPEKRAASSLISFEMVRAYEKLSNIKIEHQGREATYISPEKRNEIVASLFAVSKNPKPLKWAQLREKLGMQSSDSFDSRLPSDEKGDCIKIPAWNAICTGLFTSNRALLDRLHDDTDAADAVCSALTYASSGESLRNALENLSLDLSEQDIDSLLDLPYASKLFSGYCSTGVRALQMLRDAFKDPQIEKLYDAEKATGLYEARQALAAERNGSKDGLLCPYLEFDPTCTNPVVLRATAQVRRMINSIIRHYGLPDVIRVEVAKDLKRSKHEKAVIAAANKANKEDNEQAKKDLIAFYGLPNDTHVSSIDFEKMRLYREQFGQDPYTGKGINLERMLNDRDYVEIDHILPFSRSCDNSKSNKVLCLTKSNRDKANRTPYEWMTSGEPSAPDFGDFCGRMDAWAGNRKSAHCTKAKLSKLKNSTFGKEEQKFIDRNLNDTRYMSRQLAMWVRECLPFPDDKRQHVFCVAGGATSLMRRIWGIGIVDEKGKKDRSDDRHHAVDAAVIACCSPGIVKGIARVNSGRSNIKERERLRYESMPYPEFKAQIEAWIPCIVPTRTVSRTATGSLLKDTVYPYIGVDDRGKDLYLQNGKIKPASTLWKDGEGGCKLYDGVYGLAGVFDRTLKKSGSWRFDPIYYIDVPNVGNDVFREFSKDLSIEYWPPLQLEGDEPRIFLKQGDVLLQDDCVMRYYTYDVSNGAVKSYSRIGKESISLQKTGPLAEEPFPKQMKWDSSLTVMQEDCLGLCWLKFLSDRVGKFENSTV

SEQ ID NO: 816 - protein, 1130 aa, unidentified
  REGION 1..1130: note = Description of Unknown: Cas Enzyme sequence
MKKILALDLGITSLGYSVLEEAGEHSYRVLDNAVIMRDAPFDKQSGESTQSQRRVQKSMRRLNEKRKRRVREVARIFDRFGLLSFEQCMQIQKENKIIDKWRLRAEDALQRPLSPEELFAIMAHMAKHRGYKSIATDDLLYELEIELGLADPLDTQEGSNADEKRQVYAALNRVEELKKLYPAETIAQVIHRAVQEGRLSAYRNHDNYEKMIRREDIEHEIETIIVKQCEMGAIELEEEKCKELIESLQEAITDQVMPENDPELFGRCSCYPEEIAAPRYSYLFDLYRLYKIVGDLKINGIALDDDQKERLIAYVEEKIAKGKSLKSLTYKEVRKILSLAPDQKIYGKEDVVIIKGKKSQRDLIKFFFISEMGKFANLVAEVVKHPERLKLFARIAEALQLHKTPQESFKAIDTLLKEHEIAVEPNEIIALIKGFKAGTQSVSHKFIIDALPHLKEGAEEYKVKEILGIQTSEDYGSYPKSLQHLHLGKNNLFEKYVRPDINNHAVKSLASWALRRIADLSWRYGPFDEIIIESARDALPKYIKDDIDKAMREREKEIDKIIDAYKSDFPSIDRKMARKIKIWKSQREMDIYTGKIINISDLIEGRADIEHIVPRSLGGLSAEYNLVIAHRDANMQKGNRLPMDWLGEDEEYIKRVEMLHDKHLIDWKKKKNLLARSYDEIYNEVRDTKSLRATSYLEALVAQNLKMFYPFPNKEHRKTGEAVRNVPGRTTSKARRILGIKSKSRDTNWHHAEDALILATLSRGWQNRLHRLLRDNYGKSEEELKEIWQKYTPHLEGMAIADYVKESFERFMSLGEESLWYRDMFGGRRSVSYWVNRKPLSASSHKETVYSGKQEVPTLRKSIAQAFDGLNVVKDRHKLTAETFMKKFDKEIRSKLWLHHIGNDNDPVMRAIDRRAREIAAILERYEPYDTNKDKERDEAFKEELNAVLTAPLEADGKLVRRTRFVYDKLNAIEIDRGLVETDKNMLGIHLLIRSGKLQISRLDVNNAYQIKQSEGMRVYLNEMIYLYNDKKLLHYGCLRSYLENAQGAKMIALFNSRYPANPKSQPERFSTGSQIKQVSVGSATGVVKVHLDIDGRIKSYEKYGMIPKEFEEAFRQECGYGGVEDDTDH

SEQ ID NO: 817 - protein, 1145 aa, unidentified
  REGION 1..1145: note = Description of Unknown: Cas Enzyme sequence
VKKVNILCGSLIIIVIEEFVMNKKILSLDLGITSIGYSILDEMDNDRYTLIDYGVSMFDKATDKDGKSKKLLHSASHSSANLHNLRKKRTRNLASLFEKHNLGKSDEFLKQEKQNKFVNKWYLRAEKSFSEILTFNELFSILYLMAKHRGYKSLDTDDLLEELLIELGFEVEEKKEKDAEKGKIKQALKTVEAFRKKYPEKTVARIIYDIEIKKDNPTFRNHDNYNYMIRREYINEEIRKIIQAQSTFGLFSKGFDTELFIKELISTIDDQKDSTNDLSLFGNCEYYSEHKVAHQYSLLSDMFKMYQSVANITFGKTKISKEQIKVVTDDFFKKIKFGRNIADIKYKDIRKLLKLSDEVQIFGKEDFHVGKTGTKVQHTITKFHFLANLSKIDNSFIKSAFEKENKFEILKEIFDVLEFEKAPKSMYSQINDIFLKYELLEDEKLKDETIINLIKYKTGNSLNISAHAMIKFIPYFEKGMTIDEIKKELKLERKEDYSTYKKGIKHLHIKTFEADDNLEINNHPVKYVVSATMRLVKHLHATYGAFDEIRVESTRELSQNDEVKKAIKSANDANEKKFQEIMENEEYIKIANHYNKNLKKYARKLILWEEQEKLDIYTGKTIGFEDIFTNVVDIDHIIPQSLGGLTVKHNLVLAHRDDNVKKSNQLPMSFVKDTVAFNNRVEYLFKEYRINWKKKINLLATTLDDRYKDTFESKELRATSYIEALTAQMLKRYYPFPDKKKQVNGQAVAHVQGRATSNIRKLLGVKIKVRDTNIHHAIDAILIGLTNKSWLQKLSNTFRENMGVIDDEARANIKKELPLIEGIEPKELVELIEDAYNIYGEDAVFYKDIFGNTKAVNFWVSKKPMSSKIHKDTIYAKKPNNFFTVREDIIKQFVVLKTVVTTDSEVFIKGFEKKILLKMYLFKTNPNDIICKIVKSRADEVKFLLQSFVDIDSKNKEDMAEAKERLDVLIHKELVDNNGNVIRKVKFYQTNLTGFEIRGGLATKEKTFIGFKATKESGKLFYERIDVSNFKRIQKENDGSFKVYKNDIVFFVYEDDSFRGGKIVSFLADKKIVSFSNSRFPASIKFQPHSFLTLFKGVPNSHKQHSVNKAIGIIKFNLDILGNIKSYIKFGEVSKEVELKIFHKE

SEQ ID NO: 818 - protein, 1143 aa, unidentified
  REGION 1..1143: note = Description of Unknown: Cas Enzyme sequence
MSKKILAIDLGITSFGFEILKEVGENSYINIDNGVIMRDSPYDKDGKSKQTSRREQASQRSLGEKRRQRIKEVAKTFNSFGVLSYAECMQIQQKNTITDKWKLRAEDALQRRLSPQELFSIMAHMAKHRGYKSIATEDLLYELELELGLIEAQTKEEDSKADEKRQVYAALGRLKHLKETYKADTIAQVIHKAVQEGTFRSYRNHDDYEKMVRREDIEHEIETIIKRQCELGVFPFEDERCLQLIEAFHEAITDQVMPENDASLFGQCSYYTDEKAAPKYSYLYDIYRLYKTLADLKIEYYDLTQDDREKIVDFVIEKIAKGKNFKQVYYKDVRKILGLSDEQKLYGKDDKVIIKGKSSERSLIKFFFLSEIGKFPTLMQKILSHTEALGIFAQVADTVRFHKTPKPALEALHELLEYYGLEVEAVELLALIKGRSAGTLSISHRFITDALPHFTEGKDESTVKEILGISTSEDYSAYPKSLKHLQLGKNNLFEKTQNSINNHAVKSLASWALQNIADLSWRYGVFDEIVIESARDALPQSIKDAIDKSMREREKEIDKIIESYKKEFPSTNRKMARKIKLLESQKFIDIYSGDVINISDLFEGRADIEHIVPRSLGGLSTDYNLVIAHRDTNMQKSNRLPMDWLDGDTEYIKRVEMLFGEHKINWKKRKNLLATSLDEIYVEVQDTKALRATSYLESLVSEVLKMHYPFPNIEHRKNGIAVRNVPGKTTSKTRSWLGIKSKSRDTNFHHAEDALILATLTRGWQNRLHRMLKENYGKNKEELKALWKKYTPHIEGVAIADYIKEAYERFMSKGEECLWYRDMFGGIRSVSYWVSKKPLSASSHKDTVYSSKHRDPSDPDKIVPTVRKSILGAFNGLDILKNRHKWNKEAFLKVYDKDIRQKLWLYRLGNTNDPVYRAIEERANTIGDLIEMYIYKDPQHDKSVDEVYQEEIRSLLQKPIAAAQKPVYKTAFVDDTFSPIEIERGKGNTVLVRTDDNFLAVMFEKGEKEKLNISKVDVNSLHRLKKQNAMVVYLNEMIYLFNKKKIIHYGALRSFQVKSSGARIIALFNPRFPSNPKSQPKLFTTGSSIKGVSIGSTTGVIKVHLDLTGKIKSYQKFAFIPKELEAQFLKETGYGSVEDDTDH

SEQ ID NO: 819 - protein, 1142 aa, unidentified
  REGION 1..1142: note = Description of Unknown: Cas Enzyme sequence
MGKKILAVDLGITSFGYSVLEESKDNSYICIDNSVIMRDAPYDKDGKSKQTNRKEQTSQRSLGEKRKRRIKEVAKTFDAFGILSYDECMQVQQENKIIDKWKLRAEDALHRVLTSQELFSLLAHMAKHRGYKSIATDDLLYELELELGLRKEEFEEESKADEKRQVYAALSRLKRLKDTYKIETIAQVIHRAVEEGEFRSYRNHDDYEKMIRREDIEHEIETIVKKQYELNGLEFDEQTCLSFIEELHEAITDQIMPENDESLFGQCSYYPEETAAPKYSYLYDMYRLYKILADLKIDNYEITQEDREKIIDFVTQKVSTGKNLKQVYYKDIRKVLGLSENQKIFGKDDQSIVKGKPTQRTLIKFFFLSEISKFSVLIKKVLSHSKALEIFVQIAEKIRLHKTPKPAFEALNELFDEYDIEVVNAEILALIKGKSAGTLAISHKVIMDALAHFKEGKSESEIKEILGVNTSEDYSTYPKSFKHLHLGKNNLFEKSQNHINNHAVKSLASWALQNIADLSWRHGAFDEIIIESARDVLPKSIQDAIDKSMREKEKEIDKIINTYKKEFPSVDRKMARKIKLLESQKFLDLYSGEVINMNDLFEGRADIEHIVPRSLGGLSTDYNLIIAHRNTNMQKSNRLPMDWLQGDTTYVNRVEMLFGEHKINWKKRKNLLATSLDEIYVEVQDTKSLRATSYLESLVGEVLKMFYPFPNKEHQKNGISVRSVPGKTTSKTRSWLGIKSKSRDTNFHHAEDALILATLNRGWQNRLHRMLKENYGKSAEELKKLWQKYTPHIEGITIADYVKEAYERFLSKGEGSIWYRDMFDGIRSISYWINKKPLSASSHKDTVYSAKHKDPQNNEKILPTVRKSILGAFSGLDILKNRHKWNKEAFMKVYEKDIEQKLWLYRLGNTNDPVLRAIQERANAIGSLIENYIFKDPQHDKAVDELYQKEIRNLLHDAIIAGGKPVYKVSFVDDTFSPIEIERGKGNKVLVRTDDNFLAVMFEKGEKEKLIISKIDMNSLHQLKKQNAMIVYPNEVIYLFNKKKIIHYGALRSFLIKSSGARQIALFNPRFPSNPKSQPRNFSDGKSIKSVSIGSTTGIIKVQLDMNGKMKSYQKFGLIPKELEEAFLKESGYGGMEDNTDN

SEQ ID NO: 820 - protein, 1131 aa, unidentified
  REGION 1..1131: note = Description of Unknown: Cas Enzyme sequence
MSKKILALDLGITSLGYSILEELGEHSYSCLDSSVIMRDAPYDKDGNSNQTVYRGQKSQRALIHKRQTRIKNTAKVFEKFGILDFASCMLVQHDNNITDKWRLRAKDALQRSLSPQELFAIMSHMAKHRGYKSIATEDLLYELEMELGLIEEHVNDDEAQKDEKRQVYAALNKVENLKKQYHSETISEVIHRAVQEGKLHSYRNHDDYEKMIRREDIEDEIETIIQKQCEFGALKLTSSRCSEFIEALHEVITDQVMPENDTSLFGKCAYYPTEIAAPKYSYLYDLFRLYKTVSDLKITNFEIETEDREKIIGYLHQKIKNGKNINQITYKEVRKILSLNDNQKIYGKDDDIVIKGKSSARSLIKFFFLSDIAKFPTVVQKISQHEASIDLFGKVSELAREHKTPRPAIDAIEELLSLHGIETDKSELLELIRNKKPGTLSVSHRFIIDALPHLQEGKSETDIKEILGVKISEDYSSYPKSLKNLHLGKDNPFEMYQNKINNHAIKSLGSWILQRIADLSWRYGAFDEIIVESARDALPKSIQEAIDKGMREREKEIDKIIEAYKNEFPTIDRKMAKKIKLLESQKFMDIYSGDMINISDLFEGRADIEHIVPKSLGGLSADYNLVIAHRNSNMKKSNLLPMDWLNEDSGYVNRVESLFKEHLISWKKRKNLLAKSLDETYVEVSDTKALRATSYLEALVTENLKMFYPFQTQAHRANGVAVRNIPGKTTSKARSLLGIKSKSRDTNFHHVEDALILATLNRGWQNRLHRMLKDNYGKSEKELKTLWEKFTPHIEGVAIGDYVKEAFERFMSMDEESLWYRDMFGGRRSISYWINKKPLSASSHKDTVYSAKHAVPTLRKSITGAFDGLGIVKDRHKLDGEYFKEIYEKEIRKKLWLYHIGNLNDPVLRAIDNRADEIVQVLHRYENGDIKKDKELDETFVNELNNILRNPIDVDGKIVRKTRFVYTKLNAVEIDRGLVETDKNMLGVFISKAENNRVKIERMDVNNAPKLLKRNSGLKVYLNEMIYLFNEKKVIHYGCLRSYVEKTGNSKLVALFNPRFPASPKSQPKMFSTGSQIKQVSVGSATGVIKVHLDLSGQIKSYEKFGMISKELENEFLQECGYGSMEKHPDH

SEQ ID NO: 821 - protein, 1046 aa, unidentified
  REGION 1..1046: note = Description of Unknown: Cas Enzyme sequence
MAGNSLKYRLGLDLGTNSIGWCMLRLNSDNEPTAVIKSGVRIFHDGRNEKTKEPLAVVRRNARSIRRNLDRKISRRNHLLNTLIKYSILPSDENERKALAVLNPYELRSRAANEKIELFELGRSLMHLSKRRGFKSNRKVDKEESSGKIKPAIERLKNKMQETDKKTAGEYLYFLLQNGQSVRARLGKIDGKEGYEIYLDRSIIEEEYNIIMNEQKKYHKELTDDILNEIFNIIFYQRQLKPQKVGKCSLVPEETKLRKAHVLAQSFILLQKVQDLRVFDNNMLEFRPLNNDEKEILKRELKVKKEISYENIRKLLKKYYENGKYGMFSHETTDGKLQGNKTNVIMSSKDIIGESWYDLSPEVQYEIIEELFSDKDNNELSRLYAEKYNLNESQINGLLNKAVYKLDSGYIRYGKTAVEKLNSIMDKDNLDLHYAREKAGFGKENVPAASEFLEYYGKVLPNSVIDPQIENPKNDEEIYGKIANPTVHAALNQLRKLVNELIKLYGKPEQIVIELARDLKNSRKAKDLIKKKIAENKKLNEEVDKIIQEYSETHHTQIVKNKLNRDKVKLWLELSKDVLERKCIYTGEQISIAKLFSDDVQIEHIIPYSKTLDDSMNNKTLSMKKANYYKGNKTPYEAFKDSKDGYNYDDILARAKLLNNNSKFKRFTKDAMDIYNKDGKDFIARQLADTQYLSKLALSYLQSLYAEDKYSSLWTIPGQLTALIRNYLGLNTLISEDDSKNRSDHRHHAVDAFVVAITSRSLLQKISYAASLQEDLDNRNLSSYRNKLLEKMPEPFPNYRKSLQLSINNIKTSHKADRSISGKLHEDTAYGIVEDNDKYNVVTRWTLDKFKEKKHFEMIRDNELKEIACSDKELFNKIVDEKSIKGIRVLKSENPVIKIKDKSGNEYKAFAGGNNICVEVYEHNTGDRDIEIISLFDASQHNFIPNWVKNYPNAKLIMRLFKGDIIGYIENRRYKYCLIKGINYVANNLKLTPINKVGDEFRIGFKTLFGQDISKKELNAKQFNISVTGIVTKKKTADINFWKNRK

SEQ ID NO: 822 - protein, 1087 aa, unidentified
  REGION 1..1087: note = Description of Unknown: Cas Enzyme sequence
MTINNVDKNINSFTRIALDIGTTSIGWALLKTDEKGEPLGIIDNGVRIFSSGRDDKTESPLNQKRQEVRTARRNRDRTTQRQKLIINTMIKIGLMPENKDERKKLELESPYELRNNALNEILPPYHIGRALFHLSQRRGFQSNRKSEDGNEGGAIKIAIAKTKQLLKENNSKTIGQYLYKRYKNNENTRIRNISDKNNKFEYDFYLHRSMLQDEFDSIWHKQAEQNNELFNDENYNRLKNVIFYQRDLKSKKEHIGYCTLFYTDKKLRCARAMPSFQRFRIAEQLIKLEYIQNGRGKKLVELSPELFKKFFDELASGKSLSFKQMKKQMLKAGVINDDRESFNLESETFKEININETANKLAVKKKKDNNNQPILPEFNNWDLQKQNNFIEILLSENDDEFVKTKLTNDFKLTDDIAQKCIDTQFASGYGNLCIDACEKITDVIIEQGLRYDEAVKEAYPNKHHSNIKFGDEKEDEKEDEKEDELPYYAKCLQEHCTGGHGDENTQENYENPYIKDVKVYGRIANPTVHVGLVQLQYVINDIISIHGKPNFATVEFANELKNNQKQKDIYKKNQKKNQAKNEIFKKEIEDLGEQSNRDNMLRMRLWYELDENNINNRRCIYTGKQISSRMVLSSEVEIEHILPFSRTLDDSSANKTLSMRTANRYKSNRSPYDAFSESNDGCYDWDEIYTRAQKLPKNKKMRFNEDAMEKYKDSGSIKDRQLNDTRYLTKVAKKYLALIIPESERNINVIPGRLTAMLRGKWGLNHILQHENYGSSNKNRDDHRHHAIDAIVVGCTTRGMLQRVASKIGKNFERNDKLLADIATPWDNIINDVKKSIDKIIVSYKSDRYKQGRLHEESFYGKEADCFDKKGNKIENKIVASIRRPLSYFETSKKVDEIKDEKIKSEIKQDIAYIKGDIQKAVKNFASKKGIRRLKTIQVKENLIKIGDKKTKGYERYVIGGKNWCIDIYQKLNSDKWEGCVIQTHYANQNNFVPDWKKNNPTAKKIMRLHIKDLIITNDNKIMCLRSIGNSSAIHFYLHNESNVPKREKELRHKGNYLQASVSKLQELDICKVDISPAGRIQKRIRK

SEQ ID NO: 823 - protein, 1078 aa, unidentified
  REGION 1..1078: note = Description of Unknown: Cas Enzyme sequence
MTIINVDKNINSFTRVALDIGTTSIGWALLKTNEKGEPLGIIDNGVRIFSSARDDKTESPLNQKRQEVRTARRNRDRTIQRQKLIINTMIKIGLMPENKDERKNLEKENPYELRNNALNEILPPYHIGRALFHLSQRRGFQSNRKSEDGNEGGAIKSAIAKTEQLLMENNSNTIGQYLFKRYKNNENTRIRNISDKNDKFEFDFYLHRPMLQDEFDKIWHKQAEQNNELFNDENYNRLKNVIFYQRDLKSKKEHIGYCTLFYTDKKLRCARAMPSFQRFRIAEQLVKLVYIQDGYGKKLVELSPELFKKFFDELSSGKSLSFKQMKKQMLKAGVINDDRESFNLESETFKEININETANKLAVKKKKDNNNQPILPEFNNWDLQKQNNFIEILLSENDDETVKQQLINDFKLTDEIANKCLSINLASSYGNLCIDACEKITDVIIEQGLRYDQAVIEAYPDKHHSNIKFGDGSFKKLPYYAKHLQEHCTGGHGDENKQENYENSHIKDIKIYGRIANPTVHVGLVQLQYVINDIISIHGKPNFATIEFANELKNNQKQKTNYENNQKKNQAKNEIFKKDIEDLGEQINRDNMLRMRLWYELDENDINNRRCIYTGTQISSRMVLSSEVEIEHILPFSSTLDDSPANKTLSMRTANRYKLNRSPYEAFGESDDGYDWGEIYTRAQKLPKNKKMRFNIDAMEKYKDSGSIKDRQLNDTRYLTKVAKKYLALIIPESERNINVIPGRLTAMLRGKWGLNQILQHENSGSSNKNRDDHRHHAIDAIVVGCTTRGMLQRVASKIGENFEKNDKLLADIVTPWDNIINDVKKSIDKIIISYKSDRYKQGRLHEESFYGKEADCFDKKGNKIENKIVASIRKPLSYFETSKKVDEIKDEKIKSEIKQDIAYINGDIKQAVKNFASKKGIRRLKTIQVKQNLIKIGDKKSKGYERYVIGGKNWCIDIYQKLNSDKWEGCVIQTHYANQNNFVPDWKKDNPTAKKIMRLHIKDLIITNDNKIMCLRKIGGSSGIHFYSHNESNVPKREKELRHKGNYLQASVSSLQKLDICKVDISPAGRIQKRIRK

SEQ ID NO: 824 - protein, 1008 aa, unidentified
  REGION 1..1008: note = Description of Unknown: Cas Enzyme sequence
MKRVFAFDMGKASIGYCVREDDEIKKLGSLIIEKDHSTIEDNRNRRRVFKTIDCHKHREKWFAELWQNAGLNILDCNDEKFKKEFAAKNEDTIYNSIVLRCALIQGKKLEEWQIYKALHNAIQRRGYDTELVWANSTDDEENEKAVKKYSCKDDIELINSEEYKYSCFYDALLLGLWNEQNPNEFKRSIGLNPEKVRISGRVAPRALVVKELTKLWEEAKKQLPQLEKISVEEFLYGEYREAYGSYSNPEWIQYRGTNRDWQGVLGQKIPRFDNRVIAKCKLLPKRNVCSADTIENISFTLLMQLKNFRYTNAFTFESEQRLAPYDIKQIYENKLPEWVQKLTDYRKGIIKNPGFTISKTDIESVIGKKIIKDKMESFKANISGRSSFCRRAMQIMIDILINCIEPSKVDIEKYLDKDGTENGITKEEIQTMLDKLGDWNSLSIPDNRYETAELAQNADKESDILIGNITNPVVRNRLQIFKNLFIELLIDGKPDEVIFEFVRDGADNSLFGSIKANNTAKYMKDQEKINEQIKQELDDANAYSETNFLKWKLAKMQDCKCIYSGERIGINDIDNCQIDHIYPRTLGGNDALYNKVLCYNKENQDKAGRTPYEWLFNDKERWAEYSTRVLNLKGKLGRKKAQLLVLPPEKCEKLIESYNGLAETAQVARVASAITHFLCGWGMQTEGSQRHVFVENGSMTAKIRNIYKLNAILGNDDKKNRSNPKHHALDAICISYSRNLKLNKEKHKYYVEGLNRPYIEQKIAELMPFPYTHKKPLKANIRPLETIYGKRVIDDKVYITSRTSLEDIKQDSKAIRNIIDTVIKDDLTLKLEEKLSAQDWKTMLQNYVHPKKKTKVKKVLTIVSEGVLETDLNGRERIGEYCDFGTKCTKGQFKHSKGHKGQILYYDIKGSIRVMPIFANKSTKEVKDALIDTGCKLYNGGEVFYSGCLVEIPNEFKAGAITYPKGIYKVRTVMTDGKIKLENNIGQEILTSAKNLTMSGFYKSKLKN

SEQ ID NO: 825 - protein, 997 aa, unidentified
  REGION 1..997: note = Description of Unknown: Cas Enzyme sequence
MNKKVYAFDLGKASIGYCAREGFNILDLGSLIINKDHAEVVSNRDRRRVHKTLLAHRTREEFFNKLWKDCGLEILDKSDKRFTIEFAKNNDSILYNSILLRIALLQNKPLEEWQIYKSLHNAIQRRGYDANLVWANDSDDEKTNKELAARYMQDEAGIELITNDEYKYPCYYDATRLGLWNEEAPNKFNRHIPLTDVTKVRTTGLVAPRQLVEKELTQLYLNAQKQLPQLNKYSVEYFLYGKYGRAYATFRKPEHGREKDYGVLGQKIPRFDNRIISKCKLLPKRNVCKAATLENVSFTLLMKLKNLRFTAPDGNKHMLSADAIREIYENWLQESNNGEKLNTTITKTKIEKVIGFKMLDDTKNINETLKANINGRSSFCRRACQIMNKIILEGIENPATMDVAEFTDDITAHNGITEAEIREMLSKIGTWDNLYIPDNRYEMAELSSDDRQKTDLIIGKITNPIVRNRLQILRDKLLELKSEYGTPDEVIFEFIRDGADNSLYGAKKSNDYLKNIKENEKENLEIKKELEDVDRYSPTNFEKLKLLRMQGGKCIYSGKPICIDDFDKCEIDHIYPRTMGGNDALYNRVLCYSIENQNKKGRTPYEWLSNDKEYWSAYVDRLNKIKGSLGKKKFELLTSKPEDCEKLIESYNGLAETAQIARVAQQLAAFIFGLGMQTEGDKRHLFVNNGSTTAAIRRRYGLNKLLGDDVKKNRENDKHHALDAICISFSRDFKYDEKSKKDVIEGFTYDFVKKAIDELIPYPYANDKQFKGNIRPLETIYGYREYGNKKYITNRVDITTIEQKEKKIKTIVDEYIKKDLLDKLNLSSSEWVELMKNYKHPKKHTIVKKVLTLVSEGEISKDSNDKSRMGEYADFGTKGVANQFKHSKGHKGQILYYNEKGAIKVMPIYANQKLSDVKQKLMSMGCKLYKKGMMFTAGCLLNIPNDFYVSENLYTSGIYKLRTIMSSGQIKIENSNGKEIITSAKYLTDANFLKYKN

SEQ ID NO: 826 - protein, 1068 aa, unidentified
  REGION 1..1068: note = Description of Unknown: Cas Enzyme sequence
MALVFGLDIGIASVGWAAIDASQEIPLLGLGSRIFVSAEVPKTGESLAKPRREARGMRRRIRRRAHRMARIRRLFYRVGLINDVVPEVLADSTADDLTPWLLRADGLERKLNQRDWARTLLHIAKHRGFKSNRKSEVSDEKSEGGKLLKGVTGNAKLLIDKGYRTVGEMVWKDVKFADHKRNKGGDYSHTVARDDLLQEIQSLFEAQRNLGNSHTSKDFEAEYTKIFASQRPVDDGEIAEMVGDCTFEVGEKRAAKATYSAERFVLLSRLNNLMLIDAGERRVLDTEQRKIIETMAYKSAKVKYSQIRKALELPESIRFNLVQYKSGEIDKAEDTTFAELKAYHHMRLAITKACGELVWGNLTNQPDKLDAIATALTWYKSDDKIREILAPEQLEPTLLDAVLGLSFDKAVALSLKALRNINPFLAQGLRYDEAALAAGYDHSAPTEAQPQQFLPYIPTDEVRNPVVLRALTQARKVINAMIRRFGSPTQINIELSRELSQPYSERKDIEGKQKEFQAEKERTVKQFNDTFGRDPRGDEFTKFRLWREYNYCAYCGVYLEPARLLEEGYAEIDHILPYSRSMDDSLNNKVLCTSKANRDKGNKTPYEYLNGASQSQLWHEYKVRIETHKAFRQAKRNRLLRVDFEEKAEQEFRERNLNDTRYIARYLQEFVKTYLQFAPSENKIKVQTRNGAVTSFLRAHWGLLKVRADGDLHHALDAAIVACTTQGFVKKVSDYSRKKELWFSDLKSSDKKLGDNSRNLEIIDTQTGEITATNYQKKDGRDFPLPWENFRVDVKDALLDVFVSRAPTRKATGGVHDEKIRSTKKLMSDFITSSKMNLADFKIDSKKYKTTEALIKLLDGIPEKETRNANLYQALKKRIETGGKEPFAKPFYLGKNGEESDDAFGRLIKGVKLERTTKTGVLVRGGLADNGEMLRVDVFTKAGKFYLVPIYLADRVSGVLPNKAIKQAALEQDWPVMDGSYQFAFSLCNNDLILIADKKGEASFIRGYFKGAHRGTGNINIEGHDRSWKKEGVGVQNIGTFKKLQVDVLGNVYEVKKEPRYGLAESAD

SEQ ID NO: 827 - protein, 1210 aa, unidentified
  REGION 1..1210: note = Description of Unknown: Cas Enzyme sequence
LDLHAGRIWTGVSVFPAGVEESEDKRGEPKNRKRREARRLRVTLRRRSRRKRALRAILVRSGLLPKDPGEFQRLLKGTDPWELRVRGLDEALSPHEFGRVLLHLAQRRGAFGLRNEDRAESGRVRESVERIRQELVHFRTFGELIVRVRTECTQWSEQSGRRVEIRGPIRNRRESYKFVPDREMIREEFRRLWETQRGKEGPLASMLTEDLKKSLDDPSGDSYWLNRGVLFAQRRPRWDAGALARCPLHPTDRRVPRADMYASRFLVVDRVNSIRVVEPGGDNRPLTREERDRLLGYLSGEKVPKAVKPRHLRKALGWKDGDPRRLNLESDPDMEIPTDWFEREIVQKAVGRENWERLSEERRSLLNRLILRYDPGISYVRGGPAHGTGSGPASAARDPASQLDYCLDRFVGLEKEVRDRVRAAWGNRPPAEDRVALSRRAVRNLLKVMDRAEPDPSWPGGFLNVIQARKKIARDPDFLDATTGKPLDEHTRSRYERGTIGLVAGGRRFLRKHPGCLPPPPVQQNPVVRKSIHEVRRHLEEILSLGIRPDRVCIELSRESRLGAAQANALLKKNRLRDRIRKEILGHFGGTNLSEHQRRAAVDRVLLCIQQGGRCPLCAHQGGSGITPAMAWHGQDCELEHIVPRACGGGDGYSNLILAHAACNRKKARRTPRDLWGAEFGKGMEAVEQIYRGRSRLGPDDRQATGIDLWRLYFGPKEDEAKIAQFRKTVTDLSGMTPAQMAATSHASRQLASYLADALFDGEGLPERGGEQRIFFTKGVWTARFRDEWGLHFGPPGGLAASKEMVHSPERGRKDRNDHRHHAVDAVVIALLPLVRQLWDDRERKAAEEGVNTADPEELEAYRRRNRIPVPGAFGAGDFRGAVHNAVYGKDGERPVCHRPAKRKITGALHEESLFGPVPGKNRLAVRRIPVEDLKPAHLRLPAEGASGGTCKEDPTPRKSGLVRDVALRLRLRECLKEAGLDPDRFSQTQVREAYDRGFFRQKSGVPIHAVTLLKVIERPVVCRRVRPVHGEMREEPDDHPRSNRIYVGGNNHHMEIREGPDGKWRGKVVNVFEAARRNLERIRAIKSGMDPAEADARHPVVDRRDTPEGRFVMSLCEGETLYIGHEGRDDYFVVAKLNAPNRVLLFPHWDARRATEERDDEGGKIPGSKRKELGPLTAPRLQGMGPEGKPHPLKVRVTPLGRVIVLQKD

SEQ ID NO: 828 - protein, 1112 aa, unidentified
  REGION 1..1112: note = Description of Unknown: Cas Enzyme sequence
MWRLALDLGAASLGWIAVVLTDDGRPKSILAIGSRIFSASEIGAGRNAKSGESLAVARRDARAMRRRRDRFQQRQRALLKYLVADGLFPEDEGERKALVLLDPYALRARALDEALTLPELGRALFHLNQRRGFKSNRKTDRKADDDAGKIAVGIDRTRDAITEAEAQAGAEPGSWTYGKWLHERRAAATDANTVPSVRTRLRPETGEGAKGDGYDFYPGRALIEEEFDAIWQAQAPHHPDVITDEVYARLHEIVFHQRPLKAPQIGMCTLIPGDRRLPKAHPLFQRRRLLEELNALMIVRPGEVAQRLTRDERDLLVLKLKDKAKVSFASLRKVLKLDPDARFNKESENRPDLKGDEVTAVMAAKTRFGTRWLHLSVEEQYAVIEAREQVESDAQDAAFREWLATTYDLTPDQTRAIANAPLPQGYGRFGKDATTRLIDALRDGERDGRVLVYSEAVTEAGLGHHSDHRTGEIFADAQGRPTLPYYGVALERHIMPGTGDPAHPEDMRIGRLTNPTVHIGLNQLRRVVNRLIRAYGPPAEIAIELARELKLTDDDKQRQNRENNLNRIAAERRSEKLIAIGQPDTGGNRALLKLWEELNQDNVLDRRCVYSGVQISIDMLFSAAVEIDHILPFGATLDDSNGNKILCTREANREKRKRSPYQAWGHTDRWDAIAARAAQLPRNKRWRFEPDAMEKFKDESGFQARHLVDTQYLARLSREYLATLYPGKGEGTGHVWVSPGRLTEMVRRKLGLNDLLPDHNYAGGADQAKNRRDHRHHAVDAAVVAIVDRGLLNEMSRVSGQSGAEGREKIEVPLPWPGFRDDLRDAINAITVSHRTDHGTVTKTGLPKGQDATAGRLHNDTAYGLTGEKDARGNSIVVRRVPLGSFKKLADLDRIRDADLRAALYRHLDGREGKAFEQALATFPDRDWHPYGRIRRVRVVEPLTVIPIRDRNGAIYKGYKGDSNYRYDVWELPDGKWVTSWRDREGQAVSSVVSMFDAHQSADQPRPHPAARKVLSLQQNDLIAIERDGEARRLMRVVKFGQNGQITLAEPQQAGDLKRRDAASNDDDPFKYIAPTCGGLKTARARQVRIDELGRVLDPGFPARTTRRATRS

SEQ ID NO: 829 - protein, 993 aa, unidentified
  REGION 1..993: note = Description of Unknown: Cas Enzyme sequence
MSSYTLGLDIGSNSIGWALLQGGQEPSIIDLGVRVFPEGIDRDTQGAEKSKNATRREARGSRRIRYRHNLRRDQLVKILKSAGLLPEDDIALGELFNRIDPYKLRARGLDEKLELYEFGRALFHINQRRGFKSNRKTGKAKEDGKVATEAGELQERIDKAGCRTLGEYFANINPEENRIREQYTFRSMYEREFDLLWERQAKFYTNLLTEDLQKKIRDEIIFYQRPLKPSDDLIGQCELEPEEKRCPRGDWYARQFRILQDVNNLKIYNPDGSEAKLTDEQRQLVLKELRQKKEVKFEKIRKMLGLMETQEFNLEQDGKVKLLKGDDFSVAMRNKKIFGPKVWDEMDGQEKIELNTAVLELDDDELIEKMASDYSFTGEQIERILKVSLPQRYMSFSRKAIMKLLPFMEEGALTSDAVRAAYPDRDRKAVRREVDKLPMSDDLRNPIVNKALFEVRKVVNATIREYGKPVKIVIEMARDVKGSKRERDEIQFKMRVNEKRNEDARTRLIQDMDIPNPSRDDIIKYKLWEECGKKCPYTGKSISQTALFGPNPEFQIEHILPYNRSLDDSYMNKTLCDVYENIHVKGDKIPFEAYSLDEEKYEQIKQRIKVLPWPKRRKFLQREISLDECIQRELNDTRYICKEVIKYLKQLGVNVRGTKGRITAELRHQWGLNSILDLVSVEMKNRNDHRHHTIDAAVVAITKNEHLRRLAKSKYSKVDSSFPEPWLHFREELAEKVKHINVSYRATRKVSGQLHEETSYGLTEQKDDKGQDIFVYRKKLEDLTIPMVAKIVDPVVRQIIKTRLSKHGIEPDKNQKIPKEVWSEPLYMKQTKSNKKVTIKKVRIRDVFNNMILLKDKFGKPYRAVASGNNHHIEIFEYKVKQGQTKRDGKVITMFEAVHRNRRGESVVQKNYGPHTTFICSLANNDMVMMPNTNGDMDLYRVQKMSINKQIYFRHHTAATINDDSTLIRKQASSFKGYKVAVDPLGRIWPARD

SEQ ID NO: 830 - protein, 1204 aa, unidentified
  REGION 1..1204: note = Description of Unknown: Cas Enzyme sequence
MSSYTLGLDIGSNSVGSAAVDLERRLIRMGVSVFPAGVEEQTDKRGAPKNQARRSQRQQRRSIERRAKLKRRLRQYLIKKSWIPTEKKKLQEWQNLNPWILRKDALHRELNELKFGRILLHLAQRRGAWWFDEEPEETEKTKKKKKDPTEIPGTVEYTKAIMKEKKAETFGELIAIEYETRKKATGNKDKKRNDRVRNRNNAFGEKVSEFVADRHMVLDEFLKMWERQKSFGGKLAKQLTNEVKTEIYNPQKTNTWRRQGVLFSQRKAYWNLGTLGRCDLEPTDRKSPKADMYAQEFLVLTSVNNIRITPPGEPSRKLTDEERDKVVNAVKKQKTASESTIRKALRINKGANKTLYTLNTDGDEFTVNGDWFYSQIVSDIFGEEVWAAFDSKMKESVNRAILKFDPNDEDDKKKIKTGCNEWWKLDDKQTEKFIAAWKKRPKKDSRVNLSRKAIKNLLPYLREGWSVTEARDMYAEDALNDADDLTRRRYSTKDVAVNKRIRQFLKKHPDLLPPVSEGISNPVVRKSIHEVRKHLMEYIRQFGKPDRVVIELAREARQSEKVIADRMRKNKAIDALKKEIIKTHNLNAPDITSTQKEAAIKRIRLCRQQRKMCAYSGATITDKTAADGSGLEVDHIVPRSRGGNNGMNNLVLCYSTANQGKGQRTPIDWLSKENFEKLKQIFKHLKPKQLKSGEKPPTATKDNVDMVDNEKWKNLNRKTPKEGFTEEQLRSAAYAATQTTDWINKVLYGSEDRSKRYVFASRGDYTGILRRDWGLFFDENGERSEKGRKNRGDHRHHAVDAAIIAMTTQCLPKIKQSFIDFEKQKENKNVKSQWKTVEQPWDGFSEQIAEEYKKLKVSHRAYNKQIAGYLHKDTIYSPAVIYERHKKDDKKKGIKKGDVKIDKNGKPMLKKGMYIKSIPAIGIKQNHLRMPDGWDKLKEEYKNTTIKPQRKAIRKKMLSLEDVPPAKPGIIRDIELRDKIRDWLKEHNFADIGKAKAYIKENGLIINGTPVRKVRLLWKLNEVVEIPRKSFNFETGKIVKDNNHKALRVYQTQNNHHIEIRENNKGKWVGEVITNFDAAKRVRVKQPKPKPQGWTPPPVVNREDTKKGRFVMSLSKGEVVHMKHPDTQEANYFVVFKIDSSKTIHFTPHTDANPASSKKKDIKLREEIKVPPEKLRKTIIFSENGVPEKVKISPLGEVKVLVKD

SEQ ID NO: 831 - protein, 986 aa, unidentified
  REGION 1..986: note = Description of Unknown: Cas Enzyme sequence
MKSYTLGLDIGSKSIGWTLIRGKPKPSIVDIGVRVFPEGVDRDTKGAEKSKNATRRDARGARRVHQRRNLRRNKFVKTLRASGILPEDEQELQELLKKEPYQFRAKGLDEKLELFEFGRALFHINQRRGFKSNRKTGREKEDGKVAKEAGELWQKIKEAGCRTLGEYFARLNPEEQRIRDQYTFRSMYEEEFDKLWEKQSEYYPEVLTDELRGKVRDEIIFYQRPLKPTDDLIGMCDLEPGEKRCPRGGWYARRFRILQDVNNLKIHSPDGTERGLEDDERRIILKELDAHEKVKFSSLRKKLGLLETQEFNAEYEINEKGKKRDKLKGDEFSAAMRSRNLFGAKKWGSMDEKEKIELNNACLELDDDELVEKMIDEYGFTKEQAERVLKISLPQRYMSFSCEAIRKLLPLMEGGKRTDEALDEVYPDRNKRDVGEGKDKLDLSEDLRNPIVNKALYEVRKVVNAIVREYGKPKKIAIEMARDMKGSARERKELHFKMLDNEKKNKEVRQKLKNDIGIEPNRDNVIKYKLWEECGRICPYTGKQISQVDLFINPVFQVEHILPYSKSLDDSYLNKTLCCVNENRLKGNQTPYEYYHGDKEKFEETKQRVNRTAMPYWKKRKFWQEKVDTDKIIERELNDTRYICKEVVKYLKQICRNVTGTRGKVTAALRYQWGFIKDRDDHRHHAIDATVVAVTKQKHLRELAQSKYSSEGIRFNPPWLHFREELAEKVKHLNVSHRATRKVSGALHEETSYGLTGQTDEKGQDVFAYRKKIEDLTGPMVGKIVDPVVRQIVKDRLLENGIDPGKVKKIPKEVWNKPLYMKKTKSDKKVPIKKVRIREVFNNMILLKDEDGRPYRAVAPGSNHHIEIIEYTDKKGNLKRESRIVPLFEAVQRNQKGKPVVRKDHGADKKFVCSLAINDMVMMPNKKGEMDLYRVQKMSVNKQIYFRHHTAATIDDDSTLIRKQANLFDGYKVTLDPLGRIHRAND

SEQ ID NO: 832 - protein, 1001 aa, unidentified
  REGION 1..1001: note = Description of Unknown: Cas Enzyme sequence
MDSYTLGLDIGSNSIGWALLKAGEQPEIVGMGVRVFPEGVDRDTKGLEKSKNTTRREARGARRTHQRRNLRKRQLLGALRFKGLLPSDDSQLISLFHTNPYELRKKGLDEKLEPYEFGRVLYHLSQRRGFKSNRKSGKAKEDGVVIKGANALQTEMDAKGCRTMGEYFAGLNPEEQRIRGKYTFRSMYEKEFDLLWEKQKGFYLNVLTDELCKKIRDEIIFFQRPLKPTDELIGECELEPGEKRCPRGDWYARQFRILQDVNNLIIQNPDGTEQKLTADQRKILLDELGQKEKLTFDKIRQKLGLMETQKFNAEYKIGRSGKTVESLKGDNFSWSMRSKNIFGPKKWDAIDEQEKMKLNEWLVELEDDQLKEKLRNEYGFDDKQIEAVLKISLPQGYMSFSRKAIIKLLEFMEQGALTSEAIDVVYHDRKAIGEESENLDTLPLPEDLRNPIVNKALFEVRKVVNAIVREYGKPAKVKIEMARDVQGNKRQRDELHWKQHENKERNEDARKRLKEDIGINNLTRDDVIKYKLWEECGKMCPYTGKHISQTALFGPNPEFQVEHILPYDRSLDDSYMNKTLCEVHENKDVKKNQTPYEAYSHEPEKYEQILERVNKSQMPYPKRKKFWQKEIDLDQHIARELNDTRYICKEVRGYLEQLGVNVRGTRGKITGELRHQWGLDGIFTELGVWRDDDHRRHAVDAVVVGVTENEHLRRLARSKYSVTGVFFEPPWSDFREEVREKVKHINVSHRVCRKVSGALHEETNYGPTGLKDEKGQDLFVYRKKLTDLTIPMVEKIVDRVVREVVKNRLTEKGVDLSKGEKIPKEVWNEPLYMKCKNNDKKVPIKKVRIRDVFNNMITLNDKSGQSYRSVAPGSNHHIEIFEYKDKKGNTKLDGDVVTMFEAVRRSQTGERVVKIDHGQGKKFVCSLAINEMFMLEVEGKEVLHRVQKIIHDGRIVLRPHTYGGKLSDSDSPPAIQRKSPNTLKGYKVTVDPLGRVWRAND

SEQ ID NO: 833 - protein, 1054 aa, unidentified
  REGION 1..1054: note = Description of Unknown: Cas Enzyme sequence
MRYVLGLDLGPSSIGWAAVKADEKGDFCGLATIKDGNNNIPAIGVRIFPAGVDNINQGQREESKNKKRREARSVRRMLRRRRARRSQLISVLITNGLMPTNDAEREQEQDKDPYELRAKAISKKLSLYEFGRIFLHIAKRRGFQSNRRQAEKDTEAGLVKEAIERLTQQIGNKTLGQFWADKLRENPLQAIRNRRGDYHWIAQRQQYQNELNAIWQAQSKFYPNVLTSSLKEKIFEIIFKQINFELSNTKKRKVIGTCTLIAGKPRLSMSSRKAQEYRLLQKVNDLKIYRKGTEVEFDRKKLYEELMISRERNFKQIRKLLDLNDDDRINLEYKKSKKLIGNQIDGLLASNKFFGKKVWIVLSEQKKEVVWDEIQQYLRNSNITGEQIAGKIKNEYGLKIGDINALEKLTEPKGNINFCEEAVDKILPYMREGRDLYEAIEKANFAKGWTQQKFLPLPSRDNGINIPNPIVTTVLFQLRKILNALIRELSRPEKIIVEFARELKASKDFREEIVEEQAENQSKREECIKRIKEYHRWDEDVEVSATDILKYRLWEQQKEYCAYSYPYRNISIGQLLSTDTEVDHILPYSMSLDNSMNNKVVCFANENQAKGQNSPIDWLGETSERFKKIAEAIEKGMFDFDKAKKERFFVHNEEIAEKYTPDRLLQDTSYIAREVRSYLKRLYPASEAEKCVKTTKGGITAELRNIWGLNAILREGEVGPKKRDDLRHHAIDAAVIAITEPGIIKKITDKLQKNWPRRPSRTVVDEPWNDFGPELAKATEKVNISHRVLRKVKGALHKETNYWKETNGPQAGKFITRKALDGKFTDDWAEQICDETIKNLVKERLVQNENDPKKAFKVKEPLYLPNKKGNPIPIKKVRVWQTSNTMVQLRPYIWTEPGSNHHVEIFRVKDEGKYKNKLVKKIWTTWETSQRIKKYCLRNNDNKIPNLIITQENPYPEQFKNVEFIMSLSAGETVKMIDRQGKEVLSRVIKMSGDKDSTTSIDILFWKVQAAKVEGKINQQTPNVYRITTLQDFDKLKMQKVTVDPLGRIRWAND

SEQ ID NO: 834 - protein, 990 aa, unidentified
  REGION 1..990: note = Description of Unknown: Cas Enzyme sequence
MDSYTLGLDIGSNSIGWALLDVGERPTIVGMGVRVFPEGVNKEKGQEKSKNATRREARGARRTHQRRNLRRDQLVKTLKKAGLLPEGNKELAELLSNKDPYELRKKGLDEKLDLYDFGRALFHINQRRGFKSNRKSDKKKEDGPIAKGAGELQKRINDAKCRTLGEYFAGLNPEEQRIREKYTFRSMYEEEFDLLWAKQSKFYPKVLTEELQEKVRDKIIFFQRPMRWDPKTIGDCVLELGEKRCPRGDWYAKRFRILQDVNNLKICNPDGTVDSLTEEQRQILLDELSKKKEVKFTSLRKRLGLLESQKFNAEYEVDEKGKKNEKLKGDVFCASMRSKKIFGSKVWDGMDEEEKIKLNEWLVEFEDDQIGEKLRSEYNFNDKQIESVLKISLPQGYMSFSRKAIQKLLPLMEEGKRTDEALDKVYPERNEYDEVEETNKLQLPKDLRNPLVNRAMFEVRKVVNAIVREYGKPAKIKIEMARDVRGTTRERRKSHFKMLDNERRNEQTRKRLIEDMKIVSPTRDDIIKYNLWIECGKICPYTGKSISQAALFGPNPEFQVEHILPYDRTLDDSFMNKTLCEVHENKDVKRNQTPFEAYGHDEEKFEQLKQRVNRTKMPYWKKQKFWQKEIDTDNIISRELNDTRYINREVVKYLKQICSNTSGTKGKITSELGYQWGFIKDRNDHRHHAIDAAVIAVTQPEHLRQLGKSKYSKGTISFQPPWPHFREELSERVKHINVSHKPSRKVSGALHEETNYGLTGLKDKKGQDIFVYRKKLEDLTNQMIIKIVDPVVREIVIGRLAEYGIDLAKDKKIPPKDVWSKPLYMKNTRSDKKVPIKKVRIRKVLSNAEGIRNQEGKVYRYVNPGRNHHVEIWEYTEGKKEGKRDAEVVSMFEAVRRSQSGKPVVQRNHGPGTRFVCSLAINDMVMMKNKTGEMDLYRVQKMDANKMVRFRHHTASTIDRKETYIDKTAHLFEGHKVTVDPLGRVWRAND

SEQ ID NO: 835 - protein, 1206 aa, unidentified
  REGION 1..1206: note = Description of Unknown: Cas Enzyme sequence
MKLLGLDIGSNSVGSAWVDTDKKLIEMGVSVFPAGVEESVDKRGAPKNQARRSQRQQRRSIERRAKLKIRLRKYLLKKNWIPTEKEKLQEWENINPWLLRRDAVRKELKKDDKFSAGEKFGRILLHLAQRRGAWWFDEEPEKTENSKKKKKDPAEIPGTVEYTEKIMKEKGAETFGELIAIEYENRKTNTANKKLRNDRVRNRANAFGEKESEFVADRHMILAEFLKIWETQKGFGGELSAQLTDEVKKEIYNPQKTNTWRRQGVLFSQRKAYWDLGTLGRCDLEPTDEKCPKADMYSQEFLVLTSVNNIRITLPAEPIRKLNDEERPKVVKAVRKQRTASEGTIRTALGINKGANKTLYTLNTDEDKFTVNGDYFYSQIVCDVFGEDTWVSFDSKIKDSVNKAILKFDPNEEDDKTKLSDGCKKWWNLTDEQTEKFISVWEKRPKKDQRVNLSRKAIKNLLPYLRDGWSVTEARNMYAEDASNGADDLTRKRYSTKEVVVNKQIRNFQQKHPGILPPVSDGISNPVVRKSIHEVRRHLMEYTRKYGRPDRVVIELAREARQSEKVIAKKVQKNKAIDGLKKEIIETHNFNAPNITSTQRENAVKRVRLCKQQREMCAYSGVTITDKTAADGSGLEVDHIVPRSKGGDNSMSNLVLCYATANQGKGNRTPIDWLSEEKFGNVEKIFKHLHSQKGEKGQRYITKDNVDMMDEAKWKNLHRRTPKEGFTEEQLRSAAYAATQTSDWINKVLYGSEDRNKRYVFASNGDYTGILRRDWGLFFDEQGERSEKGIKLRGDHRHHAVDAAIIAMTIQCLPKIKESFIDFEKQEENKNVKPQWKTIEHPWEGFSEQIAEEYKKLRVSHRAYNKRIAGHLHKDTIYGPAVIYERHKKDDAKKGIKKGDIKIDKNGNPVLKKGMYIKSIPAIGIKQNHLRMPDDWDKLKDEYKNAPTKSQRKAIRKKTLFLEDIPPAKSGIIRDIELRDKIRDWLKEHNFSDMEKAKAYIKENGLIINGTPVRKLRVLWKLNEVKEIPRKKYDFESGSIVKDNNYKTSRVYQTQNNHHIEIRENEKGKWVGEVVTNFDAVKRVRVKPPKPKPQGWTPPPAVNREDTKKGRFVMSLSKGEIVHMRHPETQKDNYFAVFKIDSPNTIHFTPHTDANPASSKKKDVKLREDLPLVPDDLRQSIIFNENGLPKKVRISALGEVKVLVRD

SEQ ID NO: 836 - protein, 1028 aa, unidentified
  REGION 1..1028: note = Description of Unknown: Cas Enzyme sequence
MRYVLGLDLGPSSIGWAAVKTDEKGDFCGLATIKDGHNNIPAIGVRIFPAGVDNINQGQREEPKNKKRREARSVRRMLRRRRARRLRLFSVLVANGLMPTNDEENRGGQNKDPYELRAKAVSKKVSLKELGRIFLHIAKRRGFQSNRRQAEKDTEAGLIKEAIKRLSQEIGDRTLGQFWSEKIRGNPLDAIRNRRGNYHWIAQRQQYKNELDRIWKKQSEFYPHILTDKLKKLIFEIIFKQIDFELSNTKKRKVIGTCTLIAGKPRLPMSSRKAQEFRLLQKVNDMKAYRKGREIEFDHRKLYEELMISKERDFKQIRKLLGLNEDDRINLEYKKSKKLIGNQIDGMLAGNKFFGKKGWLSLSEKQKEDVWKEIQDYLQKSDMTAEQLAEKLKNKYGLEIGDLNVLEKLSEPKGNLNFCEEAVDKLLPHMREGKDLYEAIEKANFVKGWTQQKFLMIPSRDNGINIPNPIVTTVLFQLRKIVNALIREIGKPEKIVVEFARELKASKDLREEITDEQAENQNEWERCAERVREYHRLDEDAEVSATDKLKYRLWDQQNGFCSYSLRKIGIEQLLSTETEVDHILPYSMSLDNSMNNKIVCFAKENQAKGQNAPIDWLGEDSERFRKIIEAIERGMFNFDKAKKERFFVHNEEIAEKYTPERLLQDTSYIAREVRSYLKRLYSASEAEKCIKTTKGGITAELRNIWGLNAILREGEIGPKKRDDLRHHAIDAVIIAVTEPRMIKKITDKLQGNWPRRPSRTAVDEPWNGFGLELAKAAVKVNVSHRVLRKVKGALHKETNYWKETNGPHEGKYITRKELNSKFTSSWAKQICDEEIKRLVIDRLAEYENDARKAFATDKPLYLPNDKGKQIPIRKVRVWQTSSNMMQLRPNIWVEPGSNHHVEIFEIKDKKGKTKQDGVLVTTFEACKRKLSGQPIVQKDQGADKKFIMSLSQKEMVLLKLDDGSEVLHRTQKMSQKNGKVTIILRPHTYGGKLSDYDKPPLIQRRSPSTLNARKVTVDPLGRIRWAND

SEQ ID NO: 837 - protein, 989 aa, unidentified
  REGION 1..989: note = Description of Unknown: Cas Enzyme sequence
MASYTLGLDIGSNSVGWALLDLGEKPRIVDMGVRVFPEGVDRDTKGLEKSKNATRREARGARRTHQRRNLRKGQLLSTLQVSGFLPKDDSELRSLFHTNPYQLRKKGLDEKLEPYEFGRVLYHLSQRRGFKSNRKSGKAKEDGVIMKGASALQTEMDSKGCRTIGEYFAGLNADEQRIRGPYTFRSMYEKEFSLLWTKQGEYYPDVLTVELQKEIRDEIIFFQRPVRWDPETIGNCELEPGEKRCPRGDWYARQFRILQDVNNLIIQNPDGTEQKLTADQRKILLDELGQKEKLTFDKIRQKLGLMETQKFNAEYKIGRSGKTVESLKGDNFSWSMRSKNIFGPKKWHGTDEQEKMKLNEWLVELEDDQLKERLRSEYGFDDKQIEAILKISLPRGYMSFSRKAIINLLEFMEQGALESQARTVAYPDRRTTDDENTLDKLPMPEDLRNPIVNKALFEVRKVVNAIVREYGKPARINIEMARDVQGNTRQRDELHWKQHENKERNEDARKRLKEDIGINNPTRPDVIKYNLWVECGKRCPYTGRQISQTALFGPNPEFQVEHILPYDRSLDDTYMNKTLCHVDENRVKHNKTPYEAYSHDPERCEQIKQNIKVLPWPKRQKFLEQEINLDTHINRELNDTRYICREVVGYLKQLGVNVRGTKGKITGELRHQWGLDGIFEELRTMRDDDHRRHAVDAVVVGVTENEHLRRLARSKYSVTGVSFEPPWDNFREDVREKVKHINVSHRACRRVSGKLHEETNYGPTKEKDRYVFRKKLEDLTLAMVKDIVDDVVREIVKKRLEEKGVDLAGKDKKPPREVWKDLYMKTTKSEKKVRIKKVRVYNVAKNVIAMKDLSGQVYRYVEPGSNHHIEIFEYTDAKGKVKRDGEVITMFDAVQKSQTREPVVNRYFGHNKKFIFSLAINEMFMMHTKSGSKELYRVQKISGNKQIFFRHHTFAGELHKHKGISKYPNSLNGYKVTVDPLGRVWPAND

SEQ ID NO: 838 - protein, 996 aa, unidentified
  REGION 1..996: note = Description of Unknown: Cas Enzyme sequence
MNNYTLGLDIGSNSIGWSLLDLGQKPKIVDMGVRVFPEGIDRDTQGLEKSKNQTRREARGARRTHQRRNLRKEKLLNTLQTLGLLPNDDSEMRSLFQTNPYQLRKKGLAKKLEPYEFGRALYHLSQRRGFKSNRKSGKPKEDSVVIKGANALQAEIDNKKCRTIGEYFAGLNPEEQRIRGQYTFRSMYEKEFDLLWAKQAEFYQEVLIENLRKKIRDEIIFYQRPMRWDPKTIGDCELEPGEKRCPRGDWYARRFRLLQDVNNLIIQNPDGTEQKLSNDQQKIILDELSQKDKLPFDKIRDKLELMEIQKFNAEYRRGPKGKRVESLKGDVFATGMRSKNIFGPNSWESMNEQQKIKLNDWLLELEDDQIKEKLGAEYGLDDKQISLVLKIPLPQGYMGFSRKAIQKLLPSMEQGKLTHEAIKEVYGERKTEGDEENLKRLDKPSDLRNPIVQKALFEVRKVVNAIVREYGKPAKIKIEMARDVQGSRRQREELHWKQRENEERNEEARKRLKEDIGITNPTRDDVIKYKLWEECGKRCPYTGKTISQQSLFGPNPEFQVEHILPYDRSLDDSFMNKTLCEVHENIHVKKNQTPYEAYGHDSERYEQIKQNIKVLPWPKQKKFFQQEINLDTHINRELNDTRYICREVVGYLKKLGVNVRGTRGKITAELRHQWGLDGIFEELGTWRDDDHRRHAVDALVVGVTENEHLRKLARSKYSITGGQFEPPWENFRNEVREKVKNINVSHRACRKVSGKLHEETNYGPTGKKDEKGQDIYVYRKPLDVLTVPMVNKIVDPVVREIIKGRLIEKGIDLKSGDRRIPKEVWKEPLYMKTKKSDKKVPIKSVRIHDVKTNVIPFKNNRGEVYRVADPGSNHHIEIFEFKDKKGNVKRDSKVVTMFEAVQRSRKGEPIVQRDHGTDKKFICSLAINEMVMMKNKKNEMDLYRVQKMDANKIVRFRHHTASTIEQKETYIDKTAHLFEGYKVTVDPLGRIRPVND

SEQ ID NO: 839 - protein, 1160 aa, unidentified
  REGION 1..1160: note = Description of Unknown: Cas Enzyme sequence
MKLLGIDVGSNSVGSAWVDTDQHLIEMGVSVFPAGVEESQDKRGAPKNQARRMHRSQRRSIERRGERKHQMRSFLLEMAWMPTESCEQKKWLDEANPWLLRAEGLDRKLTPYEFGRVLVHLAQRRGAFGFDIEEEEEDAGKIKNAIGNTREEMQRCKARTFGELMAIKFRERRKEVGRKRKNIGLPVRNRTKSSGEGTYEFCADRDLIWHEFEQLWNKQKSLGGELARDLSGESRKRLDDPSGDETWRYKGILFGQRKTYWDIGTMARCDLEPTDLRCPKGDMYAQEFLVLETVNNIRIIPPGEIKRPLATEERLAVIDVLKKQKTASESTIRKALGIDKGLKKTQYTLSLEKDPERGLNTNWFYREVVRGAIGEDVWQKMPLEKKESVNRGILKFDPQEQKDVRRLQEGCRKWWGFDEGQTERFIETLKKRPKIDDRVNYSRRAIKNLLPYMREGLTVNEARQRFCEDAENGATPEQRERYGFKASRANRAMRMYQEKHPDLLPPAPEDISNPVVRKAIHEVRRHIQAWMRKFGCKPDRIVVELVREARQAGIVRNKQLAENRKREKERKEIIGQFNLAGNTRTQQDKAVKRVLLCREQRQMCAYCGDANNTISEKAAAEGNGVEVDHIIPESRGGENFLNNLLLCHDKCNRGKGNKTPKEWLTDEEFRTLEQRLGHLKKGNQVKWDNLHRDAPNIDEFAKSQLTDTAYASRQVAEWLRAVLYDGEKDGIRKVFTTKGRYTSWLRRDWQLFPDGTDAWTVEKDRSDHRHHALDAVVVALSLNYLQPLAWSLEKFEQAKAEGKTSPKRQPLEPPKEWGTLESFRKQVVDKYEKLIVSHRAARRRIVGELHKDEHFGPIPGDNKHFTKRIFAAELTSNHLGVPKGWEELRAKIENTTSKAEQRHIRSQMLAIEDVKPEKSGIVRDRWFREELWHCLRENGFDPDNLGSNKDSKKKFKEFIKTKGLFLESGVPVRRITLLRTLGEPVHIPRKQFDMQTGTMKYDINPRSLRVCDSQNNHHIEIRENEKGRWTGEVIPNWKAALRVRPPKSSAKRPQVGVDRNDNEQGRFVMSLSIGEIVCMRYPPETQKPGYFVVFKIDKPDKIHFTPHYDAGRDKATEKCPKRKDIGLSPAQLQKLGVPPADYPHKVWVGPLGDVKPLLRD

SEQ ID NO: 840 - protein, 996 aa, unidentified
  REGION 1..996: note = Description of Unknown: Cas Enzyme sequence
MNSYTLGLDIGSNSIGWALLHFGQKPTIVDMGVRVFPEGVDRDTKGLEKSKNQTRREARGARRTHQRRNIRKQQLLSLLWSNGLLPNDDSQLTSLFHKSPYELRKKGLDEKLEPYEFGRALYHLSQRRGFKSNRKSGKAKEDSVVIKGANALQTEMDSKECRTIGEYFAGLNPDEQRIRGRYTFRSMYEKEFDLLWAKQMEFYPEVLAEDLRKKIRDKIIFYQRPMRWDPKTIGNCELEPSEKRCPRGDWYARKFRLLQDVNNLIIQNPDGTEQKLTDFQGKTILDELRRKERLPFDKIRQTLELLENQKFNAEYKIGPKGKRVESLKGDEFVSAMRSKNVFGPKRWDTMDEQQKIELNAAFIELEDDELTEKLKTQYDLDERQVKSAMKVSIPQGYMSFSRKAILKLLPAMEQKKLTHEAIKEVYGDRSTEKVEEGAEKLDSPPDLRNPIVQKALFEVRKVVNAIVKKYDKPSKIKIEMARDVQGSRRQREELHWKILENERRNEEARKRLKEDIGIKNPTRPDIIKYNLWEECGKRCPYTGKTISQQALFGPNPEFQVEHILPYDRSLDDSFMNKTLCEVQENIHVKKNQTPYEAYSHDPERYEQIKQNIKVLPWPKRQKFLQQEINLDSHINRELNDTRYICREVVGYLKQLGVNVCGTRGKVTAELRHQWGLDGIFEELGTRRDDDHRRHAIDAVVVGVTENDHLRKLARSKYSITGGRFDPPWANFRDEAREKVKHINVSHRVCRKVSGKFHEETNYGPTGKKDEKGQDIYVYRKPLDALTVPMIEKIVDPVVREIVKNRLIEKGINLKSSDRKIPKEVWKNPLYMKTKKSNKKIPIKSVRIHDVKTSVKLMEDSSGKVYRYVEPGKNHHIEIFEYKDKKGKIKRDGKVVTMFEAVQRSQHGEPVVQKNHVPGLKFICSLAINEMFMMDTKSDSKELYRVQKISNNKQIFFRHHTFAGDLQKHKGISRYPNSLEGCKVTIDPLGRIWPAND

SEQ ID NO: 841 - protein, 1104 aa, unidentified
  REGION 1..1104: note = Description of Unknown: Cas Enzyme sequence
VVYYAIMKYRLGLDLGTNSIGWAVYSLDNGNEPSELVDMGVRIFSDGRDPKTKEPLAVARRTARGQRKLIYRRKLRRRAMFRLLQAQGLFPAGKEEAQKLKLLNPYQLRIKALDEKLEPHELARVLFNLSVRRGFKSNRKDGTGTEEPAATKSGEKLSQADMSSELSKAMKESGCRTIGEFLWKNQDKNHGIRFVPGRMSYYPLRQMYVDEFNAIRAVQEPFYKTLDWDAVFDAVFFQRPLKPQERGKCQYMSDRERTFKAMPCAQKLRMLQELRNMDYQNERGQKIPVSEEEEKALLSLLDTKDKVTFDAFRKALKLSPACTFNLESTNRTSLNGNATAVKLRSKNRFGALWDTLPLEEQDAVVEKLITADEDREIFDMLERYPLTDEQKESVVKLQLPTGTTMLCREVSEQLVHKMEELGCNYTTAVQVLGYKYADQSVEKYDLLPYYGKVLVGSTMGGNPTEPEDKPERRYGKISNPTVHVALNQTRTVVNALIKEYGKPAQVAVELSRDLKASREAKDAMVRKQNENRKRNEILNKTISETFQITYPNRSDRLKYRLWEELGTEGLPRKCLYCGKTISGAELFTKNIEIEHILPYSRTLLDAESNLTVAHASCNAFKKERSPYEAFGSSPSGYSWAGILERANQLKNPAKRGRFATSAMENFEKESGFIDRQLTDNAYLSRMALRYLHSVCDKVWSVNGGMTKLLRDKWEIDSILKRRIDDKEIAHFELKGNQIGEYKKNRYDHRHHALDASVIALIDQSLVREISTLNARSQKNRIEVPPMAVPRMELQEKVRHIVVSFKPDHGAEGKLSKETLLGKIKREEIVDIARLEEEDIPLIKHGKVRADFERELAGTKDIKLVRKALKDIYPQVKVYREYFVARAPFVSLKENNVADIVDVKIRTRLQDFVASHKGGKFEDVLQAFSEETGIKKVRCLNRVQTPIVINGKNPRYLAPEDYFAAIIWEVLPKKEGARPTYVAQYIRRDEVGRDGKPKEGVLKAPHPAAKKLGILHKNDCLEFSDRGAWYKCRVAGYSATQNKLDIRPVFAVTDCKDWIIATNETQLEPCWKQQKGHNFIAVNVLFGEKQARFITVNPIGRVFRK

SEQ ID NO: 842 - protein, 1113 aa, unidentified
  REGION 1..1113: note = Description of Unknown: Cas Enzyme sequence
MKYRLGLDLGTNSIGWAVYSLDENSEPEKLEDLGVRIFSDGRNPKSKEPLAVERRTARRQRRIIYRRKLRRRDTFRLLQKQSLLPLKKDEAQSLKFMNPYELRIKALDGKLEPFELGRVLFNLSVRRGFKSNRKDASRNETKENSKSEKLIQAEKCSNLSNAIKKSGYRTLGEFLWKTKESNGGTRFAPNRMDYYPVRQLYIEEFNLIRQKQEPFYPDVDWSGIYNKIFFQRPLKIQERGNCQYMPEKERTFKAMPCAQKIRILQEVFNLSFIANGKPKKLLPEWQDEIIKLLDSNKKVTFKEIRKKLGLDENITFNLESETRDFLQGNLTAVKLRSKNRFGEIWDSLSLKEQDDIVECLITAQEDSDVQKMLEKYDLTSEQKNFITKPDLPSGTTSFCREFSENVVNKIEENAKIFAVSDERTERCQIHSVIQELGYSYANQFVEKCEELPYYGKILSGSTMGAKSNPKNDEERFGKISNPTVHIALNQTRVVVNSLIKEYGKPAQVVIEVSRELKASREAKEKMQQRIAANQKQNEILNKKIKDANSNIQFPNRTDRLKYKLWEELDQENALNRRCIYCGKQISGADIFNDNTVQIEHILPFGRTLWDSEHNKTVAHTKCNAFKGEKSPYEAFFNNPKGYNWNEILERAAHLKDPQKRRLFSENAMETFEKESSFISRQLTDNAYLSKMALKYLKCVVEKDSNVWAVSGGMTKLLRDKWQIDSILKRKIGDNEIAHFELKDEQIGTYKKNRYDHRHHALDASVIALIDRSMVQKISRLNQFGKKNKIEVPQMPVSRLELIEKTKNIVVSFKPDHGAQGKLSKETLLGKIKRAEQISISKIKEDDIAFIKNEKVHAKFEKMLADLKDIKKVQKELKELYPVVWIFKEYYVCKENILGLKEKDFDSIIDKKIQKELREFAESHKSEKIEDVMQKFSEQTKIKKVRCINRVQTPIEIKNTDGTMRYLCPEDYFAAVVWQIPPKNKEAKPVYKATFVRRDQVDPDGNPKIVAKPHPAAKKVCVLHKNDYLEFVDNGNWYKCRIAGLNAASGRFDIRPVYAVTDCKDWIISTNEAVLESYWKPQKGQNFISISVLFGEKSAHSITVNPIGRVFRKK

SEQ ID NO: 843 - protein, 906 aa, unidentified
  REGION 1..906: note = Description of Unknown: Cas Enzyme sequence
LDYKLNDFELGRVFYHLCQRRGFWSNRKSPLKKDEDLGIVKRNIGELWKKISESGSRTLGEYFSRLNPETEKIRGRYTSRQMYKDEFDLIWKKQQEFGNEKLTANLHKKIFKTIFFQRKLKTQKGRIGACTFETDAKRCPWYRFEAQSFRLLQNVTNLRIQEYNGGRRELTSEERKLLIDLLEENASLTYAEARKLLGITNKKTKFTIEIDTEGEKKIKGNRTNAELKKVFSEKWNIFSMKDKEKVVHALISFEKDTPLKKYAIKKWGITEEKAEELAEIRLEEGYCNLSLKAIKKLIPKLDEGLNYYEALQKVYGETQVKSEILAELPVVREAIGDVRNPVVNRCISELRRCVNPIIKKYGKPDEIHIELARDIKTSNKQKERFIKIINYNEKLNIDAKKYLEERGIKNPSREDIIKYRLWVECKEQCPYTGRSIGFNDLFGDLPQFDIEHIIPYSICLENRFENLTLCYNEENRKVKHNKIPFETYYGNPEKYEEILSRVKGFNSRADIKFDKYKRFTAENTEDYADYASRQLNDTRYASRIAVDYLGLIYGGVIDQNSKRRIYAVSGGITAILRNYMGLNFVLGGGVKSREDHRHHTIDALAIALATSGNIQGFSHYAQKFENIGRVYFKYQFEPWKGFLNEVISKVNNIITVHHVCQKVRGAMHEDTFYGKGIKEGTIHLKRPLKDMKENEVDEIVDPIIKKIVKDKLLELSYIDSKNKDPKKAFSIPENLPFMRLKSGDVKTIKSVRICRNQKVTVVGKGAKERNVVLGNNHHMEIVAILYEKANETKWEGHIVSLYEAYQRKKKGEPLIKKDFGEGKLFKFSLSCGDYIELDDNGKRDIYLIRSIPESLQIQYVKPNDARKQKDRKTDKAWLSKYPEPMRKANCKKLTITPFGELRYAHD

SEQ ID NO: 844 - protein, 1187 aa, unidentified
  REGION 1..1187: note = Description of Unknown: Cas Enzyme sequence
MNKKVLGLDLGVSSIGWSLITLDEGGHPAEILGMGSRIVPLTSDNKKKGSYFKDFENGEAATKNQYRTMKRSARRGLNRYQQRRAKLSRLLSEFGLGFPRPLMSLSPLALWGLRADAATEGKVISLAELGRVLYHLNQKRGYRHSKFDESSKQDTKYVAAVKTRYAELRNESLTIGQYMYRYLSASAERGADALSCVHYRVKDQVYPREAYMEEFDRIMAVQQKAYPDVLTSVVLQKLRDCIFFQRPLKSCKHLVSYCEFERKTKEVQIPVVGADGTTSHKTKIVDIGPKVAPVSSPLAEVCRLWESINNIRIYYPDGAVYPLSLEHKQAFFNKLQESKSLNFSDAKKIIGAKAKDKLWCNDLLKSGIKGNRTTATLRKLIEDYPQYKALLRFDLKQEDSCRVDLSTGEVLPLISVSYLNEPLYKLWHILYSVAEREAMGNALRKQLGVEQGDLDKGLLDACMKIDFTKQGYCNKSAKFMCKLLPYLQQGYMYSEAADLAGYKHSDSKTKEELEHRELKPRIELLPKNSLRQPIVEKVLNQMINLVNALKDKYGEIDEVRVELARELKMGREERKKYSNRNSKNEKDNKRVAKEISKFCTPTKNRIQKYKLWEEANHACIYCGKEITKPSLFSDGEAEIEHIIPRSVLYDDSMSNKTCACRSCNKAKNNRAAMDWVLTQTEEFQTKYFNRLEELAKKRLSNGKRQRLMTLLKDIPEDFIERHLRLTQYISRKATEILKDGIRYVWSSEGSVTSTLRHLWGYDKILEDLNFERYKSMGETQTILVKRGSVEQEVERIKDWNKRKDHRHHAIDALVVACTRQSYIQRLNRLSSEEDRQSMQSELGSSYSPSKEERMQLLDKWLTAQPHFSAQAVRDYVRGILVSYRPDRRTYTKSRNKVKIKGRVSLQTGILTPRGALSEETIYGAIHVDGGKEIVCKCRLENLQAKDVPDIVDKGIQRIIKARLEAYNNDATKAFAEPLYSDGAQTKQIRSVRCFSRCVYKNMIPLRRNDAGEEIAFVAPGSNHHVAFYRDSKGRLQEAVVSFYQAIERAKYQLPMIIKDPRVVVEEARGRNVPDSVLSALPQSSWTFVESLQKNEMFLIGLSDDEIARVIKNEDRATLNDHLYRVQSISDGDYMFRFHLEVKQNKESDKTNGKFIPKFYRVRTGKKCLELNPRKVRVDLLGNLSLLE

SEQ ID NO: 845 - protein, 1114 aa, unidentified
  REGION 1..1114: note = Description of Unknown: Cas Enzyme sequence
MYRYSLGLDIGTTSVGWAVANLEKQRIEDMGVRIFERPEDPKTGKSLAEPRRTARSARRRLKRRRQRLNALKAFFIENKLLTSDQIENLIIPSKEKPNPYLVREKGLSERLSNEELFVALRHIAKRRGYKSNRKSVEERDAEGSRVLSAISDNAKILTSHNTNSVAVALNKDVKFQEHKRNKADDYRNSFVRQNFLNESRELIEKQREFGLSLTDKSVENLLFEQNKGIFYQRPFMTPELIEKMRGKCTFEKNEPRIQKASITFEMFRLATDLMNLTLVIGGERIALDKDEIAKCIEKAKSTRGVTYKAIRETLGYKNDDKMRFDYIRGKRDKDGKPDESNAFCELKFYHGVKSALKELPEEWVKIEKDEDIFDQIGYVITANKDDDDIKNGLAKLNLSSEAIDQLLKLSFSGFGHLSSKALRKITPHILDGKTYDEAVVLAGYTFAGKLSGDKTKLPPLSEDDSSQITNPVVKRAISQTIKVINAVIRKYGAPEQIKIECANELAKNFDERRKIKKAQDENADRNNKIVERLKSDWNIANPSGLQITKFKLYSEQGGKCLYSGKSIDLNQLFSDERYCEIDHIIPFSRCGNDSNNNKALVLNSENQNKRNLTPYEVWGNDEKRWTEFKSRVLGTAGISYTKQQRLLSEEKPKEDWNARALNDTRYITRFMSDYLRKNLKFAESSKGNKKVVTPAGTITSYLRRRWGMGRKDRNANNLHHAVDACIIAVVDDGIIQEFAKYNKYGELGAKYFKYQSNLAEITDPETGEIINKRKFEDLEQHLLPWPRFNDEVFFRTSVNTNMSDFGDQFRAFPNYDEEFKNNIHPVFVSRMPKRGGTGPTNQETIRSPKVIPDESGSTDKQLRAQKMNIKSVTPEMLENSLTKRTDPKLYEILKARLEWGKAQSGTELIDENGKKRKFGKIDQKGKPDALWLANTWKESVYKKDKNGNDCNLVCSIKVLSSQPSGREINNGKAFVNNGSMIKLDVYRRVNKKHKIEHFFVPVYSHQIGVGSNKILPAAKIDGKIVTNIDESFSKVCSLYPNDYVRCEFADDSGKVLKTVEGYYVKYAISGGNMTFIDHLSSSKDGGNLIACSARSATSITRYDISILGDNAPRD

SEQ ID NO: 846 - protein, 1236 aa, unidentified
  REGION 1..1236: note = Description of Unknown: Cas Enzyme sequence
MKYSLGLDIGTASIGWAVVNLDKNRIEDLGVRIFERPEHPKSGESLAKPRRVARSARRRLRRRRQRLNYLKQFFISQKLLTKEQIDQLTAPDHAKGWHPQNPYALRVKGTTERLSPDELLIVLYHIAKRRGYKSNRKTIEEKDTTGDGKAVNSAIAQNAKVLSQYTTVGEALVKDDKFYDRKRNTTGDFRHSFARVDFLNEIRRILLCQQRYYPNQLAGDQIDHLLGIKISSLPADRPINDNDINRLTKLQSDNINGLFYQRPFMTSDLINKMRGKCPLESEQPRAPKASYSFEIFRLAQDLAHLQYIIDADKAEGNTEPTSQRAITKFLTSDQIKTCINKCLTTKKVTYRAIREVLGYAKNDPHFQFKYIRGKNPKDEEQKKDPLAKEKNTFAELKFYHSVKSGLKNLPDDWRKVGSNPELFDQIGEILTCNKDDYSIKEGLRKLEVLSDDAVDALLPIDFSGFGHLSLIALRNITPYLKEGNGITYDKAMEKAGYHFAARHSGDKTCLPPLNKDDAQQITNPVVKRAVSQTIKVVNAIIRKYGSPYRIGVECAGELAKSHDERKKIKDAQDENAFENEKLKKKLREEYNILTPTGTQITKFRLYKQQDGKCAYSGKPLDLDRLFDPGSRKDESYAEIDHIIPFSRCGNDTRANKVLVLNSYNQIKGNRTPYETWGNDPDFWQRLEANTKANPKLGQAKQRRLLTHTIPAEDWASRAINDTRYISKFISRYLKNHLEFSPYDESPDQASDSQPRQRQRVIMPAGAITTHLRRMWHQPGKNREADLLHHAVDATIIALTTQATIQDCAVYSAYIDDHTKQRFTGNTKTTGSDRLLRQLERITNTETGEISQADYEELMQSLLPWPNFDQELRKRASLPGENDTISTWRDQFRDIYSDQDSDFYNHLHPIFVSRMPKRRVSGKTNKDTVYSTKTRDNDGKTRSSRVGLADLTLDKLKNSAIRNVDETLYKQLEQYVADRKKWLDENKKWKVARREQKKLLKKSPVDEAVSTPAELPPEPIEPKIYKNGKHFDKNGNPISPIKSIKIYSPNPDTSGLLVNQGKAYVSNDSMVRLDVYKRPNKKGKIEHFFVPVYANMIRRGHPEVKPTRILPPPKKGIPPEIDDSFTFVCSLYPNDYVKVVLDGEVKEGYYAAYDIAGCKIKLLPHAGTSKDLSTKKKDKSSNGDQTDQSTDEAGDNDKKKTKIKHPNRYPAFRIAPRSATKIERLDINVLGDNYKWD

SEQ ID NO: 847 - protein, 1039 aa, unidentified
  REGION 1..1039: note = Description of Unknown: Cas Enzyme sequence
MKKILGLDIGIASVGYSVINYDDEKFEGKILNAGVRVFDACEVSKTKESLNAKRRELRGVRRRLSRRASRLKAIRQLFIANDYLKEEEINNMFHCAENRVDVWDLRKMALGRLLTIKEFYRILHQIAKRRGFKSIRKSEEAKREGNLLKNISKNTQEFENSDFMTIGEMFATIYVDKAKRNKQDDYKNSIPRELLLKEVKTIFKIQRKFGANFANEDFEKKYIDIAFYQRPLQSMKGMIGKCQFEPNEKRAPKAAYTSEIFVAAQKLVNTKLITSNSDELTLNEEQIHLIMELAHKNSKVTYKQVRKLLNLEEGIIFKTLQYGKIEKDKKTGEEKEINPEENTLIELKKYQEFRNAIKKNLGEEYFEKIKYNKELFNNIAEVLTYEKSDEAITKELLKKEVSQEIIDCILNISASKVMHLSIKAMDKIIPYLLQGLKYSDACSEAGYDFKNSKNSKNLNYLPVLTKEELTTNPVVNRSISQTRKVVNALLRLHGKFDSIIIETARDLGKSVEERNKIKSGQDNFQKEKELAKQRCIENGVNPDSKNNLLRFRLWEEQGGYCPYSKKPIDIKRLSEPNYTDIDHIIPYSRCFDDSLNNKVLCLSDENRMKGNKIPYEYLCGKYDWYEYSAWIRELHLRSAKENRLLRKTYSSEDNNNFSSRNLNDTRYITIFIKDYIKDNLDTKVETRNGSLTAYLRKQWQITKDRDENDRHHAIDATVLACSTQGMVKYVSTISAKRENYDFINHSKPKFKKPWETFNEDLDKAINEIFVSRAPKNKIPGALHDATIRSSKHLDEGFTTLKTPIKNIKLKDLENMLDKNRNIEVYKILKERLEEFNDDPKKAFAEPVYMKLSEVKKEAGIKPHEIKSIKIKTTGTSGMEVQNGIANNTSMPRVDVFSKKNKKGKDEFYLVPIYVSDFAKGILPNKAIVAHKPESEWIIIDETFNFKFSLFNDTLISFNKTNNPEDETICYYCSTHRALGGIIIEAVDNNKTLKGVEVGVKSLYSLKKYQVDVLGNYHEVKNEQRQPIKFKNTNRKRKEN

SEQ ID NO: 848 - protein, 1174 aa, unidentified
  REGION 1..1174: note = Description of Unknown: Cas Enzyme sequence
MEKRVFGFDLGIASIGWAVVDLDEEIIDTQKTEAQYAIKGGKIVASGVRLFDRPTDRQNKSLALIRGESRRTRASLERAKERLSHLVKIASKQGLIDNNFSVEQFKKTPNEYVWKLRKDALDNVLSNCDMFQVLYHIAKHRGFYFLTKEERKKMEASENSETDSGSISSSEQGKVKKGLLATQDKLKKSGYRTIGEYLYYKEGKKHNNKNSYDTCFRREDLKKEVELIFEAQRQLGNNLLTKEFEQKYIDEVLMYNHPIDEEKFRKMCGVCEFDGHIRFPKKGWASELFTFYSRLNNLKINDELVDEEKRQQILNYSLEHKTVTFSDLRKLLRLGDEQRFNLCSYREFNPEVEKTIKIDKNKIFTQEKKFLLIDSKSESLEKESRQFYKFIINDAEEYFKKYDKASSYTCYWSDLRKKAQLSNEYRFYELKKYYCESKENIGIKKYLEQFEKNEVFVSFTGYYDMKKTLGELFEKVNTADKLNDIAEALAYYKTDESRLHYLKMRGITDAELTSKILELNMKELCSFSRPFLETINPLMAQGKLFAEAKELAGYNKVDVEKTNTIPVYHGDFENNPTVARIIGQFRKVFNALARQYGNIDEIHIELATDVANSKDRIARILNKQKQYAEQKNAAVKRCQEYGIDPNQGDNLLRFRLAEEQDWKCIYSGQAISPTTPDNTPVGELSIYDCDIDHIIPISRSFDDSINNKVLCSRQENSQKSNKLPMEYFRQSPLKNEEDLQKFIICVRQNNRIIAAKKGRLLRETYTEEDMKKFIMRDLNNTRYASRHIAEWLRKYFDFSSSKCSYIPDVNRVRVLGGGITAKLRHLWGLEKDRDISNKHHAQDAIVIACTSFGHIYYICNILKELEEKGITRTRKIIPMPWNNFRTDVLTQIDNIFVSKMIRCSATGQLHQQPKKAKDPKRGTLLTRERTNEEFYAPLDSMFRYDIYKRDGHYYCVPIYAVDLAGTSQNPKPFEHKVQPIQKNCPEIADETDFVFSLYPDCYIEVTNDENETFCGYISQYVAQSGQFYLDSPNGDYIYEINTSTFEIGEFVKANNKVYQLTEYDEKRGLLQGVAFDGEILEIKAQIKGDNEDGDKGKDKEKRKGKEKYKTDKPYIKVDKEKKVSIATFKNLKKYQVGILGDKHLVKKESQRFTNQVKSNARRHKEKMAKRQKEE

SEQ ID NO: 849 - protein, 1143 aa, unidentified
  REGION 1..1143: note = Description of Unknown: Cas Enzyme sequence
MKYSLGLDIGTTSVGWAVIDLDKKRIHDLGVRIFEGAEHPKTGDPLAKPRREARGTRRRLKRRRQRLNHLKQFFIDQNILTRQLVEDVLDPKSRYNGLDIYALRDKAFYKELSPEELLKVLYQISKRRGFKSNRKVIEETDKQGEGGAVTRALQANEAFLADKGYQTVGIAFNRDKVYATRKRNGSGTYSNSFARADFLHELEAIIQHQKQYALKHVSDESINELIYGIDNDGNVINQSAIMYQRPFVSEELIKKMVGKCTFEQSQERAPRASYSFELFRLASELSHLTFTPKDKNTLNELNNTSTITLSSEQIAAVINMAKKGGTLTYAKVRKAAGIDESYVPSPNHVRGKITDDDPYGEGNDFGNLKAYHDIRLALKNLPTDWCAVDNENILNEIAYILTVQKSDEEIRKKLNKLPISDEAAKALLKIRPTHFKAFGHLSIKALQKITPHILAGNTYDKACKLAGYDFRKKTANLEDITNPVVKRSITQTAKVVRAITKKYGEPYAINVETARDLAKNRADRNAIADENKENQAYNDDIKEVIELGYEATPKTKGGARLLHRLREFNVPLHKNADFNGQQITKIKLYDEQNGKCLYSGKSIDFNTMIHDDNAYQIDHIVPRSRSNNDGLTNKALVLTEENQKKANRTPYEYFGNDEVRWQQYITDVESIYRAKNVNTDDKLANKLNYKFNSYAHKKRHNLLLTEYKDDAWGVSHLQSTRYITKFIHQYLDQTVDFAPREKDNKAKRIFTPNGTITSYLRKRWGLSKIREEDVLHHAADAAIVGAIDDKIIYQANIYAKKQEIVHYLSNAKTLREKTNLITGEIVDEELFTKAQQENMAQKVLSEKHFPEPWTDFAKEVRKRTLNKDTLVIQNELRGLGHYDEAFRLNIRPIFVSRMPNRKVSGRAHEDTIYSANSDESNMRTIRKPLVKIHLKDLENSPVKNTDPQLYNSLRERLKVNNDNPEKAFAPNKPIFKNDKYGKPTHQVRAIKVASKQNPSSGFILRDNRGFVNNGEIVRLDIYSKSPDNEKKKYYFVPILPHHIPKEKAGEKITKILPSKPGCTDIDGTFNKEMSIFKNDYVRIHYGDEIKEGYFRFYESDGRLNLMTQTNALYDKKTGRASGSSATLIARFDISILGDNAPRD

SEQ ID NO: 850 - protein, 1179 aa, unidentified
  REGION 1..1179: note = Description of Unknown: Cas Enzyme sequence
MENKELNFNINSEIILGLDIGKASVGFSLVDKGNDYKVINAGVRLFDAPEKPKEQTSLSKERGEFKRARNSNKNEFLRTKNIVKCMLKYKILDAETIRNYDKSPKVKECPKSKKKHLFYIKTAEYLFYKKSNNNDVLNLRVKALKQKISDLELARILYSMNNHRGVTYDEIREIPEGSSKTLSDDQKNLKDGFQRYNDEYKSKENSYLTVGEYLYENYNTKFRNTDKWQNGKKIGRDYLFSIPRDDLKSELEIIFDKQREFQNNLTTKEFQDEYLEHFLWEKDSPKYDTLVSPCIYNPYEKSANKHHFSSQLYVSLEKLYNIRFREIGTKEYFEFSKEQKEIILKNSFEKIKGLSYKDIKKILFLPNIEFKGVLEEEKNIVTNFDTFIQIKKILNLEFNPLVDFQKDDGFIQNNLVNIINILAYETKDSFKKYELAKLDITDENIEKLLKIAIRGHLSFSLGVIQKICKYMLDGVIPYQAKEKIKNEYGVKSIEKKAYLPPIMDSDFPLKNNHTVVRALSQVRAVVNDILKYYRKESGNSNWTFDMVTIELAREMNSKKQISNINKAINQNTKSNQEAKEFCEKYNITNPTQEQILKAKLWIVQKGIDPYVWIQNDENKLIDSYTLGRIDAEKLFDEGYCEIEHTLPYSRSLDDSQSNKTLVLSSTNQNKGDKTPFEWLSKVDFEKFEKYLREKDNWLAYGDARIRKLLNKDFQGVDGFKQRDIIDTQIISKYAGLYIDNHLHFWNNPNFDGKRRIYANNGKITSILRKAWAIGKKNRDTHLHHAEDAILIACSTPSLIKNISTFVGIQTQLTSGKLTLKKFEYILRKHKSLKEYILSELQKENIDISSLDTKNSKDSKEFISKIFKILANKNYSYDTFREDLKATIENAPVTRYVKHKINGSIHDETISKKKGDNEKGVLIRNGISRNGAYVRYDVFKIVNAKGKITYDFVVLTAKENGVNVENLPLPILKEGEKATFMFSIFKNELLRYSLKDKSIIEGNFLKVDSSIIVREPKNKETELFKKQIKGLYSSWLKTDDVEELKEIMSDKGIQKELNLKLEKVTKLTSQIEKVTALCQRVSTIIKTKYNVNTIFTMEKMNSIQTKELRDILIQQNIVKENVELTSGLTRTIFITLSESGYIPSSRVDGQKKLIDLVKLKIDCLGNVIDEITSEIRRPLK

SEQ ID NO: 851 - protein, 989 aa, unidentified
  REGION 1..989: note = Description of Unknown: Cas Enzyme sequence
MVNPQGGHSVLGLDIGIGSCGWCLIDTKYQRIIASGVRLWDTPQEPKTKVSTASTRRIARSSRRNTKRTADRKKHCLRLLKQNGLVPSKESAQWLQSRKKDKPVIKLRAAGLDRPLNNREWAQVLYSLCDRRGYIPHGEGGDSDNESKKVLSAIEHNKELLSQTGFRTVGEMMYHSGRSRNTGGDYSLCIDTNALIEEIELLFAAQNRLGNTKASEAFREAFREVFSWQKDVTANDLRIYNQVGHCTYFPEEKRAAKSCLSSELCEAYERIGHTTWIDSKGLEHKLPADIRQKIIRTLFSIEPIKGNKYCKVTYSKVRQWMSLDSDSPFKGIDADKEKTLELYTPKAWRLLRDTLSSEFMHQLAADRELADDFCSAITFASSKKSLTKEMENRGFSEDEIEHASALPHNAKLFSGYGNRSLKALNLLVDAFEEDAEDIVTLSDAEQASGLLQKRNSPEATYTQLPPYTLFDPTCKNPVVLRVMGQVRKVVNAVIREYGMPDEVHIELARELKQSKREKQLVSDRNRITKSRRDGIIAKLREETGDEPRMKLIRKVELFEEQGGRCIYCDGVIEYERLIKEGHYAEIDHALPFSRTCDDSQSNKVLSCKKCNQDKKNRTPYEWFCQDDLNWEEFELRVSRNKKLGQIKRQKLLNTNLEEKQENDFIERNLNDTRYASRAAKDFIERYLRFPDNGKKQHVFAVAGGATALLRQSWGIRKDREEDCLHHAADAAVIAACSPSTVIKIAKASEKKALTKKENRAALFADTQPWEGFAAEVMRQKEGIIPTHMIDHKVSGRAFEDTIYSYKGIREDGQKGQLATKKKGLKVSSNYVRRDDGSAIVVDGLAYINLWLDAEGRKGKGQYLLEPIYYADIPFVDSQGYMHRFLPAQSDKKPRESWDTVPERLLATKPLTIFPHDAILVKGKVRRFKTIGIAACSWSLYDPTGKLSDGEATKGLAFASLTKDDQLELIHEDVLGRCYIDLISNSGSKE

SEQ ID NO: 852 - protein, 995 aa, unidentified
  REGION 1..995: note = Description of Unknown: Cas Enzyme sequence
MGNSNMVWGLDIGIGSCGWAVLDNDNETIVDMGVRLWDIPQEKKTKASLAQTRRAARSARRNIKRTSDRKKHCLRLLQAYGLVPENETAQWLQTRAGEQPTISLRAKGLDHKLTEREWAQVLYSLCSRRGYIPHGETRDDADAEGKRVLSAIKDNERLMAEGNFRTIGEMLAHQTRSRNRAGDYSQCVANKSLVHEVKTLFETQKEFGNQNTSESLLKDYLDVMLWQKDVSRHDERTYQQVGFCTYEVFKNEKRAAKSTLSFELCRAYEQLGHARIVNSDGSEAPLPPFVRSAAVNTLFSPVELPKNKNCKVTYGDLRKQLDLPASAFFKNVPEDKEKTTKVADPKAWAIIRKTLPENLVKAMRADRHMADAICEAATYASSASSLEQRLADLGNLTKDEIECILELPYTSAVFNGYGSRSLSALSMLINAFEDEEDIVTLSDAEQACGLQEARLHGEKNLGGSLPPFILHDPTNNNPVVLRVMGQVRRVINALYAKYGAPDAIRVELARELKQSEQERRKIAARNRETSERRDALREKLSEEMGVDPELIRGKDIRAIEFHEMQGGKCPYCGKVIHYDELIRTLRDNDHAFEIDHILPFSRTCDDSLNNKVLSHVGCNQNKRARTPYEWITEEGLSWDDYVERIAQMTKLPRGKRSKLLNKDLSEKVEADFIARNLNDTRYASRATLDYINSYLSFGDSEGQHVFAVAGGATALLRNAWGIKKIREDDDLHHAIDAAIIASCTPSLVQQIARASERKKTIPKGERANLFKQTEPWQGFGQELQEWKGKIVPSRKVEHGVSGRAFEDTLYWYEGMSDEGACGLLRANGSIKKSTNFVVRQDGSATLPDGIAFVRLWWDPDKAVRGRKDKPGKYLIEPVYYADIPSLQNGSYIPRVIPEQTDKKDRSRWDEVPERIRETTPLVLFRNDAIDYKGTLMRFGTVKISSNTWILLDPLSNAKQVTEGFPLSGIGPGDMLEVVPEDVLGHSLRRFLEDKR

SEQ ID NO: 853 - protein, 1061 aa, unidentified
  REGION 1..1061: note = Description of Unknown: Cas Enzyme sequence
MSTSEIIFAFDVGKASLGTCAREGNHILALQSLLIPAEYAATEDFRNRRRAMRTRLAHQKRESWLRQVWRQAGLTPLASHEDCLKREFPKKGDETIYNSALLRIALLQGRPLQEWQIFKALWAAIQRRGYDNECDWRLSDDEEELDADAKDNLESVGRYQEALYYQVNSQEAYLYPCYLEATLMGLWHWEQPERLNLRITGNAAKVRQKGMVAPRALVEKEIRQLFENARKQLTALNQVNINELLYGPAQKAYASLFPEFSQYRGTEWDTQGVLSQKVPRFDNRILNKCQMLPKRNVCKANEPLSLQFNLLMKLKNIRFTDENGEVGRFLSCEELQAVYRLCQENLAEKKTQEITFGNLNKFIEKTIKNRVMDINLAKGEKIKLNSSGRSRFCRPALTIMNRILLEGIDPPAFDTTPYIQEASSNGLSRSELDDMINRLGKTWAGFHVGDKRYLSIEATLQPQSREAAILKLIGTSNNPVVRHRLTFFWQELKKMTQRHGQPDKVILEFARGGEGLDGKKTASDWEREIKDNEKRNDRIRQQLEEYGLKAHKWNIERFRLGEEQQWTCPYTGERLEAGSLNNYQVDHIVPVSGDIATDSFYNKVLCTITANQDKKNQTPYEWLSDTDCWPDYLARITDKNSGYSKKKKELLIRNDARELVDSYNGLAETAYIARLALQIVSLQFGWGLQTRDDDRRVFVNDGKVTAKIRKIYELNELLLTEEEQARLSAARDAGQQRTIWKKNRENAKHHALDAYCISYSQELRNRREGSDDQGRVHWYVPGLEESKAQLERLLLALFPHPTRRNTKDLYPLETIYGYRSRRENGKEFHFLTVRKNLLDLLAKDRKKIKDIFDLEVRADLEKQSEKITDNKAWQEFLTAYVHPLRRGKVNAVLIIESRSETQPQLDESGRMVFGEFKDFGNLDAKDGRKGITKHQFKHSKANKGQIIFNVGKSWKVQQVYVHEKLSSVKERLLAVNCTLYKEGMMFYPGCLIFVPSSFLAGKKERPGGLYKSRTIKAKGDVLLENNNGEEILTNIKYLAEAGFERVAHDGKAFTAILASAE

SEQ ID NO: 854 - protein, 1130 aa, unidentified
  REGION 1..1130: note = Description of Unknown: Cas Enzyme sequence
MTEKSSYSPKKYSLGLDIGTSSIGWAVLDLDKERIHDLGVRIFERPEDPQNGDSLAKPRRDARSARRRLKRRRQRLNHLKRFFVSQNILTKDRVEKVLNCTSDFNKLDVYDLRAKALTEELSPEELLKVLYQIAKRRGFKSNRKVVEESDKEGGRVTSALKANEKFLADNSYTTVGDALSRDEKFALHKRNKHDDYTNSFARDDFLHELKFIIKTQQNYTLKNVPEQAIKELICGIDDGQVTNVSAIMYQRPFMTKELIEKMVGDCTFEKNEKRAPKASYSFEVFRLASDLSHLVFIPRDAGKRQAKRENLEVRLSSEQISKVIDLAKNQNSLTYKKVRSTAGISEDYVPKDVRGKKKEGDEFGEDNTFGGLKAYSDIRSALKELPEDWAKIDNESAINQIAYILTTQKADEGIRAELNTLPLSDKAKEAIIKIKPTNFKAFGHLSIKSLQKITPHILEGMTYDKACEAAGYDFKKQSASLEQITNPVVKRAITQTLKVVRAIERKYGKPYFIKVETARDLAKNFKDRKAIENENKENQARNQSIIQTLNENGVVTPTGQQIIKVKLYREQNGVCLYSGKSIDFETMLRDDNAYQVDHIVPFSRSNNDGITNKTLVLTEENQKKGNQTPFEYFGADEKRWKEFVARVESIYKTRKIEPVDKNLSKEEKAQTKMTNAINYKYNGYAMKKKQNLLLQDYKNDSWNVRALNDTRYITRFIQNYLRQMVDFAEGEEKQRVIAPNGTTTAYLRKRWGLAKDRAEDVLHHAKDAAVVAAIDNSIIRQANLFAKRGEIAALLSAVKTMEEKTDKLTGEIIDEDEFDKAQRRKDAAIVLSSKYFPQPWDNFGKEVMKRTLNTDITTLQNELRGLDNYDEDFRLSVKPIFVSRMPRRKAAAQAHKETIRSPKVKDNDQRTVRMPLNKIKRRDVENSVLKESDKWLYDKLLERLNAHDNNPEKAFAEPVYKNDKKFDKNSKQLSPVSTIKVYSTQPSGFYINNGKAFVNNGSMVRLDVYQKPNKKGKVEHFFVPVYAHQVGKNKPAPTKILPAPKGFTDVDETFIKVCSLYPNDYVRCYFGNKIEEGYYIAYDSGSGRITVIDASSPNKEGANRHRISPRSANLIERYDISVLGDNYRWL

SEQ ID NO: 855 - protein, 1157 aa, unidentified
  REGION 1..1157: note = Description of Unknown: Cas Enzyme sequence
MAQKSSYLPKKYSLGLDIGTSSIGWAVLDLDKERIHDLGVRIFERPEDPQNGDSLAKPRRDARSARRRLKRRRQRLNHLKQFFIDQNILTKYRVEEVLDYKSDFNKLDVYDLRAKALTEELSPEELLKVLYQITKRRGFKSNRKVVEESDKEGGRVTSALKTNEKFLADNNYTTVGEALSRDEKFALHKRNKRDDYTNSFARDDFLRELEAIIKTQQNYILKNVPEPAINELIYGIDDGQVTNVSAIMYQRPFMTKELIEKMVGKCTFEDGEKRAPKASYSFEVFRLASDLSHLVFIPRDASKRQAKRENLEVGLSPEQIKQVIELAKSQKSLTYKKVRSTAGISEDYVPKDVRGKKKDGDEFGEENVFGGLKAYNDIRLALKDLLEDWVKIDNESAINQIAYILTTQKADEGIRDELNLLPISDKAKEAIVKIKPTNFKAFGHLSIKALQKITPHILEGMTYDKACEAAGYDFKKQSASLEQITNPVVKRAITQTLKVVRAIERKYGKPYFIKVETARDLAKNFKDRNAIKKENEENQGYNEDIKSIITDGYEASPKTKGGKQLLSHLKEFNVRLNKNADFNGQQIIKVKLYREQNCVCLYSGKPIDFETMLHDDNAYQVDHIIPFSRSNNDGMTNKVLVLTEENQKKGNQTPFEYFGADEKLWKEYVARVGSTYQTREVKKGDKDAGINYKYNGYAMKKKQNLLLQDYKNDSWNVRALNDTRYITRFIQNYLRQNVDFAEGEEKQRVIAPNGTTTAYLRKRWGLAKDRAEDVLHHAKDAAVVAAINQKIVYQANLFSKEQEMKLYLNNAKTIDEKRQVLLQSTDENTGEITDEATFTQAQKDLAQVEYFKLRSDEETKKRFPDPWTGFSKEVMKRTLNTDIATLQNELRGLDNYDEDFRLNVKPIFVSRMPRRKATAQAHKETIRSPKVKDGDQRTVRMPLNKIKRKDVENSVLKESDKWLYDKLLERLDAHGDNPEKAFAEPIYKNDKKFDKNGKQLSPVSTVKVYSTQPSGFYINNGKAFVNNGSMVRLDVYQKPNKKGKIEHFFVPVYAHQVGKNKPAPTKILPAPKGFTDVDETFNKVCSLYPNDYVRIYLKNKILEGYYSGYDISVGTVILYPHFTPSKDIKVANRVSARSATLIERYDIAILGDNYRWL

SEQ ID NO: 856 - protein, 1135 aa, unidentified
  REGION 1..1135: note = Description of Unknown: Cas Enzyme sequence
MTDRKLYKPRKYSLGLDIGTSSIGWAVLDLDKKRIHDLGVRHFDIAEKIKNNQEIPLAKPRRDARSARRRLKRRRQRLNHLKQFFIDQNILTKDQVEEVLDYKSDFNKLGVYELRAKALTEELSPEELLKVLYQIAKRRGFKSNRKVVEESDKEGGRVTSALKANEKFLADNSYITVGDALSRDEKFALHKRNKRDDYTNSFARDDFLRELEAIIKTQRNYVLKNIPEQAIKELICGIDDGQVTNVSAIMYQRPFMTKELIEKMVGDCTFEKDEKRAPKASYSFEVFRLASDLSHLVFIPRDASKRQAKRENLEVRLSPEQISKVIDLAKNQKSLTYKKVRSTAGISEDYVPKDVRGKKKDGDEFGEENAFGGLKAYNDIRSALKDLPEDWAKIDNESAINQIAYILTTQKADEGIRAELSTLPLSDKAKEAIVKIKPTNFKAFGHLSIKALQKITPHILEGMTYDKACEAAGYDFKKQSASLEQITNPVVKRAITQTLKVVRAIERKYGKPYFIKVETARDLAKNFKDRKVIENENKENQARNQSIIQTLQENGIVTPTGQQVIKVKLYREQNGVCLYSGKPIDFETMLHDDNAYQVDHIVPFSRSNNDGMTNKVLVLTEENQKKGNQTPFEYFGADEKHWKEFVARVESIYKTHDVKTSDKATNAINYKYNGHAMKKKQNLLLQEYKNDSWNIRALNDTRYITRFIQNYLDQNVDFAEGEEKQRVITPNGTTTAYLRKRWGLAKDRAEDVLHHAKDAAVVAAIDPKIVYQANLFSKEQEMKLYLNNAKTIDEKRQILLQSTDENTGEITDEAIFTQAQKDLAQAEYFKLRSDEETKNRFPDPWPDFSKEVMKRTLNTDVATLQNELRGIDNYNEDFRLSVKPIFVSRMPRRKAAAQAHKETIRSPKVKDNDQRTVRMPLNKIKRKDVENSVLKESDKWLYDKLLERLDAHDNNPEKAFAEPVYKNDKKFDKNSKQLSPVSTIKVYSTQPSGFYINNGKAFVNNGSMVRLDVYQKPNKKGKIEHFFVPVYAHQVGKNKPTPTNILPAPKGFTDVDETFTKVCSLYPNDYVRCYFGNEIKEGYYVKYGINNGAMQVIAHSTASKDKDHLIQISPRSANLIERYDISVLGDNYRWL

SEQ ID NO: 857 - protein, 1158 aa, unidentified
  REGION 1..1158: note = Description of Unknown: Cas Enzyme sequence
MTEKSSYSPKKYSLGLDIGTSSIGWAVLDLDKERIHDLGVRIFERPEDPQNGDSLAKPRRDARSARRRLKRRRQRLNHLKQFFIDRNILTKDQVEEVLDCKSDFNKLDVYKLRAKALAEELSPEELLKVLYQIAKRRGFKSNRKVVEESDKEGGRVTSALKANEKFLADNSYTTIGDALSRDEKFALHKRNKRDDYTNSFARDDFLRELEAIIKTQQNYTLKNVPEQAINELIYGIDDGQVTNVSAIMYQRPFMTKELIEKMVGNCTFEKDEKRAPKASYSFEVFRLASDLSHLVFIPRDASKRQAKRENLEVRLSSEQIGKVIDVAKNQKNLTYKKVRSTAGISEDYAPKDVHGKKKEGDEFGEDNTFGGLKAYSDIRLALKDLPEDWAKIDNESAINQIAYILTTQKADEGIRAELDSLPLSDKAKEAIIKIKPTNFKSFGHLSIKALQKITPHILEGMTYDKACEAAGYDFKKQSASLEQITNPVVKRAITQTLKVVRAIERKYGKPYFIKVETARDLAKNFKDRNAIKKENEENQGYNEDIKSIITDGYEASPKTKGGKQLLNHLKELNVRLNKNADFNGQQIIKVKLYREQNGVCLYSGKSIDFETMLRDDNAYQVDHIVPFSRSNNDGITNKVLVLTEENQKKANRTPFEYFGADEQRWEKFVALVETTYKTRDVKTSDKATNAINYKYNGYAMKKKQNLLLQDYKNDSWNVRALNDTRYITRFIQNYLRQNVDFAEGEEKQRVIAPNGTTTAYLRKRWGLAKDRAEDVLHHAKDAAVVAAINQKIVYQANLFSKEQEMKLYLNNAKTIDEKRQILLQSTDENTGEITDEVAFTRAQKELAQAEYFKLRSDEETKNRFPSPWPDFSKEIMKRTLNTDITTLQNELCGLDNYDEEFRLSVKPIFVSRMPRRKAVAQAHKETVRSPKVKDNDKRTVRMPLNKVKRKDIENSVLKESDKWLYDKLLERLDAHDNNPEKAFAEPVYKNDKKFDKNGKQLSPVSTIKVYSTQPSGFYINNGKAFVNNGSMVRLDVYQKPNKKGKIEHFFVPVYAHQVGKNKPTPTKILPAPKGFTDIDETFTKVCSLYPNDYVRIYLKNKILEGYYSGYDISVGTVILYPHFTPSKDIKVANRVSARSATLIERYDIAILGDNYRWL

SEQ ID NO: 858 - protein, 1153 aa, unidentified
  REGION 1..1153: note = Description of Unknown: Cas Enzyme sequence
MAQKSSYSPKKYSLGLDIGTSSVGWAVLDLDKERIHDLGVRIFERPEDPQNGDSLAKPRRDARSARRRLKRRRQRLNHLKQFFIDQNILTKYRVEEVLDYKSDFNKLDVYDLRAKALTEELSPEELLKVLYQITKRRGFKSNRKVVEESDKEGGRVTSALKTNEKFLADNNYTTVGEALSRDEKFALHKRNKRDDYTNSFARDDFLCELEAIIKTQRNYALKNVPEQAINELIYGIDDGQVTNVSAIMYQRPFMTKELIEKMVGKCTFEDGEKRAPKASYSFEVFRLASDLSHLVFIPRDASKRQAKRENLEVRLSPEQIKQVIELAKSQKSLTYKKVRSTAGISEDYVPKDVRGKKKDGDEFGEENVFGGLKAYNDIRLALKDLPEDWAKIDNESVINQIAYILTTQKADEGIRAELDALPLSDKAKEAIVKIKPTNFKAFGHLSIKALQKITPHILEGMTYDKACEAAGYDFKKQSASLEQITNPVVKRAITQTLKVVRAIERKYGKPYFIKVETARDLAKNFKDRNAIKKENEENQGYNEDIKSIITDGYEASPKTKGGKQLLSHLKEFNVRLNKNADFNGQQIIKVKLYREQNCVCLYSGKPIDFETMLHDDNAYQVDHIIPFSRSNNDGMTNKVLVLTEENQKKGNQTPFEYFGADEKLWKEYVARVGSTYQTREVKKGDKDAGVNYKYNGYAMKKKQNLLLQDYKNDSWNVRALNDTRYITRFIQNYLRQMVSFAEGEEKQRVIAPNGTTTAYLRKRWGLAKDRAEDVLHHAKDAAVVAAIDQKIVMQANLYAKRHEIKALLAATKTMEEKTDKLTGEITDEDEFDKAQRRKAAILVLSSKHFPQPWDNFGKEVMKRTLNTDIATLQNELRGLENYDDEFRLSIKPIFVSRMPRRKATAQAHKETIRSPKVKDGDQRTVRIPLNKLTLDTLEKSVLVESDRVLFNQLKDLLDKTATYDKKGKRTDHPDKAFAESVYKNDKKFDKNGKKLSPVSTIKVYSTQPSGFYINNGKAFVNNGSMVRLDVYQKPNKKGKIEHFFVPVYAHQVGKNKPTPTKILPAPKGFTDVDETFTKVCSLYPNDYVMCKFSENRVEEGYYVMYGIAVGQMVLSPHEVSGKDQKTMRSISPRSAASIERYDISVLGDNYRWL

SEQ ID NO: 859 - protein, 1167 aa, unidentified
  REGION 1..1167: note = Description of Unknown: Cas Enzyme sequence
MLSIITFWLYNYAKRHHKKDFSMTEKSSYSPKKYSLGLDIGTSSIGWAVLDLDKERIHDLGVRIFERPEDPQNGDSLAKPRRDARSARRRLKRRRQRLNHLKQFFIDQNILTKDQVEEVLDCKSDFNKLDVYELRARALTEELSPEELLKVLYQIAKRRGFKSNRKVVEESDKEGGRVTSALKANEKFLADNSYTTIGDALSRDEKFALHKRNKRDDYTNSFARDDFLRELEAIIKTQRNYTLKNVPEQAINELIYGIDDGQVTNVSAIMYQRPFMTKELIERMVGDCTFEKDEKRAPKASYSFEVFRLASDLSHLVFIPRDASKRQAKRENLEIRLSPEQISKVIDLAKNQKSLTYKKVRSTAGISEDYVPKDVRGKKKDGDEFGEDNAFGGLKAYNDIRLALKDLPEDWAKIDNESAINQIAYILTTQKADEGIRAELNTLPLSDKAKEAIVKIKPTNFKAFGHLSIKALQKITPHILEGMTYDKACEAAGYDFRKQSASLEQITNPVVKRAITQTLKIVRAIERKYGKPYFIKVETARDLAKNFKDRKAIENENKENQARNQSIIQTLNENGIVTPTGQQIIKVKLYREQNGVCLYSGKPIDFETMLHDDNAYQVDHIVPFSRSNNDGITNKALVLTEENQKKGNQTPFEYFGADEKRWKEFAARVESTYKTRDIKTADKATNAINYKYNGYAMKKKQNLLLQDYKNDSWNVRALNDTRYITRFIQNYLRQNVDFAEGEEKQRVIAPNGTTTAYLRKRWGLAKDRAEDVLHHAKDAAVVAAINQKIVYQANLFSKEQEMKLYLNNAKTIDEKRQILLQSTDENTGEITDEATFTQAQKDLAQVEYFKLRSDEETKKRFPDPWPGFSKEVMKRTLNTDIATLQNELRGLDNYDEDFRLSVKPIFVSREIRHKIRGEAHESKLRSNRNRNGQNLIRIPLTELTLQRLENSLAKEEFDSQKNSNGSSLYEKLLARLNECNGDAKKAFNPPFKLYKGPKQDKNGNPISPVAAVKVYDKKSVVSVGRKANAPVALAEMVRIRVYKKDNQIYMIPDYRINILENKETMELLKPLKKVSKIDNSFNFIGYLYKGDLITIQKDSQTFVGYFVQFEGDNRITIKSHLAADSSRNSKSTVKRESLSGINYLKIHKVDVLGDVNFSEGIVWPGAS

SEQ ID NO: 860 - protein, 1119 aa, unidentified
  REGION 1..1119: note = Description of Unknown: Cas Enzyme sequence
MTDRKLYKPRKYSLGLDIGTSSVGWAVLDLDKKRIHDLGVRIFERPEDPQNGDSLAKPRRDARSARRRLKRRRQRLNHLKQFFIDQNILTKDRVEEVLDYKSDFNKLDVYGLRTKALTEELSPEELLKVLYQIAKRRGFKSNRKVVEESDKEGGRVTSALKANEKFLADNNYTTVGDALSRDEKFALHKRNKRDDYTNSFARDDFLCELEAIIKTQRNYALKNVPEQAINELIYGIDDGQVTNVSAIMYQRPFMTKELIEKMVGKCTFEDGEKRAPKASYSFEVFRLASDLSHLVFIPRDASKRQAKRENLEVRLSPEQIKQVIELAKSQKSLTYKKVRSTAGISEDYVPKDVRGKKKDGDEFGEDNVFGGLKAYNDIRSALKDIPEDWAKIDNESALNQIAYILTTQKADEGIRAELDALPLSDKAKEAIVKIKPTNFKAFGHLSIKALQKITPHILEGMTYDKACEAAGYDFKKQSASLEQITNPVVKRAITQTLKVVRAIERKYGKPYFIKVETARDLAKNFKDRKVIENENKENQARNQSIIQTLQENGIVTPAGQQIIKVKLYREQNGVCLYSGKPIDFETMLHDDNAYQVDHIVPFSRSNNDGMTNKVLVLTEENQKKGNQTPFEYFGTDEKRWKEFAARVESIYKTRDVKTSDKATNAINYKYNGYAMKKKQNLLLQDYKNDSWNVRALNDTRYITRFIQNYLRQNVDFVEGEEKQRVIAPNGTTTAYLRKRWGLAKDRAEDVLHHAKDAAVVAAIDQKIVMQANLHAKRHEIKALLAATKTMEEKTDKLTGKITDEDEFDKAQRRKAAILVLSSKHFPQPWDNFGKEVMKRTLNTDIATLQNELRGLENYDDEFRLSIKPIFVSRMPRRKATAQAHKETIRSPKVKDNDQRTVRMPLNKVKSRDVENSVLKESDKWLYDKLLERLDAHGDNPEKAFAEPIYKNDKKFDKNGNQLSPVSTIKVYSTQPSGFYINNGKAFVNNGSMVRLDVYQKPNKKGKIEHFFVPVYAHQVGKNKPTPTKILPVPKGFTDVDETFTKVCSLYPSDYVKCYFGDNVEEGYYVTYDSGSGRITVMDAASPNKEGINRHRISPRSATLIERYDISILGDNYRWL

SEQ ID NO: 861 - protein, 1133 aa, unidentified
  REGION 1..1133: note = Description of Unknown: Cas Enzyme sequence
MTQKSSYSPKKYSLGLDIGTSSIGWAVLDLDKERIHDLGVRIFERPEDPQNGDSLAKPRRDARSARRRLKRRRQRLNHLKQFFVDQNILTKDQVEEVLDYKSDFNKLDVYGLRARALTEELSPEELLKVLYQIAKRRGFKSNRKVVEESDKEGGRVTSALKNNEKFLADNSYTTVGDALSRDEKFAPHKRNKRDDYTNSFARDDFLRELEAIIKTQRNYALKNIPERTINELIYGINDEQIINVSAIMYQRPFMTKELIEKMVGDCTFEKNEKRAPKASYSFEVFRLASDLSHLVFIPRDASKRQAKRENLEVRLSSEQISKVIDLAKNQKSLTYKKVRSTAGISEDYVPKDVRGKRKEGDEFGEDNTFGGLKAYSDIRLALKDLPEDWAKIDNESAINQIAYILTTQKADDGIRAELNTLPLSDKAKEAIIKIKPTNFKAFGHLSIKALQKITPHILEGMTYDKACETAGYDFKKQSASLEQITNPVVKRAITQTLKVVRAIERKYGKPYFIKVETARDLAKNFKDRKAIENENKENQARNQSIIQTLKENGVVTPTGQQIIKVKLYREQNGVCLYSGKSIDFETMLRDDNAYQVDHIVPFSRSNNDGITNKALVLTEENQKKANRTSFEYFGADEQRWEKFVALVETTYKTRDVKTADKATNAINYKYNGYAMKKKQNLLLQDYKNDSWNVRALNDTRYITRFIQNYLRQMVDFAEGEEKQRVIAPNGTTTAYLRKRWGLAKDRAEDVLHHAKDAAVVAAIDPKIVYQANLFSKEQEMKLYLNNAKTIDEKRQILLQSTDENTGEITDEVAFTRAQKDLAQAEYFKLRSDEKTKNRFPSPWPDFSKEIMKRTLNTDITTLQNELCGLDNYDEEFRLSVKPIFVSRMPRRKAVAQAHKETVRSPKVKDNDQRTVRMPLNKVKRKDVENSVLKESDKWLYDKLLERLDAHDNNPEKAFAEPVYKNDKKFDKNGKQLSPVSTVKVYSTQPSGFYINNGKAFVNNGSMVRLDVYQKPNKKEKIEHFFVPVYAHQVGKNKPTPTKILPAPKGFTDIDETFTKVCSLYPNDYVRIYLKNKILEGYYSGYDISVGTVILYPHFTPSKDIKVANRVSARSATLIERYDIAILGDNYRWL

SEQ ID NO: 862 - protein, 1129 aa, unidentified
  REGION 1..1129: note = Description of Unknown: Cas Enzyme sequence
MAQKSSYSPKKYSLGLDIGTSSVGWAVLDLDKERIHDLGVRIFERPEDPQNGDSLAKPRRDARSARRRLKRRRQRLNHLKQFFVDQNILTKDRVEEVLDYKSDFNKLDVYGLRTKALTEELSSEELLKVLYQIAKRRGFKSNRKVVEESDKEGGRVTSALKTNEKFLADNNYTTVGEALSRDEKFALHKRNKRDDYTNSFARDDFLYELETIIKTQRNYALKNVPEPAINELIYGIDDGQVTNVSAIMYQRPFMTKELIEKMVGKCTFEDGEKRAPKASYSFEVFRLASDLSHLVFIPRDASKRQAKRENLEIRLSPEQIKQVIELAKSQKSLTYKKVRSTAGISEDYVPKDVRGKKKDGDEFGEENAFGGLKAYNDIRSALKDLPEDWAKIDNESALNQIAYILTTQKADEGIRAELDVLPLSDKAKEAIVKIKPTNFKAFGHLSIKALQKITPHILEGMTYDKACEAAGYDFKKQSASLEQITNPVVKRAITQTLKVVHAIERKYGKPYFIKVETARDLAKNFKDRKAIENENKENQARNQSIIQTLNENDIVTPTGHQIIKVKLYREQNGVCLYSGKPIDFETMLHDDNAYQVDHIVPFSRSNNDGMTNKVLVLTEENQKKGNQTLFEYFGADEKRWKEFVARVESIYKTRDVKTSDKATNAINYKYNGYAMKKKQNLLLQDYKNDSWNVRALNDTRYITRFIQNYLRQNVDFAEGEEKQRVIAPNGTTTAYLRKRWGLAKDRAEDVLHHAKDAAVVAAIDQKIVMQANLYAKHHEIKALLAATKTMEEKTDKLTGEITDEDEFDKAQRRKAAILVLSSKHFPQPWDNFGKEVMKRTLNTDIATLQNELRGLENYDDEFRLSIKPIFVSRMPRRKATAQAHKETIRSPKVKDGDQRTVRIPLNKLTLDTLEKSVLVESDRVLFNQLKDLLDKTATYDKKGKRTDHPDKAFAESVYKNDKKFDKNGKKLSPVSTIKVYSTQPSGFYINNGKAFVNNGSMVRLDVYQKPNKKGKIEHFFVPVYAHQVGKNKPTPTKILPAPKGFTDVDETFTKVCSLYPNDYVMCKFSENRVEEGYYVMYGIAVGQMVLLPHEVSGKDQKTMRSISPRSAASIERYDISVLGDNYRWL

SEQ ID NO: 863 - protein, 1096 aa, unidentified
  REGION 1..1096: note = Description of Unknown: Cas Enzyme sequence
MHYKIGLDIGMASIGWSVLALDEQGEPMQILHMGSRVFEAAENPKDGSSLAKPRREARGIRRRLRRHVHRNERIRRLIVSRNILTHEALAKLFDGDLQDIYKLRTKGLDQLLAPGEFARVLIHLAQRRGFKSNRRADSKEGDAGKLLKAVEENQKLIGEGKKYRTVGEMLNSRPAGERKRNQGDYKNVVARDDVAHEVREIFKAQRYLGQAQADEETERLYLEILLSQRSFDQGPGGDSPYKVDFGALAGNCSLIEGEKRAPKSCYSFERFNLLQKVNHIRIHQSGRERPLTDAERHRLIDYAHEKATFNYGDIRKLLGLDPADMFNIRYGSDKAEDVEKKTKFNFLPCYHKIKSALSKIKKGRIVHFADRLDDIAYAMTITKDDGKLGEKLTELGLEMLDADALVAANSEKSFSKFGHISLKACRMINPHLDKGLTYNQACEAVGLDFQGYNRGKKSKFLHHHQIPELDGLTNPVVRRAVLQAIKVINSIINKMGSSPDFIGIELARELSKTKQERDRADKSMKDNQATNDLIKEQLQEYGVSAPKGYDIVKMKLWKEQDCICPYCLKPLKIEELFSGAGCPEVDHIVPYSISFDDSYKNKVVVCAVCNRTKGNRLPMQYLTGGVRDDFEIWVKNHIRDKVKCLRLLKEGLTEEDEGYKDRALNDTRYVCRLMLNILQNYLELAPPPPGVKKQIIAVNGGITAYIRKRWGISKIRADGDKHHAIDATVVACVTDGMIRKISRYAQRRELQYTQTEQGEFIVDTNTGEVLEDEKHFPQPYPHFRKELKARASSQSVQLIEQLKLPAYTNPAVEATPIFVSRMPRRKSTGAAHEATIHSSKMIDEGYILKSVPLTSLTLDKDGEIKDYYEKARQSDPKLYNALLDRLRAFDGIGGAAEAFKDGFILMGRDGHPPLKKVKIQEHSTLNVSVHDGKGVAKNESMIRIDVFHIPEGKDKGYYFIPVYVADTKKPQLPTHAVVAHKKQEDWKEMREEDFIFSVYPSELLKISFKKTTKFHLPKTSKNSSLSKEYMTQEELVYFISAHIGVGAIKVKTHDGAYVSEPGIKTLLLLEKYTVDVLGSISPAPKETRQGFGKKEG

SEQ ID NO: 864 - protein, 1166 aa, unidentified
  REGION 1..1166: note = Description of Unknown: Cas Enzyme sequence
MHYILGLDIGITSIGWAVIESDQDGAPFKIADLGVRIFKAAEQPKTGSSLALPRRSARSLRRRLWRKAHRKERIKLLLDRVGLITKENLEKLFSASSFEKDVYTLRSEGLDRKLNNEEWARVLYHLAQRRGYRSSSKAEEADTKNDAGKLLKAVKNNSDKMAQNNFRTVGEMFCKDSSDLFQVKDGSGHVIGRKTHNTSGVYDLTVARTFIEEEAHKLFAAQRQFGNAFATENIENEYCEILLSQRHFSDGPGGERTFKFDLRGNCTFEKDELRAFKACYTFEFFKLLQDINHLRIIPEYRKGSNKQTRPLTPEERQKIIDLCLKSSSIDFSKLRKELKLADDEIFNRVGYDVKKKKSKKKDAEEQPEEQLTPEQQRTKCEEATKFTQMQSYHEMRKALDKVAKGTISKFSHDKLDEIGEILSLYKADDKRRERLEQIGLSNEEIEALLPLTFTKAGNLSLGAMRKLIPYLEQGLTYDKACEIVYGDHRAQYKGERMPLLSFGKLKEEGALDSVNNPVVLRAIAQTFKVVNAIIRRYGSPQAIHIELARDMKRNFADRQDIKSKQKDNWSENNRRREKVEEIKGSVATGQDIVKMKLYEDQNGVCLYSGKQLELHRLFEVGYAEVDHIVPYSKCFDDSYNNKVLVFSSENQRKGNRLPLEYMLAEGDEDKLDDYVTLVEANIKNTRKKQRLLKPCLTEQDITDWKARNLTDTQYITKAVADILRNYLAFEEDSPFIKKPVRSINGAVTDQVRKRLGLQKHREEGDLHHAMDAAVIAVTTDGYINRISRYTQRREFGKRIGCYKDKQTGEKVEIERQKGQAPLYIDPETGEKLTEQVFDHKYAPTFPAPWKEFTKELKARMAPNADEAIRQLYLPSYGSEEIKPIFVSQMPDRKISGQAHAETIRSARIDVDESGKERIIAVAKTPLTSLKLDKDGEIDGYYMPSSDRLLYEELKNRLKAYGNAEQAFKEPVYKPKKDGSQGPRVYKVKTYKTTTSNVKVAGGIADNGSMVRIDVFHIKEGKDKGYYFIPIYVADTIKQKLPQKAVVAAKSIDQWKEMDDEDFIFSLYPGDLVRVEHKKDIVFKSTDKNSSDTISCKNLLTYYSGANISTGAITITNHDRSYIVHGLGIKTLQLLEKYEVDVLGNYHKVRLPEKRQAFNLKYSQKKQ

SEQ ID NO: 865 - protein, 1193 aa, unidentified
  REGION 1..1193: note = Description of Unknown: Cas Enzyme sequence
MQQKMEKPEMPYVLGLCLSTTSVGWSVLETDETGIPFRIADLGVRTFQEAKTNYKRSKCRTSRRRLQRKSCIKSRVSELFERSGLITKEALEEIFVKSGFEKDIIVLRKDGLDRKLENDEWARVLYNFTQRRGYKVVSAAREISAKKIAEESKKQNSKSNLSNEDKVAQEEAKRHAGLLAAVNNNTKELKKDNYRTIGEMFCSSKDERFMVKDGSNREIGRTTRNKHGIYSFAVSRELIKDEISKLFDAQRKQGNKFADKSFQKEYENIVFSHNDKSQDLRGNCFFEKGEKCAFKGGYTFEYFKLLCELNNIRIISTESKVDEAVRKITESQRNTIIGLYKKSPKLTPKDLSKKLNLKSSEYLRSFNTKQMQSYHEIREALNKVTKNIANDLSNEQFDEIGEILSLYKNDDERREKLQELRINVGLGNNGLGDAEIKSLLELNFSGTGSLSLKAMKNLIPYLEKGLSYGEACEKVYGDHRTQCGGERMEYLSFKKLKEEGALDSINSPVVARATTQAFKVINAVICKYGSPQSVHIELSRDIKCGSRTRERIAQENEANRERREKLINEVENIKKQKHCEKVNATEQEILKLQLYKDQHGKCLYSGKELDKDKVISESGYAEIDHIIPYSQSFDNSEANKVLTLSEENRNKGNDVPVAYILRKHKNSEKEYDAFVKRVKSVTKEVSNTNKDRQKILEKRKQNLLISPNFKVDELEGLLVRETVGVQNIQKRIADILRNYLRFYGEMPMEQHIVVTKNSITEAICEQLGLQRYYTKVSALSSALNAILIAVTPANYEAKVTQYVQSREEHYTDDGYIDPENGKKLTIEEFDAKYMPESDLKCIYSYLKEEIEIWMSSASDKKSINAKRGKLEKLHKKLGLKGKYENEINNWKPIFVSQMPDRKISGQAHAETIRSARIDIDENGKERIIAVAKTPLTSLKLDKNGEIDGYYMPSSDRLLYEELKNRLIKTKTSGKTYGNAEQAFKEPVYKPKKDGSQGPRVYKVKTWKPTTSNVKVAGGIAKKGDIVRVDIFHITGGKDQGYYFVPIYVADTIKNTLPKHAVVTNFKSSKVEWKEMDDSNFIFSLYKGDLIHIELCADCRDKDSNNKIRKAKDMYVYYDGVDFYQSGKCTNQSIGELNGAINVSWHDGSCEDSIHIKEINVLEKYEVDVLGNYHKVRLPERRQAFNLKYSQKEQ

SEQ ID NO: 866 - protein, 1016 aa, unidentified
  REGION 1..1016: note = Description of Unknown: Cas Enzyme sequence
MTNQSPNTNYRLALDLGTNSIGWAVLSLDSQNQPTSIIDGNSFIFNNSRDPQSKESLAKARRDARQARRQRDRRLKRKKQIIRFLSENNLFPKEKADQKNLEKLDPYKLRFEALSRPLDPFELGRVLFALGQRRGYKSSRKDGQKTDDGKLLKTLNAFETTFEESGYQTLGEYLWKEKQTQLDGDLSNNIQRVYGVRSRAEADPFPYRDLYEQEFDCIRTHQEPHHALSTDDWEKIRDIIYFQRPLKPVERGYCSIYFNDKKPRADRYLPAAETFIAWQTVHNLRIITPNFEKKTLTLDQKSIIISKLSEQKTLAFKKIKSLLNLDDACHFNLESTTKQLTGMPTHIEFKKLIDAWDSFSESKKNEIVSGVFTSENQSEIIQKATTNWGLSEATAQALANLDVSKFATGTLHFCTDALEQLNTLMKKNMDAYEAKQELQKTIAQPTHTTMATLPYYGYVIPEALTNSGKHRTASAEKETGIIGNPTVHVGLNNIRAVVNAVIARMGHPPTAIHLEIARDLKLSATKKSALEKYQKENKKTNERIAAALAELNQANTYTNRLKYKLWEELGEPKLCVYTGKPISAAQLYGDDVDIEHILPLTRTHDDSPANKTLSFRSANKEKGNKSPFEAFGHTLEFESILHRAQSLPKHKHWRFSEAAMDRFNDQFAFLDRQLHDTQYLSKVAKQYLHAICDTVSVVTGQLTAKLRHDWGLKKDRDNHHHHFIDAVVIGLTDASTVQKANVYSKYDRLEAIQFPCPLDKSALHKQLEAITSTRIVYHKKTIRNNGQLHEATNYGYIPEDKRNPSDKKFNLVYRKAFVDLTKKEIAQIRDISIRNTLMERTQGLADNSKEWKSVLDRYSQETGIKQIRLLKTDNPIIPIRHNGHTKWVVPGSSNHHMKVWQLPNGKVAGVIVRLLDINNPNYGTQSFRPKDKAGREIPTAKYLGKLHKGDMISLIHKGTRCTGVIKGLRQNGQIVFKPHNDGGDKSNETISISKWITAEITILQLTVLGDARHTHS

SEQ ID NO: 867 - protein, 1093 aa, unidentified
  REGION 1..1093: note = Description of Unknown: Cas Enzyme sequence
MKYSLGLDIGTTSVGWAVINEDKQRIENLGVRIFERPENPKNGESLAKPRRDARSARRRLKRRRERLDYLKQFFVERGLLSEEEISNLMSYDKGYVHKNPYTIRCRAIKEKVPNDELFTALYHIAKRRGYKSNRRSVEEKDKESGCVLKAIKTNQPLLARHDYSVASTLLEEEKFASHKRNKDSDYDNSFIRADFEVETRAILKAQGWTEGWIDELLCTNPNNPETKGKSGLFYQRPFMNEELILKMRGKCQYEDAPRAPKASYSFDLFRLAQDLTHLEYNDGEKLTPEQIRDCVKVFKEVKEPSYVTVRKTLGYAKDESFHFDYIRGKQENGEKNKFGGLKFYHTVKDALKDFPEDWLRVEQNMELFDKIGEVLTLNKDDESLEEAFAELDLSDKVKEQLMAINVSGFCHLSLEALRKLTPYILDGNTYDKAVELAYPGRFSETLSGNKNELPPLSEDQLHQLTNPVVKRAISQTRKVINAIIKKYGAPHQIKIECATELAKNFQDRHKIEKQQKENAEYNEKIKTKLEELGVSNPTGQQIIKYKLREQQNCKCLYCGASIGLDIFNDEKIVEIDHIVPFSLCGNDSIQNKALVCAKCNQEKKDHIPFDVWGNDAVRWGTITTLANDQKIPFQKRNRIMCEKPPKEGWNERALNDTRYISKFMTRYIKDNLKFANSEKGRQKVLAPTGFITSYLRKIYGIGSKDRELNNCHHAVDACIIATISQGQIKKISDWNKYKELGAKYNTVLSYNEAGEPEQVTTKEYEQLRDTLPPWEDFAKEVRIRSGMSHNTGEIEKLSDFRDKFRQFEAYDEEFLQKIHPLFVSRMPKRSTKGQAHEETIRSPKVKNGGMRLCRKKLDKEFAKNYIKNPSKSWLENSVIVESDKVLYVQLKRLLETKGEQAFDGGVYKNDRRTDKNGRPLSPVRTIKVYEKKPDTSGVYLNKHTQFADNGKTICLNIYRRKDSAGEYKFFAAPLYAHSLGKKAIPILPTPTGRSSKEKADFAKLRNADGLILATQENGFEFVAQIFPNDYIKVAYGDHVIEGYYVKYGINNGNICLLPHNQASKDVFVNCSLGSAFGVEMSPISILGDNYKFE

SEQ ID NO: 868 - protein, 1100 aa, unidentified
  REGION 1..1100: note = Description of Unknown: Cas Enzyme sequence
MKQIRYTLGLDIGVASVGLAVLQNDLHGEPMKIERLGVRIFEKAENPKDGSSLAAPRRQARGSRRVVRRRKHRKERIKRLITSTGMITREQMDELLSSGQYEKCVYELRVDALERLLTVEEYVRLLIHFAQRRGYQSNSKSEEAKDAKENGKVKQAISENRQRMQDHGYRTVGEMFWKDDLFKRINPDGSIVLVVHNQPDDYKVTVERQMLKEEIRLIFAKQREFGNTWASEKFESAYLEIWGSQRNFDEGPGGNSPYGGSQIEKMLGTCTFEDPEPRAPKASYTAEYFRLLQTVNHLKTVGHGLPAEFLDDDQRKIVIEFAMSSPNGTYGQLRKKLALPDDIFFNNLSYGEKSAEQVEKTKLGQMQFYHKVRIALDHVKKGAIRELTVDQLDEISRILTLYKSDANRTTHLQEAQIPEEYIPELLALSASKAAHLSIKAMKKMIPYLEKGYTYDKACIAAYGHHDGENPEAKRDQKLTIGMAGEIYSPVVLRAVSQMIKVINAIVREYGPPEVVRVELAREIGKSRKVRDKLKTQQEANFEKNEAIRKQVEEYKGSAPTGQDIVKLKLFQEQNGVCLYSGENLIISKLFEKGYAEVDHIIPYSISFDDSYSNKVLVLAGENRNKGNRIPYAYFGHDEFRWNRFETLVNSQIRSVKKRKNLLCRALSEEQIKGFKNRNLTDTQYMSRVIYNLINDHLKFAETENYKPKMRTQAVNGAITAQVRKRLGIDKLRANGDLHHAKDAAVIACISPGMIQKITRYSQRCECAWTKAGYVDYETGEVMTKDAYDEKYAPRFPEPWLHFREELEARLSNDPRGEIDLLKLATYDSDEELRPVFVSKMPNHKVSGAAHQETIRSGKQEGGTVSKVALTSLKLDKTGEIPGYYRPEDDPLLYEALKERLRAFGGEGKKAFAEPFYKPKHNGEPGPMVKKVKIFEKATNPVPVNSGLAKTGKRVRVDVFHVENEGYYFVPVDVADTVKDELPNRAAVKGKPMEQWKEMDESDFLFSLYSGDLIHIMSGTKITMKLKDGAEGAESIEIDDALLYFSNFDIANAQIDVSTHDRRYTKHGMGVKTLSLIEKYRVDVLGNYTPVKLPEKRMRFK

SEQ ID NO: 869 - protein, 1129 aa, unidentified
  REGION 1..1129: note = Description of Unknown: Cas Enzyme sequence
MRYTLGIDAGIGSVGWAVLQNDLHGEPMKIERLGVRVFDPSENSKDKATLTSIRRKARGSRRVTRRRKHRKERMKRLITSAGMITREQMDELLSSGKYEKCVYELRVDALERLLTVEEYVRLLIHFARRRGYQSNSKSEEAKDAKKNGKVKQAISDNRQRMQDHGYRTVGEMFWKDDLFRRINPDGSIVLVVHNQPDDYKLTVGRDMLKKEIQLIFAKQREFGNGWASEEFESAYLEIWGSQRSFDEGPGGDSPYGGNQIEKMLGTCTFEDPEPRAPKASYTAEYFRLLQTVNNLKTVGQGHLAEFLNEDQRKTVIEYALTSAEITYGQLRKKLQLPDDVIFNNLHYGEKIIKKPKKKKDSEKNEGEVSKEKESSETVEREKSVEEVEKKKLGQMQFYHKVRIALDHVKKGAIREFSADQLDEIARILTFYKSDDNRTTHLREAQIPEEYIPELLALPASKAAHLSIKAMKKMIPYLEAGYTYDKACTAVYGRHDGKKPGVKRTKKLEISMAGEIYSPVVLRAVSQMIKVINAIVREYGPPEVVRVELAREIGKSRKVRDKLESQQDANAKKNAAIRSQVEEYKKGAPTGQDIVKLKLFQEQNGVCLYSDTPMVRDRLFEKGYAEVDHIIPYSISFDDSYSNKVLVLAGENQEKGSRIPFEYFGHDEFRWSCFETLVNSQIHSVKKRKNLLCRALSEEQIKGFKDRNLKDTQYMSRVIYNLINDHLEFVETGNYKPEMRTQAVKGAITAQVRKRLGIDKARANGDLHHARDAAVIACISPGMIQKITRYSQRCECAWTKAGYVDYETGEVMTKDAYDEKYAPRFPEPWLQFRAELEARLSNDPRGEIDLLKLATYDSDEELRPVFVSKMPNHKVSGPAHEDTIRSGKQAGGTVSKVALTSLKLDETGEIPGYYRPEDDPLLYEALKERLRAFGGEGKKAFAEPFYKPKHNGEPGPVVKKVKKFEKATNPVPVNSGLAKTGKRVRVDVFHVENEGYYFVPIDVADTVKDELPNRAVVADKPMDQWKKMDEANFVFSLYSGDLIRIVSRREIKLNLAKGAERNEFILTNDALLYFKGLDIATGALGLTTHDRRYLQHGLGGKTLDLIEKYRVDVLGNYEPVRLPEKRMRFK

SEQ ID NO: 870 - protein, 1112 aa, unidentified
  REGION 1..1112: note = Description of Unknown: Cas Enzyme sequence
MDNTFSYTLGLDIGITSVGWAVLCNNKDGEPFKIERLGVRMFEAAEVPLQKGQRKKNQKSDSGSLAVARREARGSRRVIRRRCHRKERIKQLIATSGIMTKDELAALFSDTHPKGQSEGKCVYELRVEALNRLLTKEETVRLLIHFAQRRGYKSNSKSEEAKNGEETGKVKLAISENERRMQVGGYRTVGEMLWLDECFKRTDPDGRMTLDVHNRPDEYKVSISRDMLADELGKIFKEQRRLGNSWLTEDFEAKYRTIWASQRSFDEGPGGNSPYGGNLIEKMFGPCTLEPGQTQAAKASYTAEYFRLLQFANNLKLAGNGLPAEPLDDDQRKALMDYVMSSPGITYAQLRKKLGLRKDQYFNSLSYGNKTLAAVEKKKLGQMTFYHELRKALDTVAVGAIQTFSPEMLDQIGYILTIFKSDEKRRTALQEAGVDERYIDALLTLSATKTVNLSLAALKKLIPYLEQGDSYYDACKKAGYHSQNTSRSEKLTIRMASDIKNPVVLRAVSQTIKVINAIVREYGQPEVVRIELAREMGKSREERDQIKKQQDKNAEQNNECREQITELKETVSGQDIVKFKLFQEQDGICLYSGSPMEIGRLFEHGYAEIDHIIPYSISLDDSYSNKVLVLKKENQDKGNRIPYDYLGQDEARWQAFETRVDTRIRDRRKKSNLLLKSLSDGQKEGFRQRNLTDTQYITRLVKNLISDNLQFNETGNFKPSMRVQAVNGSITAQVRKRLGLDKNRSNGDLHHAQDAAVIACITPEMVQKITRHAQRQEFSRSQQGYIDYETGEIMTRDAFNAKYAPRFPEPWPQFRQELEARLSDDPAEELRCLRLPTYDDPDEIKSVFVSKMANHKVTGAAHKETIYSGKMDGCIVSKTSLQDLKLDKNGEITGYYQPQDDRLLYNALRERLRSAGGDGKAAFAEPFYKPTRSGKPGPLVKSVKTWKKSNVNVPIRKGLAGNGNMVRLDVFHVEGDGYYYVPIYAADTVKKELPNRAIIAHKTPNEWKIMEDKDFLFSLYPGDLIRVKKNSGFDLNLSEGATGELKRKVTDYFLYYRGINSSTGAFVVTTHDERYRKEGLGGKTLDSIEKYQVDVLGNYTRVPLPEKRRRFR

SEQ ID NO: 871 - protein, 1100 aa, unidentified
  REGION 1..1100: note = Description of Unknown: Cas Enzyme sequence
MSEFHYALGLDIGIGSVGWAVLRNQPNGEPDRIQDLGVRIFDKAEQPKTGASLAAPRRDARSARRRLRRHRHRLERIRYLMEQRGMMSVSDIQAMYAAGGFQKSPYQLRAEALDRPLSKEEAVRVLIHLAQRRGYKSNSTAEAAKDEKETGKVKTAIEENRRCMAEHGYRTVGEMMFRDERFWQKHPDGTRYHQTRNKAEDYRFTVERAAIVNEVRQIFAAQRRLGTVWMDEDMETAYLSILESQRSFDEGPGGDSPFSGGIGERVGACTFEPDEKRAAKATYTFEYFKLLQDLNRMRLTGMGMPPEPLDAAQRELLKSAALRSASLSYGQIRKKLNLDDDVFFHGLYYGEKTKEEAEKRKWPQMQSYHKMRTALDKVGKGAISTLTEEQLNAIATILTAYKSDSKRVAALREAGIPPQFDEALLPLSFSKYGSLSVRAMQKLIPLLEEGLRYDEACTRVYGDHRGLRPEQRTNRLSLNDMEEITNPVVRRAVSQTIKVINAVVRTYGPPDVVRIELAREMSRTFDERRKMEKRQDDNRAANERAKDQIAEYKGDHATGLDIVKFKLYREQDGVCLYSGQNLDIARLFEPGYADVDHIIPYSRCFDDSYQNKVLVLASENRQKGNRLPYEYFGQDEARWHGYEVRVENLIHNYRKRQKLLKRRLTEEESTGFIDRNLKDTQYITRAVYNLIRDHLAFAESNYRKKPVQAVNGAVTAMLRGRWGVQKIREDGDLHHCLDAAVIAATTPGLVQRLTAYNKHRETWERPPAGYVDPATGELIELPQEARRDPFPKPWERFRQELEARLDPIDPRHQIDLLKLETYESDEEIKPVFVSRMPNHKVTGAAHAETIRSSKGGDGFTVTKTPLTNLKLNKFGEIEGYYNPASDTLLYDALLARLKDFGGDGAKAFAQPFYKPKKDGTPGPRVDKVKIREKATVGLPVRDGIAANGSMVRIDVFYVEDDGYYFVPIYVADTKKDRLPSKAPVAHKAYSAWKEMRDENFIFSLYPGDLVRIQSRAGIKLSLAKDGTGEKEIVRQNGLYYYRSADIEGGKIDIEVHDRRYSKHGLGLKTLQSIEKYQVDVLGNYYKVDLPEKRMTFSKEG

SEQ ID NO: 872 - protein, 1100 aa, unidentified
  REGION 1..1100: note = Description of Unknown: Cas Enzyme sequence
MKYTLGLDIGTSSVGWAVINNNKNRIEDLGVRLFESAENQKDGESLAKPRRDARGMRHRLARRGYRLDKIKTIFEDEKILTREQIETIHSHPNNPYEIRARGLDKLLTPEELFIAVYHLAKRRGYKSNRKKAVEEDGEKANENRAVLGNIQNNKKLLEAGGYRTVGEMLFKDKNFEAEKRNKQGNYLHACSREMLQEELETLLKTQQTFGNKNVTDKLIEKLAKPKTGAFGYQRHYAQGDQIKKMIGFCTFEPTEMRAAKATYSFQYFNVLQRLNNLKITNKEDQSERPLTETERAKILNRAFSTKEVKYSQIRKDLELKAFDRFNMVQYFIRQKDAAGKTDDEIVDLIEGKSKFPSMTKYYELKKTIGEKDWEMLQKQPMVLDAIATALTVYKTDEDIKKELENITLGDGNKLSESIINATLALSFSDFGHLSLAALRKLIPFLEKGMLYDDACREVYRDHKGFKPERGIKLRPLDVNDHSITNPVVRRSISQTIKVVNAIIDKFGPPTEVHLELGRELAKNHKERTQDHKKQKENAERNDKAKAQIEELGVQTRGGQDIIKFRLWEEQGNKCAYSGNRIDELRLFEDGYTEIDHIVPFSRSFDDSYNNKVLVLKKENQEKGNRIPYEVIGGDADAWARFGNIVNSMNISPRKRQNLLLKKYTGGDITTRSLNDTRFASRYLKNYIADTLLFAEDAPKQKVVTVNGQATAYLRKRWGLNKSREENNRHHAQDAVVVAVTTQGLVQRVMRYSKTGEIVDYLHAHKDSKIVDPETGKEYDDEIAREAKDQYIARHEHRIKFVEPWEGFTRELGARMQDDAVERLKLLQHTLGLAGYPETEDLNFVRPIFVSRMPNHKVTGRAHQETLRSPKRMKNEESVVRKQLSGLTLKTLENMAGKESDAKLYEILKERLTAYGDDPKKAFATPVHKPMKDGTDGPIVRSIKIVSDGQKSGLLVNEGKALVDQDTMVRIDIFSKESKKGKKQFYIIPVYAYHFAKGVLPDKVITAKSEKDWEKIDESFAFEFSLYPNDLVKLTKEDKSLFGYYSGCDRAQASIHILPHDQNSPVRGNGVKTLDNIEKYSIDILGNYHLVRGEKRQEITR

SEQ ID NO: 873 - protein, 1112 aa, unidentified
  REGION 1..1112: note = Description of Unknown: Cas Enzyme sequence
MKYRIGLDIGIKSVGWAAFACDEDGEPTRLLDFGSRIFNKAEQSDGKSLAAPRREARALRRRLRRRAHRIERVRNLAATAFDDEVISKAENNREDIFALRVKGLDEALSAEELCRVLVYFAKHRGYKSNSKSQSKSPDDGKVLSAIEDNRKKLVEKGYRTIGEMIFLDGHFSQNVEGKKIYLVRNKNGAYDKCFLRADLRDEAQKILDRQVALGVVDGDFETAYLAIFDSQRSFDEGPALPSKYHIENYSVGMFQGEERAPKAAYSAEYCAALQRINNLRISENGREYALDLNQRQILIAKIRAERKLTYTQVKKLLSLPDEATFNLLSYSSDRGKRGGKSVAEVENTRFAAMEGSYQIRQCLNEENRTNVQLLDNLAVILSHCKSDEKRLERINSDPLCAKLTEEEKQALLSVDCKAFAALSLSAMRRIIPFLEEGDKYSEACEKAGISLCARETNKKYELLRGENITQIINEITSPVVRRAVSQTAKVINALILRYKSCDGSLIGVNIELARELAKTYDDRQAIDRQNKERADDYDSKAQKLREEFGLLKVRPHHVLKYRLYEEQGGKCAYSGKNIDLSRLFSEENYAQVDHIIPYSRSFDDSYSNKVLVLTKENQDKGNRLPLEYLSSDEEKAAQFKAFVMAQYTDVSQRKKRKNLLREQFTEENEREWKDRALNDTRYATRLVYNLIKDYLLIEPIKGKKKQVYAVNGAITYYLRKIWGLVKNRDEGDKHHAQDAAIIACATDGMIQRITKYNKIMEYGGVWDSEKEKYLYPDGDGVLLDADEYDSKYGYIKEPYAGFRDEIQFRLMNNPQEYLPVKEALLTRLGYSHEECLNIKPIFISRMPNRKADGAIHEQTIRSARALEDGISVIKTPLQNLKLDKDGEIKDYYWKAKRDDKLLYEKLKNQLAMFGGDGKKAFADTFYKPKADKSDGAVVKKVLTATAFNTGFKFSSGKAVADNGSMVRVDVFKKENKYYYVPVYMKDIYAKRLPDRAITRDRKYEDWTRIDDSFTFLFALFPSDLIHIKAEKPFKLTSTNSKEKITAMVSEGFFYYKGIDSNTGAASIITHDNSYETRIGLKTLPLIEKYEVGVLGDIHKVTKEKRLNTQWDT

SEQ ID NO: 874 - protein, 1070 aa, unidentified
  REGION 1..1070: note = Description of Unknown: Cas Enzyme sequence
VYRLGLDIGTTSVGAAILNIDHYGEPNRIIDMHVRTFEAAENPNDGSSLAAPRREARGARRRNRRHKHRLDRIKALIQSEGIYTKEKLDSLYHAKGNILMDIYQIRYESLERKLNNEELTRLLIHFAQRRGFKSNRKNEKKGSDEGKLLAATADNEKYLKEKGYRTVGEMLWKDERFAGNKRNKGGDYSNTFLRSQLKEEIGIIFEKQKAFGSLYVTDAFSEKYLEILFSQRAFEEGPGEESPYAGNQIEKMVGKCTFEKEEKRASKATYTFELYNLWQKINSIGILQDGVKRRLTDDERNKLFALCHKTEKIDYKRIRKELELGQDALFSNLTYGQKEVEEVEAAKFQYLPVYHEMRKAFDKISKNHVLQISNTQRDLIGTAITYYKADDKIQQALLEGKFSKEEINAILGMKNFSKFGSLSVKAMQKVIPYLEKGLTYDKACEQAGYDFRAHNVAEKKKYLPKLPQNTYDITSPVVKRAINQTIKVVNEIIKRHGSPAAVNIELAREMSKSFKDRKRIEKEQKDNAAQNQRIYDEIKDTFHVAQPSGQDIVKYKLWQEQDCKCVYTGQPIKAENLFVPGYYEVDHIIPYSISFDDSYTNKVLVLTKANRDKGNRIPMQYVADKEEYEIRVNTLIKNRAKREKLLKPILTEEDMGEMKQRSLQDTQFITRFMMNYIKDYLLFDEAYDRKQRVTAVNGRVTAYMRKRWGINKVREDGDLHHSVDAVVVACITPGIVQTVTEYAKREENRYLNKDDVAMRERFPMPWPEFSTELDIRTCKEPKEMLRKVSLANYQDVDIDSIKPIFVSRMTKKKVTGQAHKETIRAYREVDGKMRTVTKTSIQELKLDKDGEIEGYYNPSSDILLYELLRSRLKEAGGNGKKAFPEGFVYKPTPNGGVAPKVKKVKICAVSNLNIPVNHGVAANGDMVRIDLYYVEGEGYYFIPIYISDLMKEELPKKACVSNKEYHDWKNMKDEDFLYSIYPNDLLHIKSSTPKKFTKNIQKGKENDSFEAEEAFVYYIKAGIGTGSITVVTHDNNYTIQSLGIKTLNCIEKYHVDVLGNKYKAAVEERK

SEQ ID NO: 875 - protein, 1069 aa, unidentified
  REGION 1..1069: note = Description of Unknown: Cas Enzyme sequence
MRYGIGLDIGIASTGYAVMELNEEDRPVKIIRIGSRVFNKPENPKDGSSLAAPRREARGMRRRLRRKAHRKLRIYRLLENEGMLTVETMEKLYNGELPDIYELRVQALGRLVTREEFARILIHLSQRRGFKSNRRGDAKDAEAGKLLKSVNANKVLMEEKGYRTVAEMFANDNTYKNHKRNKQGNYLSTVSRDLVLEEVRKIFGAQREYGNTFANEAFEKKYTTIWESQRSFDEGPGGESPYGGNLIERMLGDCTFEKGEKRAPKASYSFELSNLLQKVNNIRLSGGGTEFSLDTLQRSDLVGFAHNIEKVTFKKIRKLFDIPTTFLFNHVRYDKNKTTEEDILAQEDKTKFEYLKAYHAMRLALKEVSPERIASIMTKERNEIARVFSLYKNDDRVKEELEKIDITPPDRHALASNLGSFSKFGNLSVKALDKVIPFLEEGLTYDKACEAAGYNFKGEGVGERKPFISLAHLAEETQYDITSPVARRSLSQCAKVINGIIREMDGIPPAYINIELAREMAKTHKERQEAEKAMDKNRVVNEGLKNEIKERVGFAPKPYDIVKLKLWKEQDGSFGGKCPYCLKRLEYEQLFDIGYADVDHIIPYSDSFNDTYNNKVVVHAACNRQKGNKLPMQYLSGEVRDKFVVLVNQSRFSPAKKRTLLKAEITGEDRESFTQRNLQDTQMISRFMYNYLRTYLQFSPLESGRERNVTAVNGAVTAQMRKRLGIQKIREEGDKHHAIDAAVIACTTQGMIHEITRYSKYKETRYLNTETEYGPEDSFPEPYPNFVSDLESNLKYVFVSRAPERNVTGAAHKETIKGVTPDGGLVKKVALETVKLDKDGEISGYYRKEADPALYEAITQRLLDHDNDPKKAFVEPLVKPGGDGRVVSKIKILEKSTLNVPVHKGKGRADNDSQVRTDVYYVEGKGGGYYLVPVYVADTLKMELPNKAIVAAKPYEEWPEMKEEDFLFSLYPNDLVWLEHKKSLPLKLNKHNETGSLVDKIEKKGEYLYFKGVGIGDSAMVAINHDNSYEFKSSTKTLVAFEKWEVDVLGNISKIGKEPRKCFTKSKEA

SEQ ID NO: 876 - protein, 1155 aa, unidentified
  REGION 1..1155: note = Description of Unknown: Cas Enzyme sequence
MYRLGLDIGIKSVGWCVLECDENGEPIQINALNSRIFDAAEQPKTGASLAEPRRNARGLRRRIRRKSFRLERIRKLFTENGIELFETQEDLICLKDEYKNLDVVKLRSDALDKKLTEAEFARVLYSLARHRGFKSNKRVVETDDGDEEKKGKGKGKDGDEGKLLSSIRESEEEMRESGMRTRGEQLYKKYLLEGKPVHNKDGDYSMCVSRDILVKEIELLFEKQKEFGNAFATDENKEKYLNIFLSQRNFDEGPGKGSQYTGSHDVKKCEIYRNEDVAAKGTYTSEWATIYQKINNLSIICGGDRGRLSNEERQIAVELAKKVDKVTYKAFRKAIKLDDDYRFSTLNYSEKKKQGKKKNEDESKSDVVEINDVVDSLKCEDSEFITAKNSNKIVKALNDNLKNDIELIDEIAEICTKYKSENLFRSAIAESKIIGGRLDEETIEKLSKIDMKGYGHLSLHVLREILPYLEEGMVYSDAMQKAGHNHSEHNFEKQKYLGTKEVYDVIGGVTSLVVKRALSQTVKVIDAVIRQYGSPYAINIELARDMSLTKDERDKLKKENDARAVKNEAIRESIAKLNAMPNSTNVLKYKLYEEQDHKCAYSMETLDINHLFEDGYYEIDHIIPYSRSFDDSFNNKVLVLKRENQNKRNSTPVEYFERIGRDYDEVLAFWKAVYQKRNRKKLEFLQKKEINESEWKNRALNDTRYASRMLANLIKDYLLFDEKSKDKYGRVETVKGAITSYLRRFWGVQKIREDGDKHHAVDAAIIACVTPKTKNKIERYNQIKESRKMRNGQYVLEDGEICDSDYYDKNSHLVLPYPYKEFINELDARVMDEPVLMQNKLRLLGFNENYLMKAKPFVVSRMTSRKAKGCINDATVYSSKYADNKNPTVCDGNNVIVKRTALANLKLDKNGEINGYFQPDGDVALYNALKQRLVEFDGDAKKAFATPIRKPCNSGQGNIVRTVKTYETYTGGGMLLEKNKGIVKNDGMIRVDLYSKDGKYFGVPVYVADLYRGKLPKKAATPEKPQNEWRVMDDTYTFEMSIYQDDLLRIESEDGIELKKNKDIENSAKAPTKTIADDLVYFIGFDRSTTAIKIEDTTGCYCGRKRIMNIKNITKCEIDVLGNVQEIKKRPKQPQPLKMLTDKERAEKRKNNQNK

SEQ ID NO: 877 - protein, 1117 aa, unidentified
  REGION 1..1117: note = Description of Unknown: Cas Enzyme sequence
MYRIGLDIGIKSVGWSVLDCNDKGEPIGILMLGSRIFDAAEQPKTGASLAMPRRLARGNRRRLRRKSARLSYIRKLFEKNGIFIFDESETQIKSALRDMDVLAKRAEALDSRITEEEFARVLYSIARYRGFKSNRKSGASAEDGALISAIAGNKQKIEEKGYRTVGEYLFKEYENKGLPVHNRGDRYDMCIALDDLKEEIEILFKVQKKLGNGIASDEIKNDYMNYFTAQRTFDEGPGIGSPYSGKLPVRKCTFYPNLDCVAKGSYSNELSTAYQKINHLSIINGGERSSLTQAQRESIISRAHEKEKVTYKDVRKLLKIREDDRFAGLNYSVGMKKKKDGTVTETDPLKCEDATFISLKNSNAIRKVILSDEARNDVKLIDEIAEVCTRYTNERLFRDAISKSSVIADRLSENEISELLKLDMKGYGHLSNKALNAILPYLANGDVYSEACKKAGFDHSKFDTEKGIFLGKSSIVRDKIEEVTSPVVKRALAQTIKVIDAIIRKFGSPYAINVELARDMSQKKEDRDKTAKESQERALANEKIKTRLQVDFGVNANSATVMKYKLFEEQNEKCIYSGEPISLDRLLHDEKYCEIDHILPYSRSFDDSFNNKVLVLSKENQNKRNDIPYDYFKRIGRNWSEFETRVKATYQKSNNKKMEYLLKKNFDEEGWKNRALNDTRYASRMLFELIKDHLIFDEKAKKRSVMTVNGRITSYLRRFWGIPKFREDGDKHHAIDATIIACVTDGVTQKLTHYNYAKEARRVKDGKYLMPDGEIVGSEYYDRNGNFVLPYPYANFIEELRARTLEDEVEMQAALRRIGIDESIAASAFPFTVSRMPHRKANGAIHEATVWSSKYVNNSNENLCKGESVIVKRTPLEKLRLDKTGEIAGYFNPSSDRLLYAAIKQRLIEHGGDGKKAFAEPLYKPCKSGQGNEVHTVKTFEKYYGGGVKLEKNQGIVANGSMIRVDLYSKNGKYFGVPVYVSDLYKGVLPNRAATPNKPRKDWRVMDDSYTFEMSVYPNDLLKIESDKGIKMRKMIVSERSDKPSEKLLNEGYFYYSAFNISSASVTLEDPTGCYFSSGVGIQKLKRIIKCEIDVLGNVKEITRKPNAPMPLKRKSR

SEQ ID NO: 878 - protein, 1089 aa, unidentified
  REGION 1..1089: note = Description of Unknown: Cas Enzyme sequence
MKYAIGLDCGISSVGYAVMALDFKDEPCRIIKLNSRIFNAAENPKDGSSLALPRREARGGRRRTRRHRHRIERIKHLMLKSGLLNESELSTLFSGQLSDIYMLRTKALDEKVTNAEFARILINLAERRGFKSNRKSEAIDKETGRLLTAVSENEALMQKSGWRTVGEMLYKDEKFAKYKRNKGENYTNTVSRKMIENEAEQIFSAQRRLGNAFATEENEQLYLDILLSQRPFDVGPGEGNANSPSPYAGDQIFKMIGNCTLFPKEKRAAKATYSFQMFNIWQNINHITLSDESGNKTTLTDDERKKIYRLCRNTANVTYKRIRKELEIGREYTFNSISYGSKDAEEVESKAKFNYLNAYHDIRKALNKYEKNYIEKLTPDELDSIGTIFTVYKSDDKIIENLKKAGINEALYDPLLDLKGFSKHGHISIKACKELLPYLQEGMTYDKACAAAGIDFKSHSRSEKGALLPANADELDDITNPVVRRSVSQTIKVINSIIREMGSSPVYINIELARDLSKSKSERNEIEAQNKTNRAENERVKERIINEFGIRYPTGQDIVKFKLWLEQDGICPYSQKPIKAEMLFSDGYVDIDHIIPYSISFDDSYNNKVLVFSAENRRKGNKLPLEYLSGKARDNFIVWVENNVKRFAKKRNLLKEKLSEADFSGFRERNLNDTRYLNRALMNFITDHLEFAPYSEGRKRHVMSVNGRATDYMRKRWGIAKIRENGDLHHAADAAVIACVTQSNINKISLYSQQKETKYTEPGENGSAAFNINTGEVKDVFPLPYPEFRKELEYRLSDDPRHYLRMDPLGNYTSEEIEATKPAFVSRMVNRKVTGAAHEDTIRSGKEKGYKISKVPLSKLKLKNGEIENYYNPEDDRLLYEALKARLEKFGGDGAKAFPAGFEFHKPKADGSDGPAVKKVKIKEKTSSWVNAQDGIADNGRMVRIDVFHVENDGYYFVPIYVADTVKPELPNLACVAGDKPWKPMDDRDFCFSLYANDLIKITAKKDMKLSLKFKESTLPKEKYGNEMLLYYVKAGINTASITVENHDGSYIISSLGIKTLNRIEKYTVDAIGNIHMVHHEKRMRFNKK

SEQ ID NO: 879 - protein, 1104 aa, unidentified
  REGION 1..1104: note = Description of Unknown: Cas Enzyme sequence
MIKQNYRIGLDIGIASVGWAVLGHDADGEPNRILARGVRVFEAAEKPKDGKSLAEERREARSVRRRLRRKKHRLERIKELITREFNIDVNTLFETSERKDIYVVRYEALDKKIEKEDWARLLIHLAQKRGFKSNRRSEKEGDAGALLKATSNNKTIMEAKGYRTVGEFLYKEHFEKNEPIRNKKGDYKNTFLRSQCEEEVDLIFVNQIKFGNKRASEKLKEEYKGILFGQRGFDAGPGKGSRWGGDLIEKMRGKCTFCKNEPRAPKNSYTFERFMLVQKVNNLKGLTQEQKEQVIDEAHKTQDLKFTKIRKSLKLADDYKFNFVNYSPPKKKGKKGETEDVEKEKKIKDPEDTTFVKLKGYHSLKDITTDPDEIDRIAYVLTVFKTDERIKEKLLEAGLTDDKIEKVLDKNINFTQFGHLSTKAIKQLLPHLEEGMRYDEAATKVFGDHRALNKDGKRVNKLKFNDINKDIVAPVVKRAVSQTFKVVNAIIREYGNPELVCVEVGREAARSFRERQDKEKEIKENQEINERIKNKIVELGVPHPRGQDIEKYKLWQEQQNICAYCQQPLEVGSLFSKAAEVDHIIPWSVCFDNGYRNKVVVHAACNQEKGNRIPMEYIKTKGERRVDQFRVFVGNHIRNLNKRSRLLKEVLTEEDLDGFKQKNLQDTQHATRTVANFIRNNLEFAESENFKNQVITVNGGITSFIRKRLSNAERQKDRSTDNHHAEDAIFVALAGNQLTRHSRLISLIQVYEASKRENGTKKDLHFPEPWKEFRQDMSDWFSLSEQEGTNGEKIKPLFVSRMTNHKITGQAHAETIMKVKDITDEDGKEKKIFIKKVSLDKLTPIIEKGVVVGIKNYYEPQSDTILYNAIINRLNMFGGDAKKAFEKQDFYKPTKSGENGNIVRTVKVFETTGGGGLELKKVGANAANGAMVRVDVFSKPHKTGKKQFYLVPIYVADFKKKELPITATNGNVMDDTYSFEFSLYAKDLISIQSKGGLTAKGVRDEEKNKPLGIVANGKQELVYYTNTGINGGLINVVSHNKGYKIESIGSQNLEVFEKWEVDVLGNVKKAAFVPRDTRTLYKGRNQDKQDYILKKQRKERRQKN

SEQ ID NO: 880 - protein, 1176 aa, unidentified
  REGION 1..1176: note = Description of Unknown: Cas Enzyme sequence
MNYRIGLDIGIGSVGWSVISHDVSGDPMRIVGCGCRTFVPAENPKDGTSLAVDRRNARHSRRTLRRRNLRLKTLKAILKKELFNGEIDFNTFLGDGTDIFMLRYTALDKKVSKQDFSRILVNIFKHRGFKSTRKSELKEKDAGSLLKAISQNEKLIKENNYRTVGEMIYLNKNFHNTVSNTKKENIDIYMVRNSSGNYEKSFSRRELENEINEIFSAQRKLGSSWASKELEQKIIELFSRQRSFDEGPGEGSKYKASFAVGKCTFEEGEKRASKGSRTFEIFQCLQNFNNCKITSLIDGDRFLTKEEKDKIYEKFLSTSKLTFKQVRKLIDLKDYQRFNLVSYDSKRKSNIKNNVEQKETKEKDPEDKVFVSKEKSALVEKSLSLNSKFNELNNDEKISCIDDCAQMVTIAKSDANRMNFVLTNSSFEKWQFLRDEAEKFKLIDEKELSEEEKIALYPKCFSELLEVDFSKVCNLSTKAMKKMIPFLKEGQKYDKAATSAGYKFNEQEQNLQDKISAKEIFEDIDSITSPVAKRAVSQTIKVVNALVNKYGTPDSIFVELAREVSKTFDERRKITQSQNENMISNEKIYTQLKSFGLTNPKGQDIQKLKLYYSQGGKCAYSQKSLLEVFGNMASILSNNNTQIDHIIPYSKCYDDSMSNKVLVCADENQNKGQRTPFEYFGQDQERWEKFEMFVESQFGKSKKARNLLKMGVSDEEAEELNSRALNDTKFATSFVQNMLKNNLKFADSKFSKVPVRAVNGSITSFLRKIWGLSKDRVENDKHHAQDAIVIATATNNVLQKVTKYLQFRSNKKIEKHDGMLVDLQTGEIIPLIPEPYTGFVSEIKAILSSNPQLYAKDLQWAGYDNEEISKIKPIFVSRMPTRKIKGPIHDSTIRSVALNQKTNKGLTIVLTKTPIQNLKLDENGDIKDYPQKFIESDKLLYEKLVARLKLFKGDGKLAFKEPLFKPNPKGGNSPVVKTVKLQKAINDFVEIKTGEGKGIAEKSNIVRTDVFEKNGKNYLVPIYVSDVYSGILPNRAITQGKPFSEWKEMDETYHFKFSLFPNDLIFIKNKKEMPATKEITNVVIGEDGKEKALKQKINGFVNNSYFYYSSCDSSTASIAIFTHDREWSLRIGVQSLDIFEKYQVDILGNVSKAEFEPRQEISLKNSFVTDYEKIGE

SEQ ID NO: 881 - protein, 1088 aa, unidentified
  REGION 1..1088: note = Description of Unknown: Cas Enzyme sequence
MIPYAIGLDVGISSVGWAAVALDEAERPCAILDMGSRIFDAAEQPKTGASLAAPRREARSARRRLRRHRHRNERIRRLIVNAGLLTEEELTTLFDGTLEDVYSLRVRALDEPVSKPDFARILLHLAQRRGFRSNRKSASDKEDGRILAAVAENTMRMAEKGYRTAGEMLLCDPAFAQQKRNKGGDYTTTISRDMVAEEVKTLFASQRNAGSAFAAPELEEAYLEILLSQRSFDEGPGGDSPYGGSQIERMVGKCTFFPEEPRAARACYSFERFSLLQKVNHIRLQKDGESICLTEGQRRKLIELAHKSASLDFARIRKTLELPAEYRFNVVSYRTENTPEEAEKKEKFNYLKGYHSMRSAIEKVGKGRFALLTAEQRDAIGTILTLYKADERVRSELMAAGIEACDAEALLSIGGFSKTGHISLKACRLLIPFLEQGMNYNEACAAAGLDFHAHEDDGRSEYLHPAEDDFADITSPVVRRAISQTVKVLNAIIRRYGPSPVFVNIELAREMAKDFSERKKLEKENKENRAKNERILERIRTEYGKNNATGLDLVKLKLYEEQGGVCAYSQKQMSLQRLFEPNYAEVDHIIPYSLSFDDSYRNKVLVLTEENRNKGNRLPLQYLSGKRREDFVVWVNSSVRDYRKRQKLLKERLTEEDEKQFRERNLQDTKTMSRFLLNYIQDNLLFAPSACGRKKRVTAVNGAVTSFMRKRWGITKVREDGDLHHAVDALVIACTTDAMIQQVSRYAAFRECRYMQTETGSLAVDEQTGEVLREFPYPWPQFRRELGLRLSNDPVRLLRDMRIPFYDEHDIVPKPLFVSRMPRRKVTGAAHKDTVKSPRALDEGSVVVKRPLTDLKLKDGEIENYYRPESDRLLYAALKARLAAFGGDGAKAFAEPFYKPRHDGTQGPPVKKVKLCEPSTLNVAVHGGKGVADNDSMVRIDVFHVEGDGYYFVPIYVADTLKPELPDKACVAFKPYEEWKPMRVEDFLFSVYPNDLLRVTHKRTMKLSKTNKESSLQDSVEGKSMFLYYISAGISSATISCRNHDNTYEIRSLGIKTLEKLEKYTVDVLGEYHKVEKEPRIPFTQKRS

SEQ ID NO: 882 - protein, 1080 aa, unidentified
  REGION 1..1080: note = Description of Unknown: Cas Enzyme sequence
MHYSIGLDIGIASVGFAVMELNEEDSPTSIVRIGARVFDVAENPKDGASLALPRREARSARRRTRRRRHRKERVRALILEQGLLSIGQFEMLYRGSLPDIYAIRKDALDRLITNEELARILIHMAQRRGFQSNRKGASTKEDGVLLKAVSENKAEMEKNNYRTVGEMLYLDVRYDAHKRNKGENYLNTVSRGMIEQEVREIFAHQRVFGNAMCTPELEEEYLAILLAQRSFEEGPGPLATGKVNPYAKGIAGMVGFCTFEPTEHRAPKASYSFERFDLLQKINHIRLEADGKTVPLTKEQRLKLISLAHNVEKPTFQRIRKELELPDGVRFNSIRKYEKDLDAAEKKEKLNCLNAYHAMRKALDKVSKNRILALSTAERNEIGKIFSLYKSEERLREEAAQASIEKLDMDALLEHMNSFSKFGRLSVKALDKIVPFLEHGLNYNEACEKAGYNFKGHASGETKAKISLSHLAAECEHTITSPVAKRAISQCAKVINAIIREMGGIGPVYINIELAREVSRSHKDRTDMDKGMRENATQNEQLKNELLETDGRLNPTGLDIVKLKLWKQQDGVCPYSGERIFRDRLFDHGYADIDHIVPYSTSFDDSYKNKILVKSNENRQKGNKLPLQYLSGAKRDTFILWTTHQATLPAAKKRLLLKEELTEADKEGFKERNLQDTKTISAFLYRYLSDYLRFSPFATDKKRHVTAVNGAVTSMLRSRWGLSKVRADGDMHHALDAAVIACTTQGMIQKLSGYYTRRETFWDKEQFPQPYERFSDELIARLSTDPQSGIRGLKLHTYDDARLQQLAPVFVSRMPSRKVSGAAHKETIKGVGEDHTVIKKVPLTALKLNKDGEIDQYYNPNDDRLLYNALRQRLIAFDGSGEKAFADKFYKPKSDGTDGPLVKKVKILEKSSLNVLVHDKQGAADNDRMVRVDVFYIEGDGYYLVPIYVADTVKDVLPNRAIVANKPYDEWKVMNDEDFIFSLYPNDLIYVKPKKPMVFNKINKDSLLPDKLEKEASLVYYKGAHIGTGAITIINHNNSYIVGGLGAKTLQAFEKYQVDVLGNISKVGHETRQGFDQKRR

SEQ ID NO: 883 - protein, 1095 aa, unidentified
  REGION 1..1095: note = Description of Unknown: Cas Enzyme sequence
MRYSVGLDIGIASVGYCAMELDEDDLPLRIIRVGTRIFDKAENPKDGAPLAVPRREARSARRRIRRKSHRKDRIRKLIISQNILSTEQLDALYENVVLDIYQIRSEALDRLITNEELARILIHIAQRRGFQSNRKKVSTKEDGALLSAIAENAAQMKKQGYRTVGELLYRDERYREHKRNKAENYLNTVSREMVCDEVCKIFLQQRELGNNCCSKEFEEAYLKILLSQRSFEEGPGHGNENSPSPYAGDQIEKMVGLCTFEGEQGEKRAPKASYSFERFELLQKVNHIRLDINGKSVPLTPDQRLRLIELAHIMPNLTYSHIRKELSIPEGVRFNMIRKYEKDVDSAEKNEKFNCLKSYHEMRKAFDKVSKNRIMQVSVAERNEIAKIFTLYKSEAKLKDALSEMLEPQEVEVLIDNLGTFQKFGHLSIKALDKINTFLEVGQNYSDACESAGYDFKGRSVDAAKKIIYLSHLAEMTERTITSLVARRALSQCAKVINAVIREIDESPVFINIELARETAKPYEERKKADKGMKENSAHNERLKTRISEEFGKVNPAGLDIVKLKLYEAQGGICPYSVTQLDITRIFEPGYVDIDHIVPYSISFDDSYRNKVLVRTNENRQKGNRLPLQYMTGERRDKFIVWVNNVHLPAAKKRLLLKEEITDLELAEFKERNIQDTKTISSFMHRYLSDYLTFSPFVSGRKRHVTAVNGAVTSMLRKRWGLTKVREDGDLHHAIDAAVVACTTQAMINKLSGYYERRETFWDEGGKEYEVSKKTGELRERFPQPYEQFSDELIARLSSDPQSAIGGLNLNTYNDEALQKLSPVFVSRMPSRKVSGAAHKETIKGIATDSSPIKKVTLTALSLDKDNEIKDYYNPNDDRLLYNALRERLIAFDGKADKAFAESFYKPKSDGMPGPLVKKVKIFEKSTLNVLVRGEKGVADNDSMVRVDVFHVEGEGYYLVPIYVADTVKDTLPNKAIVAFKPYDEWKEMSDDNFIFSLYPNDLIHVKAKKSLTFSKVSKENKLPEKSEKDDAIVYYKGTDISVGAMTVINHDNSYTIKSLGAKTLQVFEKYQVDILGNLSKIGREKRQDFSQMRR

SEQ ID NO: 884 - protein, 1031 aa, unidentified
  REGION 1..1031: note = Description of Unknown: Cas Enzyme sequence
MRRRIRRHQHRLERIRYLLVSSGVLSKTELDNLFCGQLCDIYMLRAKALDEPLTAAEFSRVLIHLAQRRGFRSNRKTDAQDKEAGKILSAVSENTEEMERGGYRTVGEMFYKDEKFRQYKRNKGDDYAATVARSMVEDEMHKIFEAQRRFGMSFASKALETQYTEIALSQRPFDLGPGAGPKNAPSRYAGDQIGRMIGPCTLLPEEKRAPKASYSFQVFTLWQNINHLRIAAPGKEAHGLTDEQRWAVFELCHQKKDVKYTALRKLLALRDDEFFSILSYGAKEAVEVEKAAFNFLKPYHQIKTALNKLGKDYIRNLSADELDDIGYILTVQKTDDSIRPALEEKGFAPEVIDALLSCGSFSKFGHISVKACQMLIPYLEKGMTYDKACDAAGLDFRAHSKTEKSLYLSANSDYLCDIVNPVVRRAVSQTIKVVNAIIREQGCSPTYLNIELARELSKTFDERKKAEKSMKDNAALNSRVVERLQTEFGIVSPTGLDIVKFKLWQEQDGICPYSQKPILLEKLFAPGYVDVDHIIPYSICFDDSYNNKVLTFSKENRQKGNKIPMQYLTGKARDDFEIWVANTIHNRVKRQRLLKTELKPEDTEGFKTRNLNDTKYLSRVLYNFINDTLLFADFASDRKKHVRAVNGKVTSYMRKRWGIAKIRADGDLHHAVDAAVIACVTERMIQKVSTYSKYHEIYYVSDDEKSFAVDFNGEVIDEFPQPYPYFRKELDARTMADAKRAVKDCRFPHYSAAQEEAVQSCFVSRMPMHKVTGAAHLDTIRSGREPGFVISKVPLAKLKLDKDGEIHNYYNPESDTLLYNALKARLAAYGGSGEKAFAPENGPMYKPTASGEPGPLVKKVKIMEKSSLNVPVRSGNGVAANGDMVRIDVFKPENDGYYFVPIYVSDTVKPELPNKACVQGKPYEQWKEMQESDFLFSVYPNDLLRIKAKKDIKFTVSNKDSSLPKEILRNDVLVYYSGADISTASIKILVHDNAYFARGLGLKTLLSIEKYTVDPLGNCSKVGKEPRQRFR

SEQ ID NO: 885 - protein, 1091 aa, unidentified
  REGION 1..1091: note = Description of Unknown: Cas Enzyme sequence
MNYIIGLDIGITSVGYAVLMLNDNDIPCRILKMGSRIFEIAENPKDGSSLAAPRRINRGMRRRLRRRRFRKEQIRNLIIQNNIMTNDEIISIYNSGKELTDIYKIRCEALDRELDKEEFVRLLIHLSQRRGFKSNRKVDASDSKSEAGKLLNAVKTNKTLMEEKGYRTIGEMLYKDECFADVKRNKADDYSNTFARSEFEAEINAFFDAQQKFGNEYANDEMRDSYLKIYLSQRAFDEGPGGNSPYGGNQIEKMLGKCTFEPDEFRSVKAAYSFEYFNLLTKVNSLKLITPEEKRFLTKEEKDKIINLAFSKKTISYASIRKELGILADTYFNISYGKGDITPEETEKKTKFTYLNAFHVFRKAYGDVFLNWSKDKKNSLGYALTVYKNDSKIVDYLNNKGFDKAEIDIALTLPSFSKTGNLSIKALDKLIPFLEQGMLYNEACAAAGYNFKNDDTSKRKFLPANEEDAPELGDIRNPVVRRSVSQTIKVINAIIRKYGESPTLVNIELARELSKAKKDRDKIEKNQKDNRSRNEAIVEELKNTFHILQPTGQDVVKYKLWKEQDGICPYSLKSISLDKLFDVGYTDIDHIIPYSVSFDDTYNNKVLVLSSENRQKGNRLPMEYLKGKKRDEFWLWVDNSNLRSRKKKNLLKEQITEEDISGFKKRNLQDTQYISRFLLSYLKKYLELQPNGSAIKNTIKAVNGAATAYVRKRWGINKIRENGDIHHAVDAVVIGCITNPMIKKISEYSKYRELEFVNPHTDEILDIDTRTGELVNRFPMPYDWFRDEFIMRTSSDPTRVLHEKPLPNYATDEEVSPIFVSRMPKRKVSGAAHKDTIRRKYVNEVGLEYTVSKVPLSSLRLKNGEIEGYFNPSSDMLLYNALKSRLAMYDGDGKKAFADSTEPFRKPKHDGTDGPIVKKVKIQNKATLSVQVQNKTAIADNGSMVRVDVFFVENEGYYLVPVYVSDTVALDLPNRAIVGGKPYSKWKEMDNDNFVFSLYPNDLIKVKSKRDMKFNLVNPDSTLAKNYTARESMLYYKGTDISTAAITAINHDNTYKLRGLGVKSLLSIEKYSVDVLGNKTKVNKEKRMGFV

SEQ ID NO: 886 - protein, 1084 aa, unidentified
  REGION 1..1084: note = Description of Unknown: Cas Enzyme sequence
MVYGIGIDIGVASVGFATVALNEQDEPCGVLRMGSRIFDAAEHPKNGASLAAPRREARSARRRLRRHRHRLERIRELLLRSGLISLESLASLFKGKLEDIYALRARGLDEMLTNEELCRVLIHLAQRRGFRSNRKADSADKEAGKLLQAVSENDRRMAEKGYRTVGEMLYKDPLFAANKRNKGEAYLSTVTRDAVEQEARLLLSTQQGLGNPAITGEFVEKYLDILLSQRPFELGPGGNSPYGGNMIERMIGHCTFEPEELRAPKASYSFEYFQLLQKVNHMRLLQDGRSEPLTQEQRQAVIGLVHASADVSYAKLRKALSLPDAIRFNDVNYRENAEEAEKKKKLGCMSAYHDMRKALDKVAKGRIEHISVQMRNAIAYVLTVHKTDERIMAELQKIGLESSDIEQLLQMRGFSKFGHLSVKACDKIIPYLEQGMTYDKACAAAGYAFHGHDDEERSFLLPAQAPEMEEITSPVVRRAVSQTIKVINALIREQGESPTFVNIELAREMSKDFAERSEIRRENEKNAKANEAILAELRQTFGLVNPSGQDLVKYKLFLEQGGVCPYTQKPLLPERLFEAGYADIDHIVPYSISFDDRYCNKVLTFASVNRKEKGNRLPLQFLRGERRDRFIVYVKANVRDYRKQRLLLKETVTEEDRKGFRDRNLQDTKHMAAFLHGYISDHLRFAPFQTDRKRHVTAVNGAVTAYLRKRWGIRKVRADGDLHHATDALVIACTTPGMIQRLSHYSELREAEYMQTEEGAFRFDPLTGEVLEKFPYPWPCFRQEWAARVSDDPQTMLRDLKLADYRGLPFDRVKPIFVSRMPQHKITGAAHKDTVKSVKALDEGVVLVKRALKDLKLKDGEIENYYDPASDRLLYEALKDRLLAFDGDAQKAFAEPFHKPKSDGTPGPLVKKVKLMEKASLPVSVHGGKAAADNDTMVRADVFFVEGDGYYFVPVYVADTVKPELPNRAVVQGKPYDQWKEMKEEDFLFSLYPSDLVRVTHRKGIKLTLINKESTLKKEETERSAFLYYVKASISTGAMSMENHDRTYEIKSLGIKTLEKLEKCQVDVLGNISPVGKEKRQRFR

SEQ ID NO: 887 - protein, 1109 aa, unidentified
  REGION 1..1109: note = Description of Unknown: Cas Enzyme sequence
MKYSIGIDVGVASVGYSVLELDSEDQPFRIIRLGTRIFDIAEHPKTGASLAVPRREARGMRRRLRRHRHRLERIRGLIVSQGLLGKDDLFHLYDTNVTDVYELRVKALDFVLSDEEFARVLIHIAQRRGFKSNKKSDKNDKENGKLLDAVSKNRELCIQKGYRTIGEMFFKDEQFADHKRNKGDSYLNTVSRDMVEDEVKLIFKSQRKLKNKFASVENENKYLEILLSQRSFAEGPGAGPYSGNQIERMLGNCTLEKSIGNIEPRAAKATYSFQIFSLWQHINNIKYNYNGETVKLSDEQRQSVFDAAHKSSELSYWKIRKTINLPDEAEFVGLDYDVKPKKKGKSEEKADDKDDSSARKENVEKSKKITDLKIYHEIRKCLDTVNKELFGELSNDQLDVIGESVSRNYSDGDVLIKLESAGISKEACEALLYLPNFPKYGHISVKACKKLIPFLSEGMTYDKACDAAGYNFKADDKKQNTYLPPLSADDANEITSPVVKRAVSQTIKVINAIIREMNASPVYLNVELARDLSKNLDKRNEIKAAQDQNAAQNEIVVERIRKELGITQPKGQDIVKFKLWQEQDGICPYSQERISIERLFEPGYVDVDHIVPYSRSFDDRMANKVLVLSSENRQKGDRLPLEYLTGEKRERFIVWIKSRNIKSSKRNLLLKEKISDENEFRQRNLQDTQFIASFLGRYISQNLDFAPSSTGMKRRVYALNGAITSYVRKRWGINKVRENGDSHHAVDATVIACITQAMVNNISRHSKHKETRYYDGYKVDKKTGEVIDEFPKPWKGFLKELDVRLLSDEKDMRKCLNDINPDSYELVDLDAVPAFFVSRMSNHKITGAAHLETVRSGKYFESCGKTVSKTDIKKLKLGKDGEIEGYFERESDTLLYNALKTRLAEFGGDGEKAFAEPFHKPKADGTDGPIVKKVKIEDTASLVVEVQDHKGVADNDKMVRVDVFHVENDGYYFVPVYVADTVKDKLPQKVRVRGKNPWKEMDDENFVFSLYKNDLIKVYSKKDIELKVVNDKSTLPQTKTVSGSEGLFLYFDGLDISTATFSGITHDNTYKKRGIGKTSLKIEKYEVDVLGNIRKIQSEKRQKFNLKKR

SEQ ID NO: 888 - protein, 1091 aa, unidentified
  REGION 1..1091: note = Description of Unknown: Cas Enzyme sequence
MYTYAIGLDIGITSVGWATLALDEKENPFTILGMGSRIFDAAEQPKTGASLATPRREARSARRRLRRHRHRNERIRALLISSGLLSEAELATLFEGKLEDVYLLRVLALDKPVTRSELARILIHLSQRRGFRSNRKSAVDNEDGKLLEAVNENKRRMQEAGYRTAGEMMLRDPTFFNCKRNKGGNYLSTVTRDMTADEVHKIFTAQRRFGSEFAGEDFENAYLEILLSQRSFDDGPGGNSPYSGSQIEKMVGVCQFEPNEPRAAKATYSFEYFNLLQRINQIRIISGGEGRTLTAEQRNQLIELAHKTENLDYSKIRKVLSIPPTEIFNTVRYLGEQSAEEVEKKEKFCYLRAYHQIRKALDKVEKGRIAYLPRTQINSIGAALSLYKTSTKIRERLQKDGLETCDIDAAELLGGFSKFGHLSVKACNKIIPFLEQGMNYSDACTAAGYAFKGHENGKTSVFLHPTNDDFADITSPVVRRAVSQTIKVVNAIIREQGCSPTYVNIELAREMAKDFVERKKLEKDMKENQARNERMMERIRTEYGQTCATGQDLVKLKLYEEQGGVCMYSQKQMSLEHLFDPDYAEVDHIIPYSISFDDSYKNKVIVLTKENRDKRNYLPLEYLTGERRDRFVVWVNNTVHDKRKRQLLLKECLTEEDQAKFKVRNLQDTKTMSRFLLNYINDNLEFATSLRGRKKRVTAVNGSVTAYMRKRWGITKIREDGDLHHAVDAVVIACTTDGMIQEVSRYAALRECEYTQADGKSIAMDPSTGKQLQTFPYPWHDFRRELEARLSKDPVRVITDYKLPAYLVGDRIDTVKPLFVSRMPQRKVTGAAHKDTVKSSKALGNGLAVVKKPLTNLKLDKQGEIADYYMPQSDRLLYEALKARLIKFDGSGSKAFAEPFYKPKHDGTLGPVVNKVKLCEKTTLNVAVQNGAAIADHDTMVRIDVFYVGGDGYYLVPIYVADTLKPELPNRACIAHKQYSEWQEMSDKNFIFSLFPNDLICVTHRNKIRLTKVYKESTLPETLEIKSEFLYYKCANISSGAISCINHDNTYTIDSLGIKTLEKFEKYTVDVLGNLHQVKEEKRQPFCIRRS

SEQ ID NO: 889 - protein, 1097 aa, unidentified
  REGION 1..1097: note = Description of Unknown: Cas Enzyme sequence
MPYAIGLDCGIASVGFAVLELDGKDEPCRIITLGSRIFERAENPKDGSSLAKPRREARSARRRLRRHRFRLERIRWLITGSGLLTPEELNELYEGQLTDIYALRVEALERKLERGEFARILIHIAQRRGFKSNRKADAADKEAGELLTAVSNNEALLKEKGYRTIGEMFYKDPLFADCKRNKGENYLNTVSRAMVEAEIKLIFEAQRGFGCAFATREHEEAYLAIVLSQRSFDDGPGGNSPYGGNQIEKMLGKCTFFQDEPRAVKASYSFQYFTLLQNINHIRVTENGKTRPLNDAERETVRKAAFKTAELNFEKIRKELHFGSDTLFAGLSYGKGDPGETEKKTKFTYLKAYHEIRKALKRAALDIGNFSKEALNDIGYAFTVYKNDEKISGYLKEKGIDGTALDALLRLPSFTKAGHISVKACDKIIPFLEKGMTYDKACEAADISFRAHGNNEKATTLPANAPEFEDINNPVVRRAVSQTIKVINAIIRQQGESPVYINIELAREMARTFEERRKDESHMKENMAFNEKIKQEIASQFNIALPTGLDIVKLKLWREQDGRCPYSLKSIDYTRLFEPGYVDIDHILPYSISFDDSYKNKVLVMADENRQKGNRLPMQYLQGKRQEDFIVWVNTNIKNYKKKLLLLKPQITPEDEEWFKQRNLQDTQYLSRFLLNYIRDYLEFEQGATNKKKRVTAVNGAVTAYMRKRWGIQKIREDGDLHHAADAAVIGCVTDGLIKKVSDYSKRRESLYGNITEDDYIVDKKTGEAKPKFPPPWDNFRKELDIRLSKDPARLLNEEALPNYADVDTDAIRPCFVSRMPTHKVSGAAHKDTIRSPKALDEGLVISKKPLSELKLDDNGEIPGYYNPGSDTLLYNALKQRLADYGLQAGISPKEAAEKAKAAFAEPFRKPKADGTPGPVVKKVKIAEKASLTVGVHGGRGAANNDSMVRIDIFKVENEGYYFVPIYVADTVKPELPNKACVAFKPYELWKEMTDENFVFSLYPGDLVKVTAKKPYKMALVNAASTLDKVHICNEQLLYYIGAGITIATIEVINDDKTYTVKSMGIKSLKLIEKYCVDVLGNFYKVQSEKRQGFQGR

SEQ ID NO: 890 - protein, 1092 aa, unidentified
  REGION 1..1092: note = Description of Unknown: Cas Enzyme sequence
MKYAIGLDCGIASVGFSVVELLNDQPYRIIKLGSRIFSEAENPKDGSSLAFPRREARGNRRRLRRHNHRLERIRFLIIKEKILTEDELANLFDTPLSDIYQVRTEALDRPLSNKEFARVLINLAQRRGFKSNRKTDSTDKENGLLLNAISENEETMQKNGYRTVGEMFFKDEKYSLHKRNKGGKYLNTVSRNMIEDEADKIFNAQKSFGCDFASDEIKEQYKNILLSQRPFDLGPGEGPENCRSPYFGNQIEKMIGKCTFFPEEPRAAKATYSFQLFNLWQKINNIRIVSDNGSSRFLTDGERTKVFELCHKSPSVNYSKIRKELDISTDKRFSTVSYGFKEIEEVEKKTKFEYLKQYHNIRKALDKFQKGYIQKLSREELNCIGYALTVHKDDAKILNVLKDFEIDEFLYDYILNISSFSKFGNLSVKACDMLIPYLEKGLTYDKACAEVGFDFKAHDKSERSFTLPAFSDELTDITNPVVRRAVSQTIKVVNAIIREQGTSPTYINIELARELSKNFADRKDIENENKKNNENNSKIKEELYENFHKSNASGLDIVKLKLWREQDGICPYSQKPIKYELLFSDGYVDVDHIVPYSISFDDSYNNKVLVFADENRQKGNRLPLQYLTGEKQENFKVWVNANIKNFKKRQNLLKESISENEFKGFKERTLNDTKYLSRVLYNYINDHLIFEDFENGRKKHVTAVNGATTSYLRKRWGIKKIREDGDLHHAVDATVIACTTDALIQKVSKYSKYKELQYSENIVVDSEGEVVDSFPYPYPTFRKELEIRTCTDVNNMIKELYRLPNYSAEDIENIKPCFVSRMPNRKTKGAAHKDTIRSGKVKGYSISKVPLTRLKLGKDGEIENYYDKESDLLLYNALKKRLGEYDGNGKSAFADFNDENPFYKPKSDGTNGPIVKKVKIIEKSTMNVSVRNGNGIADNGPMVRIDVFHVENDGYYFVPIYTADTVKKELPNLACVAFKSYDEWKEMDDKDFCFSLYQNDLIRVTAKKDMKLSLVNKNSTLPKEIYGNGMFLYYNNAGISIATITVFNSDGTHKIESLGIKTLLNIEKFTVDPIGNVTKVNSEKRLKFNTNN

SEQ ID NO: 891 - protein, 1082 aa, unidentified
  REGION 1..1082: note = Description of Unknown: Cas Enzyme sequence
MSYGIGLDIGIASVGWAIVDLDQNENPMGIIDLGARIFDAAENPKDGASLALPRREARSARRRLRRHRHRMERIKRLLVSSGIISDVDLEHLFDGQLQDIYELRAKALDYSVTNKEMARILLHLAQRRGFKSNRKAENSSKENGELLTAVSANTERMREKHYRTIGEMFYKDEVFATYKRNKGENYLSTVQRDMVEAEVHKIFDVQRTLGNNQFTKEFEDAYKGILLSQRAFDEGPGGNSPYGGNQIENMIGICTFENVRQGKEKNEQRAAKSTFTFEYFNLLQKVNHLRLVVDGKNIPLDDEQRGIIIKLAKTKADLKYSAVRKALGIADNILFAGLNYADNDVVEYEKKQKFDVMKYYHQMRKALDKVEKGRIAKYNPEQLDAIATILTKFKGDDRRRECFAAIGIDTKDVDQLLDITGVSKFGHLSIKALSKIIPYMEKGALYNEACEAAGYDFRAHAGGTKDKLLPAYMEEMDDITSPVARRAISQTIKVINAIIRKQGESPIYINVELAREMSKNFKERGEITKKNEENRAANERLMEEIKTNFGVDNPTGLDLVKYKLYKEQDGITPYSQQALDLSRLFEPGYVDVDHIVPYSISFDDGYVNKVLVLSSENREKGNRLPLVYLQEKFGQQAADNFEVWVTNNVKNYRKRQKLLKKAITEEDINKFKERNLTDTKTIARFMLNYIRDYLEFAPSLTDKKKRVTAVNGAVTAYMRKRWGIAKVRADGDRHHAVDALVIACTTDKMIMEASWYSNIQETETNRELLQQKFPLPYSDFSRELSARLAPNPVAALTQQNLLYYIDKDLNDYKPIFISRMPRHKVTGAAHLETIRGVKMLDEGCTVAKVELTALKLNKDGEIDGYYNPSSDLILYNALKARLQQFDNDAKKAFAEPFYKPKSDGTPGHLVKKVKVFKKSTLNVAVHKGNGVADNGDVIRLDVYHIADDGYYFVPIYVANTIKDLPNRAVVNGKSYKQWKLMKPEDFIFSLYPNDLIHVVSRNEISMSRVCAESTLPEKKECKEEWLYVQQGFAGTTVTVINNDNTYIVKSLGLRKLQLLEKYQVDVLGNYVKVEKETRQKFK

SEQ ID NO: 892 - protein, 1077 aa, unidentified
  REGION 1..1077: note = Description of Unknown: Cas Enzyme sequence
MKHPYGIGLDIGIASVGWAVVALNENAEPYGLIRCGSRIFDKAEQPKTGESLAAPRREARSTRRRLRRRSLRKADLYELMAQNGLPGRAKIEEAVQAGHLPDIYALRVQALDGPVTATDFARILLHLMQRRGFRSNRKADDAQKDGKLLQAIDANTRRMEENHYRTVGEMMYRDPVFAEHKRNKSENYLSTVRRDQIVEEAVQLFAAQRQYGAAWASPEMEAEYLTILTRQRSFDEGPGGNSPYGGNIVEKMVGTCTLEGQAEPRAAKATWSFEYFTLLQKINHIRIIESGAARILTAEERQELLSVCYQTDKLDFARIRKALALSEQARFNMVRYRDGQTTEDCEKKEKIVCLPCYHKMRKVLNTLRKDYIRSVSRDRLDAAATALTMYKNEATLRAKLEEAQFEPLEVDALMTLPSFSGFGHISVKACRKLIPYLEQGLNYNDACKEAGYDFQGNYRGEKSQFLPASTEEMEDITSPVVRRAVAQTIKVVNAIIREQGESPVNIHLELAREMSKNFQQRNDLDKAMKGNNAENERLMKDLHELFPGRNITGQDLVKYRLWKEQDGRCAYSLQPLELEKAITVSGYAEVDHIVPYSISFDDRRANKVLVLASENRQKGNRLPLQYLQGKRRDDFIVYTKASVKNYRKRQNLLKEKLSEEDSKGFMQRNLQDTQYIASFMLNYIRSHLAFADFPAAGKKRVVAVNGAVTAFLRKRWGLGKVRADGDLHHAVDAAVIACTTDGMIQRVSRFYTHIETSDTRGERFPEPWPRFRDELMQRLSACPQENLMQINPVYYQNVDIASIQPVFVSRMPRHKMTGAAHKETIKGRLDDAHTVQRRSITDLKLDKEGEIAGYFNPSSDTLLYNALKEQLTAFGGDGKKAFAEPFFKPRADGTPGAQVRKVKVYDKATSMVAVHEGKGVADNDTMVRIDVYFVPGDGYYWVPIYVADTVKPELPNKAVVAYKNYDEWKEMAEENFLFSLCQNDLIRIESKRTMKFKVQNSDSTLEKETQMNCGLTYFEGGNISTGAITVTTHDNAYIVGSLGFKTLQKVQKYQVDVLGNYTLVKKEKRQNFPAQRR

SEQ ID NO: 893 - protein, 1074 aa, unidentified
  REGION 1..1074: note = Description of Unknown: Cas Enzyme sequence
MKHPYGIGLDIGIASVGWAVVALNENAEPYGLIRCGSRIFDKAEQPKTGDSLAAPRREARSARPRPRPPRPPPAGRHPLPGRNGLPGKAEIEQAVQAGHLPDVYALRVQALDGPVTALDFARILLHLMQRRGFRSNRKADDAQKDGKLLQAIDANTRRMEANRYRTVGEMMYRDPVFAEHKRNKAENYLSTVKRDQIIDEVRLVFAAQRQYGATWASPEMEAEYLCILTRQRSFAEGPGKGSPYSGSNRVGTCTLEGKSEQRAAKAAFSFEYFTLLQKINHIRIAENGTSRTLTPAERQILLSVCCQTDKMDFARVRKALALPEEARFNMVRYRGEQTAEACEKKEKITALPCYHKMRKALNTLRKDHIRNISREQLDAAGAALTNPENEDKLREALKQAEFEPLEIEALLTLPSFAGYGHISVKACRKLIPYLEQGMNYNDACQAAGYDFQGRQNGEKAQFLPASTEEMEDITSPVVRRAVAQTIKVVNAIIREQGESPVSIHLELAREMNKNFQQRSELDKAMRDNSAENERLMKELNELFPGRTVTGQDLVKYRLWKEQNEICAYSLEKLDLTRVITEAGYAEVDHIVPYSISFDDRRTNKVLVLASENRQKGNRLPLQYLQGKRRDDFIVYTKANVKNFRKRQNLLKERLSEEDGKGYIQRNLQDTQYIAAFMLNYIRNHLAFADCSGAGKRRVVAVNGAVTAFLRKRWGLSKVRTDGDLHHAADAAVIACTTQGMIKRVSDFCKRAETTAVRNEHFPEPWPRFRDELTQRLSACPQEDLMKINPVYYATVDISSIQPVFVSRMPRHKVTGAAHEETIRSQVNEKYTAVRKSITELSLDKDGKIKDYFKPSSDTLLYEALKKRLTEFGGNAKKAFAEPFYKPRADGTPGAQVRKVKVVAKMNNTIPVRSGGGVAKGGDMIRIDVYYVPGDGYYWVPIYVADTVKETLPNKAVVRDKTMEEWKEMKEDDFLFSLYSNDLILVERDKPICFSLMHEDSTLPKKYETKKELVYYKGGDISNGGIRIETHEGAYFLKSLTFGIVQKVQKYQVDVLGNYTPVKKEKRQTFPAQRR

SEQ ID NO: 894 - protein, 1056 aa, unidentified
  REGION 1..1056: note = Description of Unknown: Cas Enzyme sequence
RAGGSRGGGAGDGGPRCTRAEREGRGAVGAGEAEIDGALLLSRTAGGLRRRSLRKADLYELMEKNGLPGKAEIEQAVQAGHLPDVYALRVQALDGPVTALDFARILLHLMQRRGFRSNRKADDAQKDGKLLQAIDANTRRMEANRYRTVGEMMYRDPVFAEHKRNKAENYLSTVKRDQIIDEARLVFAAQRQYGATWASPEMEAEYLCILTRQRSFAEGPGKGSPYSGSNRVGTCTLEGKSEQRAAKAAFSFEYFTLLQKINHIRIAENGTSRTLTPAERQVLLSVCSQTDKLDFARVRKALALPEEARFNMVRYRGEQTAEACEKKEKITALPCYHKMRKALNTLRKDHIRNISREQLDAAGAALTNPENEDKLRKALKQAEFEPLEIEALLTLPSFAGYGHISVKACRKLIPYLEQGMNYNDACQAAGYDFQGRQNGEKAQFLPASTEEMEDITSPVVRRAVAQTIKVVNAIIREQGESPVSIHLELAREMNKNFQQRSELDKAMRDNSAENERLMKELNELFPGRTVTGQDLVKYRLWKEQDGHCAYSIQPLELDKVITVSGYAEVDHIVPYSISFDDRRTNKVLVLASENRQKGNRLPLQYLQGKRRDDFIVYTKANVKNFRKRQNLLKERLSEEDGKGYIQRNLQDTQYIAAFMLNYIRNHLAFADCSGAGKRRVVAVNGAVTAFLRKRWGLSKVRADGDLHHAADAAVIACTTQGMIKRVSDFCKRAETTAVRNEHFPEPWPHFRDELTQRLSACPQENLMQINPVYYATVDISSIQPVFVSRMPRHKVTGAAHKETIKSRLDDTHVVQRRNITELKLDKDGEIAGYFNRSSDTLLYNALKARLLAFGGDGKKAFAEPFYKPRADGTPGARVQKVKICDKVTSTVPVHGGKGVADNDTMVRMDVYFVPGDGYYWVPIYVADTVKLELPNKAVVQGKSYAEWKEMDEENFLFSLCQHDLVRIESKRLMKFKVQNRDSTLEKEMPVNKILAYFEGGNISTGAITVTTHDDAYIADGLGFKTLQKVQKYQVDVLGNYTPVKKEKRQTFPAQRR

SEQ ID NO: 895 - protein, 1165 aa, unidentified
  REGION 1..1165: note = Description of Unknown: Cas Enzyme sequence
MKLNKDAQEVPKPTELNYRIGLDIGIASVGWAVLENNSHDEPFRIIDMGVRIFDTAEQPKTGASLAAPRREARSARRRLRRRGHRLERIKKLFQAEGLIDIEEFEARYKRAGLPDVYRLRYEGLDRKLNNDELAQVLLHIAKHRGFKSTSKAEDGADSDTGEVKKSISANKALMSEKGYRTVGEMIYLDENFRTECPWTEEGYILTPRNKSGDYKHTVLRDMLADEVRSLFDAQRSMGNMNASEELENAYLDIMLGQRSFDMGPGAPSKYAMEGFEDRVGLCTFEGKNGEKRAPKAAYTSELFVALEKINHTKIVSNDGSTRFFTQDERDTIISLIHKQQSVKYITVRKAIGLAEGERFYNLNYSQKAGSKKSAEDTDFVKLENYHKIRKALNDDVVLDHLGQEKIQLYDSIAAILTLFKNDDSRISRLEKLDVAPECYDALLEMSPNKFHNLSLKAMGKIIPFLLKGNTYDKACVLAGYDFKAENSSEKSVLLKGRNITDIVNDITNPVVRRSVSQTIKVINAIILEYGSPQAVNIELAREMSKNFDERRKLKSDMESREKENDKFLKHVRELKSNPTGQDIVKYRLWEEQGGICLYSGEKIDINDLFSQGGGYDVDHILPYSITFDDSYRNKVLVKASENRQKGNRTPYEYIMSDKGADAWNRYEALIKNTVKDYKKQLKLLKKHITDDEKAEFKERNLTDTKYITRIIYNMIRQNLVLKPYLNLERERKKQVVAVNGAITHYLSKRWGLESKDRRTDTHHVQDAVVIACTTDGMINKISRYSKGRELYYSRGFKFVDEETGEILNRDSFSREEWDEKYGVRIPLPWEHFRDELDIRMSRYHGVIEDAILETSPREFILSHRDVYNWIDYPEWMFVKGRPGRRGVLDGIFVSRMPNHKVSGQAHEETIRSAKYYENGGSVFETGGYVVTKKSIQDIKLKDGEIKEFFNPDSDRLLYEALVDRLNQYGNDPKKAFAEPFYKPKSDGTPGPVVKKIKVFEKQTSGVIVRNGNGIASNGAMVRIDVFCEEDKGRKKYYYVPIYTADVVKKRLPNRAATQAKMMSEWRVMKEENFIFSLYSRDLVYIESDRGVKLKTVDGEAVSANRVYAYYTNANIATASIYGCLNDNSACFKEMGIQGLKDLRKCNVDVLGNVTFVKKEKRMSFN

SEQ ID NO: 896 - protein, 1087 aa, unidentified
  REGION 1..1087: note = Description of Unknown: Cas Enzyme sequence
MYPYAIGFDIGITSVGWAVVALDGEDKPFGIINMGSRIFDAAEQPKTGASLAAPRREARSMRRRLRRHRHRLERIRHLLVAENVISQAELDALFEGKLEDIYTLRVKALDTAVSHADFARILLHIAQRRGFKSNRKSGTSKEDGELLAAVSANRALMAEKGYRTVGEMLLKDPQYSGSKRNKGGKYLATVGRDMVEEEVRAIFKAQREQGQAFAAAELEEQYLEILLSQRSFDEGPGEGSPYRGSQIEKMIGKCTLEAGEPRAAKASYSFEYFTLLQNINHLRLICGGESRPLSDAQREFLIALAHKTKDLNFSRIRKELDIPADTTFNAVSYKSADGYEDAERKAKFCYLKAYHQMKAAFNKLSKGHFDSLARQQKNELGRVLSTYKTSANIRPRLAAVGLSEMEIDTAETMSFSKFGHISVKACDKLIPFLEKGLKYNDACAAAGYDFKGHDSETRTRLLHPTEDDFADVTSPVVRRAISQTVKVLNAIIRERGNSPTFINIELAREMAHDFTERSKMKKDMDENRARNERIMERIRTEYGKEHPTGQELVKFKLWEEQHGECAYSQKHLSLEHLFDPNYAEVDHIIPYSISFDDGYKNKVLVLAEENRNKGNRLPLQYLQGKHRDDFIVWVENSIHDYRKKQRLLKETITAEDEKRFKERNLQDTKTMSRFLLNYISDHLEFSDFSTGRKKHVTAVNGAITSYLCKRWGIAKIRENGDLHHAVDALVVACTTDGMIQQLSRYSTLRECEYVQTEAGSIAVSMHTGEVLKRFPYPWPEFRRELEARLGDDPRRAVISQRFPVYANGDIPVRKLFVSRMPRRKVTGAAHKETIKSPKALNDGIVVAKRALTDLKLDPKTGEISNYYMPQSDRLLYEALKEALKKHGGDAAKAFAAPFHKPKSDGTPGPVVNKIKLCEPTTLNVAVLNGAGVADNDSMVRIDVFHVENDGYYFVPIYIADTLKKELPNKACMAYKPYEQWKEMSDDNFIFSLYPNDLLRVTHKTKLKLTKAQKESTLPDTYETKQEMLYYISANIHTAAIGCRNHDNTYEIGGMGIKTLEKLEKFTVDVLGEYHKVEKEPRMAFCRK

SEQ ID NO: 897 - protein, 1132 aa, unidentified
  REGION 1..1132: note = Description of Unknown: Cas Enzyme sequence
MEEKLDYRIGLDIGIASVGWAVLQNNSQGEPVHIVDLGVRIFDKAEQPKTGESLAAPRRDARTTRRRLRRRKHRMDRIKYLFSQEGLIETESFMERYYSGKLPDVYQLRYEALDRKLKDEELAQVLLHIAKHRGFRSTRKAELAEDKEGGQVLKATNENKKRMEEHGYRTVGEMMYLDEDFRAACPWVERGYVLTPRNKAGNYRHTILRAMLVEEVHAIFAAQRELGNEKATEALEEKYLEIMESQRSFDMGPGSQPDGAPSPYAINGFEGRVGKCTFEKEELRAAKGTYTAEYFVALQKISHTKLVNTDGEVRNFTEEERQLLIELLHSQKEIKYAAVRKKLNLGVDIRFYNLNYRGKKTKDTEKSVDMEELIKETEKAKFIGMPWYHEYKKVLETRLLGMQEDEKKDLLDEVGKILSCLKNDDSRTEKLAELGLSAEEIEGLLPLNPAKFQHLSIKAMRNIIPYLEQGMTYDKACAAAKYDFKADDNSAKQKLLQGDRVNEVLADITNPVVRRSVSQTIKVINAIIRKYGSPQAVHIELAREMAKNFDERRKLENSMKERGDSNEKAKKKIQELGVLSPNGQDILKYRLWVEQDGRCMYSGKVIPLDTLFQPGYEIDHILPYSITFDDSFRNKVLVVAQENQQKGNRTPFEYFGNDEEKWKEFEARVNSHIHDFKKQEKLLKKHFTEEERKEFKERNLNDTKYITTVVYNLIRQNLELAPLSVEGKKKQVRAVNGAVTSYLRKRWGLPQKNRETDTHHAMDAVVIACCTDGMIQKISRYTKGRELRYARGYRYVDEETGEIFDCREMDRDAWDEKFGVRVPLPWNSFRTELDVRMGADPKNFLDTHMDVATEIDYPEFIYEKIRPIFVSRMPNHKVTGAAHADTIRSPRHFSEDGVVLTRTALADLKLNKDGEIEGYYNKESDWLLYHALKRQLELYGGDGKKAFAEDFHKPKADGTEGPVVRKVKIAKKQTSGVLVNGGEGIAENGSMVRIDVFRRDGKYYFVPIYTADVVKKVLPNKAATAGKPYDEWRVMEDKDFVFSLYSRDLVHIKSKKGVKTTMFSGEQAKQEDIYAYYMGANVNTASISGIADDKRYEFSSVGIQGLELLEKCQVDVLGNVTIVKQEKRMGFS

SEQ ID NO: 898 - protein, 1049 aa, unidentified
  REGION 1..1049: note = Description of Unknown: Cas Enzyme sequence
KDGASLAAPRREARGVRRRLRRKAHRKERIRNLIIEQNILSKEKLSVLFDNPRLLDIYQLRTEALDRLVTNEELSRILLHLAQRRGFKSNRKVEATKEDGLLLKAISENEAIMREQNYRTVGEMLHRDEAYKETKRNKGENYQNTVTRDMVRSEVERIFESQRAHGSAICDEALEEKYLEILLSQRSFEMGPGEGSPYAGDQIDKMLGFCTFERENGEKRAPKASYSFERFELLQKINNLRIEIGGKTESLTGEQRLRLIDLAHSVENLNFHRIRKELSIPEEARFNTIRKYDKDIESAEKAEKLNCLKAYHQMRKALDKSTKDRIRAISAEQRNDIGRIFSLYKSEDRLKKELDSTDLENFDKKALIENLGTFSKFGHLSIKALDNIIPFLEHGLTYDKACEKAGYNFKGHDSKDTNKLISLRHLAKEIETTITSPVAKRAISQCAKVVNAIIREMDNNSPVYINIELAREMAKTYDDRKKADKGMRENSAHNERLKVRISEEFGRTNPTGLDIVKLKLYEAQGGICPYSVSQLDITRLFEPGYADIDHIVPYSISFDDTYKNKVLVRANENRQKGNKLPLEYLKGEKRDKFIVWINNAHLPVAKKGLLLKEEITEADLEGFKERNIQDTKTISSFMSRYLTDYLKFSAFVSDKKRHVTAVNGAVTSMLRSRWGLSKVREDGDTHHAVDAAVVACTTQGMINKLSGYYKRRETFWDKDGKEYEVSQKTGEVIERFPQPYERFSDELIARLSSDPQTGIRGLKLDTYSDAELQKVTPVFVSRMPSRKITGAAHKETVKGIAQDNNVIKKVPLTALKLNGDGEIADYYNPNDDRLLYNALRQRLTDFGGNGDKAFEVPFYKPKSDGTPGPIVKKVKLLEKNTLNVLVHDRKGVADNDSMIRVDVFYVEGDGYYLVPIYVADTVKGVLPNRAIIQGKTYSEWKEMRNDDFIFSLYPNDLIWVKAKKNMTFSKARKESKLPDNLEQDGSFVYYKKTGIAVGAITVINHDNSYTIKNLGAKTLQIFEKYQVDILGNISKVGREKRQNFAKMRR

SEQ ID NO: 899 - protein, 1064 aa, unidentified
  REGION 1..1064: note = Description of Unknown: Cas Enzyme sequence
MRYGIGLDIGIASTGFAIMELDQDDRPYKIIRIGSRVFDKPENPKTGASLALPRREARGMRRRIRRRSHRKQRIWQLIESEGILACYQIEALFDGILPDIYELRCHALDRIVTNDELARILIHISQRRGFKSNRRKEAKDAEAGKLLKSVEENKIAMDANGYRTVGEMLYKDPRYTSSKRNKSENYLNTVSRDMVLDEVAMIFDAQRGFNNIFASEAIEERYTTILAGQRSFDEGPGEDSPYAGNLIEKMVGFCTLESSEKRAPKASYSFELFNLLQKINNIRIEASGSSQQLTAELRDIICKEAHKSPTLNFKKIRDILGLSLNYRFNAVRYDRHKTTDEEILEQEGKTKFEFLKAYHEMRKALDKVSTGRISNISTAQRNEIARIFTLYKNEDKIKAALDMTDLTQFDKDALVYNLGSFAKFGHLSVKALDNIIPHLQKGITYDKACEEAGYNFKGNASAQKRQLISLQHLAQETENTVTSPVARRALSQCAKVINAIVRETGYSPVYINIELAREMSKSFEDRGKLEKSMLDNQARNERVKNQIKEYGKFDPKGLDIVKLKLWEEQGGICPYSLKPIAIERLFEVGYADIDHIIPYSKCFNDGYNNKVCVLAAENRQKGDKLPLEYLTGKRREDYKVWVGSQHLPRNKKLALLKEEITAEDEASFTQRNLQDTQTISRFMHNYLADNMEFSEFETGRKRHVTAVNGAITALVRKRLGITKLREDGDTHHAVDAAVIACITQSMINDITAFSKYKENRYNDPTKASDQAVHFPPPYPEFERDLERNLKQVFVSRAPSRKVTGAAHKETIKGIASSDALIKRVALSSIKLDGDGEVGNYYLPDNDKLLYEAIKARLVQHGNDPKKAFAEPLYAPKGKGKTGPIVKRVKIVEKSTISVPVHGGKGRADNDTMVRTDVFFVEGKGGGYYLVPIYVTDTRKTELPNRAIVAHKPYEQWEVMDDKNFIFSLYSDDLVLLRHKKLLPLNLNKHNKAGTLPAKIERQEEFMYYKAANISSGVITAINHDNSYYFEGGAKTLLALEKWHVDALGNISKVGRETRKPFSQK

SEQ ID NO: 900 - protein, 1064 aa, unidentified
  REGION 1..1064: note = Description of Unknown: Cas Enzyme sequence
MRYGIGLDIGIASTGYAIMELNEEDRPIKIIRIGARVFNKPENPKDGSSLAEPRREARGARRRLRRKSHRKLRIWRLLENEGLLTVDQIENLYTGLMSDIYELRVQALDRAVTNEEFARILIHLSQRRGFKSNRRSDAKDAEAGKLLKSVKENKAKMEESGYRTIAEMYINDPRYNEHKRNKQGNYLSTVSRDLVLEEVKKIFAAQRSLGNAFANETFEAKYTKIWAGQRSFDEGPGGDSQYKVDFEDMVGFCTLEKDEKRAPKASYSFELSNLLQKINNIRLIEGGNATPLTQQQRNKLEAYAHNTEKLTYKKIRKELGISTSHVFNHVRYDKDKTSEEDILAQEDKTKFEYLKAYHAMRVALKSIDPDRISAIMPAQRNEIARIFSLYKNEDRVKTELDTTTLNAIDKQELAQNLGSFSKFGNLSIKALDRIIPHLQFGLSYDKACEAAGYDFQGEENGDRKPTISLKHLAEATEYEITSPVARRSLSQCAKVINAIIREMGEVPPVYINIELAREMARTHKERDKMEKAMEDNQRRNEQLKNEIKEATTFEPRPHDIVKLKLWKNDQDGICPYCLEPLKRELLFENGCAEVDHIIPYSISFNDTYSNKVVVHARCNQQKGDQLPMQYLTGKQRDNFRIWVESRPFARAKKTALLKAEITQEDRDNFTQRNMQDTQTISRFMFNYLRNNLQFSALESGRERHVTAVNGGVTAQVRKRLGIQKIREDGDKHHAIDAAVVACTTQGMIHDITRHSKYKETRYSKQETAYGKDEHFPEPYPGFVLDLERNLKDVFVSRAPERKVAGPAHKETIKGVSPSGELIKKVALSSVKLGKDGEIDGYYRKEADMPLYEAIKQRLLAHGNDPKKAWATPLVKPNGDGRVVSKIKIAEKSTISVPVHKGKGRADNDSMVRTDVYFVAGKGGGYYLVPIYVADTLKDELPNKAIVQAKPYEEWPVMEEKDFLFSLYPNDLILLKHKKTLPLNLNKKNKSGTLAAKIEMQEEYLYYKGVNISNGNITAINHDNSYYFEGGAKTLLAFEKWEVDMLGDISKVGKEPRKDFKHKGK

SEQ ID NO: 901 - protein, 1066 aa, unidentified
  REGION 1..1066: note = Description of Unknown: Cas Enzyme sequence
MRYNIGLDIGIASTGFAVMELGEDDRPIKIIRIGARVFDKPENPKDGAPLARARRELRGMRRRIRRRSFRKQRIWHLIDRSGLLSASRIESLYYGQLPDIYELRTNALDRLVTNEEFTRILIHISQRRGFKSNRRKDAKDAEAGKLLKSVEENKTVMLANNYRTVGEMFNKDPRYKDCKRNKSENYLNTVSRDMVLDEVQQIFTAQRGFSNPFATTGIEEEYTAILASQRSFDDGPGGNSPYAGNLIERMLGNCTFENDEKRAPKASYSFELFNLLQKINNIRLIEGGHTFELTHHQRIVLRSEAHSIEKMDFKRIRKILDIPISQRFNQVRYDRNKTSDEEVIVQEGATKFEYLKAYHAMRKALKAIHPERINTITTSLRNEIARIFSLFKNEDKLKNALDETSLENLDKDVLLDNLGSFSKFGHLSVKALDNLIPYLEKGLTYDKACEEAGYNIKGHEAGQKSPTISLSHLAQEAENTITSPVARRAISQCAKVINAIVREMDGISPVYINIELAREMAKTFDDRMKLEKDMLANQAKNERVKNQVKEYGNFDPKGLDIVKFKLWEEQGGICPYSLKPLELEQLFKVGYADVDHIIPYSKCFNDGYNNKVCVHVAENRQKGDLLPLQYLTGKKRDDFVVWVNTQHLPPNKKRALLKEEITAEDEATFTQRNLQDTQTISRFLYNYLTDFLEFCEFETGRKRHVTAVNGAVTSHVRKRLGITKLREDGDTHHAIDAAVIACITQGMIAEITAFSKYKETRYQDLAKAISRDEHFPPPYPEFVRDLERNLKQVFVSRAPSRKITGAAHKETIKGAGTNGYLIKKVALSTLKLSADGEIDNYYRPNDDRLLYEAIKNRLQQHGNDPRKAFLTPLHKPKSDGTDGPLVKGVKVVEKSTLSVPVHDGKGRADNDSMVRVDVFYIEGKGGGYYLVPIYVADTLKEELPNKAIVQAKPYEQWEQMDDKDFIFSLYPNDLILARHKKLLPLKLNENNKVGTLPATCETQEEYLYYKGTSISTGAVTAINNDNSYVFASSVKTLLALEKWQVDVLGNISKVGREMRKGFTKKG

SEQ ID NO: 902 - protein, 1071 aa, unidentified
  REGION 1..1071: note = Description of Unknown: Cas Enzyme sequence
MRYSIGLDIGIASIGFAVMELGEDDRPIKIVRIGSRVFDKPENPKDGASLALPRREARGMRRRIRRRSHRKQRIWHLIESEGILSNLQREALYNGKLSNIYELRCNALERLVSNEEFARILIHMSQRRGFKSNRRKEVKDTEAGKLLKSVEANKMDMESAGYRTVGEMLHKAPRYNDYKRNKEGSYLNTVSRDMVLEEVKKIFQAQRNFGNLFANEIIEEKYVQILAGQRSFDEGPGEGSPYAGNQIERMLGDCTLEKGEKRAPKASYSFELSNLLQKINNIRLTESGHSFALTPEDRHILCAEAHKTEKLTYKSIRTRLGIPTTQRFNHVRYDRYKISEPEILEQEAKTKFEYLKAYHEMRKALKPISPERINEIPIPQRNEIARIFSLYKNDGKLKAALDATSLTALDKEALLSNLGSFSKFGNLSVKALDNIIPYLEKGLTYDKACEAAGYDFKGREGAYKSQIISLRHLAEETENTITSPVVRRSLSQCAKVVNAIIREMNNTSPVYINIELAREMARTFEERGKQEKSMLENQARNERAKNQIKEYGKFDPKGLDIVKLKLWEEQGGICPYSLKSIQIERLFEVGYAEIDHIIPYSKCFNDGYNNKVCVLAAENQQKGNLLPLQYLTGKKRDEFIVWVNNQHLPRNKKLALLKEEITAEDEDEDGFIQRNLTDTQTISSFMYNYLTDFLQFNDFVTGRKKHVTAVNGAVTALVRKRLGITKLREDGDTHHAVDAAVIACITDGMIRDITNFSKYKETRYQNPATAIGKDEHFPQPYPEFVRDLDRNLKSVFVSRAPSRKVTGAAHKKKIKGVATNGNLIKKVALSTLKLDSDGEIKDYYRPQDDNLLYDAIKNRLIQHGNDPKKAFATPLHKPKKDGTDGPLVKGVKIVEKSTLNVPVHGGKGRAGNDSMVRVDVFFVEGKGGGYYLVPIYVADTLKKELPNRAINGIKPYEQWKVMDDADFLFSLYPKDLILMRHKQLLPLNLNKKHKKASSLSQKIERQEEYLYYVATNISGGDVTAINHDNSYHFESKVKGLLALEKWQVDTLGNITKVGRETRKGFSQPKRG

SEQ ID NO: 903 - protein, 1071 aa, unidentified
  REGION 1..1071: note = Description of Unknown: Cas Enzyme sequence
MRYGIGLDIGIASTGYAIMELDEDDRPIKIIRIGARVFNKPENPKDGSSLAAPRREARGARRRLRRKSHRKQRIWRLLENEGLVTVEKENVYTGLLSDIYKLRVQALDRAVTNEEFARILIHLSQRRGFKSNRKADTKETKKKEKGLLESVDANKSKMEESGYRTVAEMFVNDGRFEKHKRNKPSTANGYLGTVSRDLVLDEVKKIFAAQRSFSNVFANETFEAQYTKIWAGQRSFDEGPGGDSQYKVNFEDMVGFCTLEKNEKRAPKASYSFELANLLQKINNIRLTEGGNDSVLTPQQRNKLEALAHHAEKLTYKKIRKELNIPTSHLFNHVRYDKDKTLEEDILAQEGKTKFEYLKAYHAMRVALKSINPDRISAIMPSQRNEIARIFSLYKNEDRVKASLDATDLSVIDKQELTQNLGSFSKFGNLSVKALDKIIPHLQLGLSYDKACEAAGYDFQGHESGNKNPIISLKHLAEATKYEITSPVARRSLSQCAKVINAIIREMGDIPPVYINIELAREMARTHKQRGEMEKAMEDNQRRNEQLKNEIKEAAIFEPRPHDIVKLKLWKEQEGSFGGKCPYCLKPLEYEQLFDVGYADVDHIIPYSDSFNDTYNNKVVVHTECNRQKGNRLPMKYLSGETQDKFVVLVNQARLNPVKRRALLKPRLTQEDRDNFTQRNEQDTQTISRFMFNYLRNHLQFSPLESGRERHVTAVNGGVTAQVRKRLGIQKIREDGDKHHAIDATIVACTTQGMIHDITRHSKYKETRYSKQETAYGKDEHFPEPYPGFVLDLERNLKDVFVSRAPERKVTGPAHKETIKGVAPSGELIKKVALSSVKLDKDGEIDGYYRKEVDMPLYEAIKQRLLAHGNDPKKAWVTPLVKPNGDGRVVGKIKIAEKSTISVPVHKGKGRADNDSMVRTDVYFVEGKGGGYYLVPIYVADTLRDGLPNKAIVAAKPYEEWPVMEEKDFLFSLYPNDLIRLKHKKMLPLNLNKKNKSGILAAKIEIQEEYFYYKGVNISSGAITAINHDNSYYFEGGAKTLLAFEKWEVGMLGDTSKVGKEELKDFKRKEK

SEQ ID NO: 904 - protein, 1066 aa, unidentified
  REGION 1..1066: note = Description of Unknown: Cas Enzyme sequence
MRYSIGLDIGIASTGFAVMELGEDDRPIKIIRIGSRVFDKPENPKNGEPLARPRREARGMRRRIRRRSHRKQRIWRLIENEGILNNVQMEALYNGIISDVYELRCDALDRLVTNEEFVRILIHLSQRRGFKSNRRKDAKDAEAGKLLKSVEENKLAMEACGYRTVGEMLYKDSRYEACKRNKSENYLNTVSRDMVLDEVQKIFSAQRSFGNKFANESIEEKYVQILASQRSFDDGPGGNSPYAGNLIERMLGNCTFEKEEKRAPKASYSFELSNLLQKINNIRLTEGGFAFELTQEQRNKLCGYAHNTEKLTYKKIRKLLDIPITQLFNHVRYDKDKMQEENILAQEEKTKFEYLKGFHAMRLALKVIYPERISAITIPQRNEIARIFSLYKNEDKLKTALDATNLETLDKEALINNLGSFSKFGNLSVKALDKIIPHLEKGLTYDKACEAAGYDFKERGGAHKSKTISLKHLAEETENTITSPVARRALSQCAKVINAIIRDEMGDISPVYINIELAREMAQTYEDRMKQEKSMLENQARNERAKNQIKEYGKFDPKGLDIVKLKLWEEQGGICPYSLKSLAIERLFEVGYAEIDHIIPYSKCFNDGYNNKVLVLAAENQQKGDLLPLQYLTGKKRDDFKIWVSNQHLPQNKKRALLKEEITAEDEAGFIQRNLTDTQTISSFMYNYLTNFLEFSNFVTGRKKHVTSVNGAVTSQVRKRLGIVKIREDGDKHHAIDAAVIACITQGMIADITAFSKYKEIRYKDPATALGPDEHFPRPYEDFVRDLEGKLKDVFVSRAPSRKITGAAHKETIKGMGDGGKLRISRVSLVDLKLDKNEDIVTTKDGKYHNPNDDLQLYEALKQQLLLHDGDGKRAFESPFEHPRNFGDKDKNGKEARRLVKKVKVARENALSTPVRGGLAMNESMLRIDIFFSEGKYHIIPIYVPDIIKSYLPNIALSGKIMNDIDFVFSLYSNDLVKVISEKPIVFKKERKASNPFDTYTTTETHAYYEYAESDGRITIITHDNSYSYRGVINNFAMIEKYQVDVLGNILTIGHETRKGFSKSRR

SEQ ID NO: 905 - protein, 1513 aa, unidentified
  REGION 1..1513: note = Description of Unknown: Cas Enzyme sequence
MGKVLGLDLGTNSIGWAIVEEERDEIIGSGVRIFPSAADNIGTSKESLKNAVRRNARQIRRQFFRRKLRKIKLLEVLIKYNMCPLSTELLNGWKKRVKGEIQKFPQSEEFNRWLKLNPLFLRDKATKEQLSLQEFGRVLYNLIQKRGFISNRKTLNDKGAMYKGKPEERILGIAQTEKELEKKATLGSFLYNIFKKDGEKYKFSVERVRGRYTLRQWYIDEFNVLWDKQTPNLGLDKKNEIYKKRSYIGNINSSRARKKIEILKKQGKTFNIENGYIIVEEHIALRDLIGDPNFGILFFQRPLRSQKHLLSLCSFESRKILINNNGEKIEKAVGKRICSASHPDFEKYRAYKFINSIKYGADLSLNESERKLLAEFMLSKDKAFDFKKISEFLDMRSEKFNYADDFKVFGSPYTATVKKSVSEDLWNNKKKYEELWNVFYFYKDGDKLKNKLKKDFNINDEKILNKLEGMKLSEDYSNLSKKAIVNILEFLVKGYQEHIAILLGGVKNAIGKDKWSSYNKEKIKKIEDEVYRMAKEKMKSGDLIKNIVNLVYEYEKIPINKIYEKIYHHSEEVIQNKTISHKLGEIENLRNPIVQQSLNEMKKLVNKLIDKYLDEDENFKSINIELARELKLPKSKRQLIYKENSDREKINRSACDILDEYGLAHSRENIHKYLLYKELETENGIAICPYTGKTIGISDILGDSNEFQVEHIIPYSISLDDSLKNKTLCESTENNKKGNRTPYQFYKNNPVHWEKVRERAYKLLPYEKAKKFTSQQNFQQDDFIERQLNDTRYITKKALEYLKTICVDVFSLPGSLTADLRNKWGLNNIVRNPSLIDTNSIKISGYGKYWAEYGDSENPNKITKLYPKYNKKPIPDSNEIIITGEIANNEFTPDSNFELKLSKIKLSQKYEDGKHWASVKFDPNLQSIQPVKKPYPIKDKDNLILIGNMIKNQFINKQFKFTVIPSAFQDDKERPSYCKLTIDINNISFKQIKPKTTENTIILPGKVSSNHFFVFPDIFSKKVELPDGRYYAEIPYFPEKTEISPLLNIKPSIENKQILLYGMVRKNAFVPNSNPNLKINLKDIISDGQYWAVFNLTGEIGKFVRKENIPPKVENQTKLEEGEIRYNSESEEYYFYSGKDRTDHRHHAIDAITIALAKRGHLQKLSAFNAKKIERKRNINKINEKLRFETPWDNFTNDAKKSIENILISHKYHNPTVKKVIKNFKKNGKSFRGVGLSVRGALHKDTVYGLHKRPVISYDGKFTFNNGKIVTENENYYHVRKKLSDLKDRKQIEKIVDYRIKEIIYRLIEQSGGFIKDNIPSGALFEIDEDAKSLKSKVFLPNKKGEPIPIYKVRIRENISNARCVKPSYKVDDIEFNQYVNPRNNHHIMIYKNKNGDLSEDVVQFWDVIQRKMNNQPIYQLPEDGVEIVTTMEINDMFILGIRGTKEDALKLSKETLSLHLYRVQKLSSNYYTFRSHLDSTTEQITEMRIQSFSKWIEENPIKVKISEIGEIS

SEQ ID NO: 906 - protein, 1073 aa, unidentified
  REGION 1..1073: note = Description of Unknown: Cas Enzyme sequence
YKKGEKIRKKYTSREQHYLEEFKKICKVQGFSEELTKKLEKAIFFQRPLKSQKGLVGRCVFEKSKPRAPISHPLFEKFRMLQFINTIKYKNEKNKFVFLDEAQRKEIMPLFYRKSKPSFDFKEIREKLFDDNNIEFNYKDEKDVPGCPTIASFIDLFGEDWENICIKYKREKDNKESKINYETIWNVLFSFDSDEKLIEFAKKRLGFDDEKAKKFSKINLKQGYASLSLCAIRKILPFLEQGLLYSYAAYLANLDKVLKNTGKEKYKEDIKKDIDEVIKTYRDAKKIEYVINSYIDKYRNNHYNLNVSKEDFKKKIEKELNDEKSDYYSLEEEEKKKFIDEYYNILEKQIKKNEYIKIKRRDEKIKELLKERYDLTDQALDKLYYPSDINIYPDAKISKDGKKYLGSPRTPSIRNPMAMRTLHQLKHLVNSLIKNGKISEDDQINIEVTRELNDANQRAAIRRYQNELEKKRKEYAQKIRETLHIEPTDTDILKYQLWEEQNHICIYTGKEIGISDFLSDNPVYDIEHTIPRSVSFDNSQENLTLCDNDFNRNEKRNQLPQQLANIEEILQRIKHWKEEYKRLEKEIEKARRKSRSARTKEEKDRAIQERHYLKLKRDYLKSKHDKFLIKQEDIDKIGFTNRQLRDTAIITKYALAYLKTLFNNVNSIKGTITARFRKIWGLENEYEKKARTKHSHHTIDAIVLACITKPKYDRLAQYYQEKERGLMPKFRKPWQTFVEDIKKIEDEVIVKHIYNDNALKQTKKKLRVRGKIKYIIDNNGNKKPIYLKGKGFRGSLHLDTYYGAIKRKDKNGNDRLFYVVRKPLDYFKNNEKKLDDIVDNVVKEKIIKAIEEGKNNGKQLNEILSNPIWMNEEKKIPIKKVRIYSYFENCKKLKEHTFLSNKEHKNYIYVETGGNALMGIYEDQENRDNRDFIIYTNLELAKMKQISLPDTYNNLKLKYKLKEGLSVILYKDNPNEIFKLKDNEIILYLYTITGLFVDGGRIELKNNIEARKKTEIKKYLKERGEPYPKKGEFVNDGKYYPVRNLMFKQFNALIEGVDFIITIDSKVKFLNKK

SEQ ID NO: 907 - protein, 1074 aa, unidentified
  REGION 1..1074: note = Description of Unknown: Cas Enzyme sequence
MDLVLGLDIGIASVGWCVLDEGRKKIAGLGVRVFPVAENPKDGAPLALPRRLARSARRRLKRRRERLDSIRGLIVSEGLASSDEEISRIFARVTEEQGTPYQLRAEGLDRRLTDEEWIRVLLHIAKHRGFKSNRRSAEEKDKEAGRMLGSVKDNEERLKEKGYRTVGEMLFKDPDFAASKRNRGGDYSHTVSRSSLADEAAALFAAQRAFGSAHASESFEKNYIEQFTFQHPFATGKDILAKVGPCTLEKEEKRAPKMSYTAGLFTLLTTLNHIRLTEPQPEGGYAERSLSDSERRELISMAHSGSGDISYAQIRKKLDLPAGARFIGLRYDADDAKNVESAEKKKKISVLQGYHAIRKALGKERAALWDTISSSPDILDRIALILTTEKSDDAIAAALNELFSQQQISPEAIPALTPLSFQKFMHLSVKAMRRINPYLEQGLTYDKACIAAGYAPDGQHDALKKTAQLPTLEQYMESIGDELRNPVVGRALSQVRKVVNEIMRVYGPMSEVHIEFAREIKKSFAERLEIEKKQKENQTERESSLKDLTKTFSNVFSEQNPPKGGDLLKYRLFKEQGGVCAYSLTPFSRQQLFEPGYAEIDHILPYSRSFNDGMSNKVLVLCSENRNKGSRTPWEYFGHDAVRWERFSGWVRSTIKNAAKQRNLLRTAFGDDAGKEMRVRNLSDTSYIARLAAAWISDTLLMADDAPKRAVRTLSGGITAHLRRHWGVNSLKDREKNNLHHALDAAVIAAATPRMVETVTAFSQTEESRLRSPEPGHRRPWLPEPWPGFRHELRVLLSDDPQNAMEKTAMPASYSDDDKKNIKAIFVSWMPDRKATGEAHDQTIRSTRKRRDDQRGCVISQPLAKLKLKDLDKMVGKERDTRLYEALKKRLEEFGDKPEKAFAEPFRKPTNDGRPGPVVRAVKVYDSTYSGVEVRDGLAGNGGMVRVDVYTKGGKFYLVPQYIANVAQHQLKTKAIVQGKAESEWTQIDDSFDFCFSLCRNDLVKVTDRKGTCVFGYYLGTDRATGAIGIIKHDASSQTRVGVKTCLTLEKYIVTPLGEYHKVRKEPRPEGKAD

SEQ ID NO: 908 - protein, 1075 aa, unidentified
  REGION 1..1075: note = Description of Unknown: Cas Enzyme sequence
MRYSLGLDIGTTSVGWAVINEDKQRIEDLGVRIFERPEDPQTGESLARPRRDARSTRRRLKRRRERLDYLKRFFIEHQLLSKEQISDLLTYDKGHIHKDPYIIRSKAIKEKVTNDELFVALYHIAKRRGYKSNRKSVEKRDKESGKVLQAIEANRPFLDQHNQSVAITLLEEEKFAKHKRNKDGDYNNSFIRANFETEIFAILRTQGWSESWIEELLHANPAAEETKGKSGLFYQRSFTDKDLINRMRGYCQYEDGELRAQKASYSFDLFRVAQDLAHLEYNNGEKLTLEQIQLCIEEFKKVKEPSYATVRKILDHTKDDSFSFDYIRGKKEKGEKSKFGGLKFYHTVKTTLKDSPEDWQKLEQNVELFDKIGEILTLNKDDEAIKKDFKELDLSNEAKTQLATINVSGFCHLSIKALRKITPHLLEGNTYDKSVELAYPGSFTEKLSGDKSELPPLSEDQLNQLTNPVVKRAISQTRKVVNAIIKKYGAPYQIKIECARDLRKNKKERDEIKDKQDENAAHNQKIIEKLQELGITSPSGKQITKYKLREWQAGQCMYCGQELRIPDIFVDDSLTQIDHIIPFSRCGVDRIYNKVLCCASCNQVKGEKTPYEAWGNTGKWDTVVALANTMPEKKKNRILRENPPKEDWRDHALKDTQYITKFLSDYIRKNLKFADFHDGRVQRVIRPAGGITDALRKMYGLGKKDRDLNNCHHAVDACIIATVSERQIAQLSEWHKYHILRIRTEEEYGQYEPWESFAREVRARSGMLHNTGEIEKLSDFRDRFRQFKSYDEEFLQKIHPLFVSRMPKHNLKGKAHKETIRSSKTKDGDMRLTRMKLDKKAAKKYVTQNDKSKSWLENSVLPESDQVLYQQLKSLLEEKGEHAFDEEVYKNNKKVDKNGHPLSPVHTVKIYEKKPDTSGVYLNNHTQFADNGNMVCINIYRRKDGAGKYKFFVAPVYAHSIRKKVLPILPTPKGNSKAEKAEYAKLRNFEGLIMATPENGFEFVARVFPNDYIRVSYPNRVIEGYYIGYDIDNTRISVIRHNQPQKKATIRKVLNGAIDVETIPISILGDNYKFE

SEQ ID NO: 909 - protein, 1089 aa, unidentified
  REGION 1..1089: note = Description of Unknown: Cas Enzyme sequence
MRYSIGLDIGITSVGYAIMELEEDDTPRRILQLGSRIFDIAENPKDGSSLALPRREARGMRRRLRRKSYRKERIRNLIIEAGILTQAQLESLFAQKLPDIYALRHEALDHAITNEALARIMLHLAQRRGFLSDRRNDKNNDKEEGQLKSAVSKNKELMHDKGYRTIGEMFAADPYYTERKRNKSDYRNVVLRDMVLDEARAIFAAQRQHGNVLCTEDLEEKYIEIIASQRAFDEGPGRGPMNAPSPYAGNQIEKMVGKCTFEKDEPRAAKATYSFERFNLIQKINHIRLVGGFTTQLLNEQRLKIIEAAHKTEKLTYAKIREIIDLDPAQLFNNVKYEKNVDPNKTEVNTKFEFLPAYHAMRKALNKIIPNRISALSVSERNVIGQTLSLYKDEDKVKKVLVDAGINEMDISELMGITSFRGFGRLSTKAIDKISPFLEQGMNYDEACESAKYAFKDDEVQDAKDIISLKHLAEEAEKSITSPVVRRALSQSAKVLNAIIRLMDASPVYINIELAREMAKNFDERKKLDKSMTENNARNERIKKQIQEYGNTNPIGLDIVKFKLYEEQRNECPYSGKMLDITRLFESGYAEIDHIVPYSISFNDLYANKVLVLADENRKKGNRLPMEYLTGEQKDAFKIRINNSNLPPTKKKRLLKEVITDDERNEFHARALHDTQTMNKFLLNYLTKHLQFTPSSKFKRHVTSVNGTVTSMLRKRWGLNKIRGNGDLHHAIDAAVVACTTQAMINDLSRYYKYREERFTNANIDPRGSKDDNFPQPYPYFRDELMARLSQENPSLAVERLSLFTYPEDELAALTPVFVSRMPSRKTIGAAHKETIKGIADTGELIKKVPLSALKLNKGGEIDGYYQMENDMLLYNALKERLEQYSGKGEKAFTEPFYKPKGKGEPDRIVRSVKIVEKSTLNVPLRTPDGKIKASADNGSMIRVDVFHVQNDGYYLVPIYVSDTVKPVLPNKAILQGKPYVMWPVMNDENFMFSLYPNDLAYIKHKKGIEFTRVHAESSLNEKMSCQDAFVYYKTTGIAVGTISVINHDNSYVVKSLGIKTLLAFEKYQVDVLGNYTKVKSEKRQYFNR

SEQ ID NO: 910 - protein, 1105 aa, unidentified
  REGION 1..1105: note = Description of Unknown: Cas Enzyme sequence
MKYVIGLDLGTTSVGWAVINKDESRIEDLGVRLFESAENPIDGHSLAEPRRLARGARRRLSRRRSRLDKIKAVFILHALIQADKIKTLMVAKNNPYQIRAEALDKKISNEDLFVAVYHLAKRRGYKSNRKSAELEVDNSEKKAVLSNILKNSKRMQETASRTVGEMLYKELQATTVGFEGVRNKPANYKHSVSRSMLQDELELILKTQQKLGNELITEFFYNDLLGLDENNSAIGAFNYQRHYAQGDILKQMVGFCTFEKEEIRAAKATYSFQYFNILQRLNNLQLIDSGGNRRPLTKNEKEQIVAKMLTVKTFGNYEQVKNLLGLENTTRFNMVNYFVSRKHLETLSEAEQKDECEKKTKLPNFEAYHKLKSAIVGTKDNPVNQSFWDLMSSDFKTLDEIGEILTLYKTDEDILKYFEKLLVNEAVPLPDDVKKALLSVSFTKFGHLSVKALRKIIPYLEAEKQYDEAVILADKDYGKNLSSKRIKLSPISKDDHSITNPVVRRTVSQTIKVINAIINRYGSPYEVHIELGRELSKNHTDRKNLLKDQKTNREKNEQAVLQIKENFKQIDPSGQDIIKHKLWHEQDCKCAYSGRAIDDTRLFEIGYTEIDHIIPFSRSFNDSFNNKVLVLKSENQNKGNKIPYEFLNTSEQRWAEFESLVTSMNKLSKPKRENLLIKKYVSDELTERTLNDTRFIARYVKNYIESNLLFTKEENKRTVVTVNGSATAYIRKRWGLSKDREASSLHHALDAAVVATITPAFIQKIATFSKFKYIQGYLKAHKDISNIDATLEEIEGAKLLITKHEQGSKLFFPEPWEHFRSELIARTSNDPLNEIGLLKKELPDYSTDIKPIFISHMPRHKVTGRAHTDTLRSPKRFAENISSVRTPLTSLTIKKLKECGQYLDPKLYSDLLNQLNLHKDDAKKAFSLPFYKKMNNGEQGPLVRSVKLMNYAQKSGILLNNDKALADQDSMLRIDIFSKQSKKEKDEFYFIPVYSYHTTQKVLPNKYVISGKQEKEWGEIDETFKFKFSLYPGDLFSLTKGKEEKVLYYSGADRSTASLSGIAHDKSEKVRGIGIKTLDKLDKYVVDMLGNRSLVTKESRQSFNS

SEQ ID NO: 911 - protein, 1104 aa, unidentified
  REGION 1..1104: note = Description of Unknown: Cas Enzyme sequence
MKYALGLDLGTTSIGWSVVNLDKNRIEDLGVRIFEKPEDPQDGKSLAVPRRTARSARRRLKRRRQRLNYLKQFFVKNSLLTDQQIEQLLTPHAGQLDPYVIRQKGLTERLSPEELFVALHHIAKRRGYKSNRKAVEENDTKGDGKKVLTAINENKVLLNSYKTVGSALLNDPKFSTHKRNKGTSYQNSFIRANFEAEIRQILTEQQQFYPALTDQNIQLLLLGDVEQGNKNGLFYQRPFMTPALIKKMRGKCPYEKGQPRIQKASYTFELFRLAQDLSHLTYSHRDEDGAIKEKIQLTPEQIQACIDKCKATRKVTYRAIREVLGHKDDNNFSFDYIRGKEPKREEYEKDHNAKEKNTFAELKFYHDVKKAAKDTPADWTKIEADIDLFDYIGEALTVNKDDATIEKELRGLITFGGAPVNLSDTTISNLMQLSYSGFAHLSAKAIRKITPFILQGNTYDKAVILAGYEFNQQLSGNSLKLPPLNEDEQNQITNPIVKRAISQTIKVINAIIHKYGSPMRIGVESAGELAKNFKDRQRIKKEQDDNAAVNEKIVTRLKEEFHVVNPTGLQISKFKFYLEQDGKCLYSGEPIDLNRLFDDSSYCEIDHIIPFSRCGNDSRANKALVLNHENQDKRNMTPFEAWGHTDRWPEFCTRVNTNPKLSPYKKKRLLAETLPKEDWNVRALNDTRYVEKFLAQYLRRHLKFEKYDDSDPDDKRRQHIVTPAGQVTTFFRRAWGIPHKDRDADCLHHSVDATIVALTTQGTIARLSRLNQWREVSKYLPIDTKTAVDKTTGEVVEYISSKDILPWPEFTKELDLRESQPKEGDSLATWRDQFRDIYKDQDEEFKNSIHPIFVSRMPKRRGKGSVNKDTVRSPKSKNGMRTVRTELNKVNLKTLDSSVLPESDLALYNQLKKRLAENGNDPAKAFAEPVYKNNKKFDKNGRPLSPVSTIKVYSKNPDTSGFLVNNGKAYVNNGSMIRLDVYKRINEKGKTEHFFVPIYAHQVKTGSKRILPEPKRGPKFIDDSFDKVCELFPNDYMRLEYIDKNGCKKLEQGYYMAYDISGCKIWLKPHLSSGNAMSYRVAPRSATTIQRLDINVLGDNYKWE

SEQ ID NO: 912 - protein, 1104 aa, unidentified
  REGION 1..1104: note = Description of Unknown: Cas Enzyme sequence
MDTKELKYVVGLDIGITSVGWATLLLDSQDEPVRILDLNSRIFDKAEVPKTGASLAAPRRMARGVRRRLRRRKFRLHRVRQYILRHHILDKAGLECLYKPKTDIDIFALRTAGLDRQLKPEEWARILLYMAKHRGFKSNRKSAAVAGGDDGVMLKAIQQNKEVLSKYRSVGEMFDKDEKFSDHKRNKGGSYEFTVARSMLVDEIKLLFEKQRDFGSAFAEKDAEEGYIDLFSAQRNFDEGPGGDSPYGGNQIEKMIGLCTFEGKNGEKRAPKASYAFMATNLWQKINQIRIIEKGTERPLTAEEAGKIDEKAWKKEAMTYKDIRSEISLGDEASFKGLPYKWTETDKEETESKAKFSWVKEYHTLRKVLDKVEKNRILQLSHDDIDNIAYIFSVYKNDDKIREALEGTDLDSKDIDVLIENLGTFSKFGHLSLKACYKILPYLEQGMVYSDACTAAGYDFRKSAQGSIADIPNPVVKRAISQTMKVLKAIKQKYGCPPVEIHIEMARELAKSFDERQKMTKSIEENQSHNERIKERLQKEFNVPYPSGQDIVKLKLYEEQNETCAYSQKHIDAAKLFHDPNYAEVDHIIPYSRSFDDTYNNKVLVLTAENRQKGNRTPMEYLSGDEARKKQFVAWVKSDIKKPRKRENLLREKFTADAENDWKIRHLQDTQYISRFMLNYLQNNYELTPGNTDRRRRIIPVNGAVTAYVRKRLGISKIRENGDLHHAVDAAVIAAVTQGVVNSVSKYSKRHELQYHVDEHGNCVDLVTGELMGDAFKENHKIKGFPEPWPQFRAELEARVSENAAEAIRILKLPTYSPDEEIKTPFVSRMVRHKTTGQAHEDTVRGKSNVADNVYVKKVALTELKLKDGEIEGYYNPSSDRLLYEALKKRLEQFGGKGKDAFKEPFHKPKADGSPGPIVKKCKVIDKISLAVPVHGGKGATANANGSMIRVDIFRVKEKNNKHSYYAVPIYVADTVKDKLPNKAIVAKKNYDEWLEMKKEDFVFSLYPNSAVYIGGKDIKMNVMSGCTLELEKTMRDTILYYKGLDISPGALKIINHDGTYQQRGLGIKSLPFIEKYEVSVLGDLVKATYRPRETFNHKAQRSK

SEQ ID NO: 913 - protein, 1380 aa, unidentified
  REGION 1..1380: note = Description of Unknown: Cas Enzyme sequence
MICAVTTKQAKAYDMGENKTIWAFDLGTGSIGEAVRDGTKFLHKASLLIPAEFAETKTAAGRRRMWRTRLAHHAREVWLDEVMLKAGIEPLKGRRTVKIDGKWQAAPEIEQLKRNRERLEREFAEPGDYTCYTSCLLRIKMLRGEKLEPWQVYKALHSAIQRRGYDPDIPWKTRTRSKPKAGGSEDDEAATQARMEEFERQLENMAPGKPAFQFPCYFDAWKMGLWNPSDPAQLKSRIDCRCETTRNQIVPRKLVEKEIRNLVDAAAKYYPKLEGQADYLLYGPAKTAYASFDGKLRKQYNLKEGGANDWQGVLGQKIPRFENRILNDCALIPRLHVCRNPSREEYKKLSEDKLLPAQVTFLMKLKNMRVEEKMPERKQRGLKAAQIKEIFDEYDPKRKYSLTPTQWRNWCEKFAVIPVTDASEKGKGAGEEAGDKKKKEEKNIIEAPADSGRSRFSRPALRILKTLILSGLNPSEMHKKLLQRDTDMLAEIEMDILDSLPIKEKKDASGKLFENYEKQPRPWLLVSDLPFLLAMRKTGAKVDSWEDLFIPNQRLDQLVQEISGGGSADAKAERQRRDKAIQELIGSQNDPKVRHRLATFWERLQFLEKEHGDPSQIVLEFIRVDFMGQKAKSKLKKFQEERADSRKKARGHGGLKFELYQAQSGVCLYGKQVFRDGKCVCLENGLPMPGTQGWDTLVIDHIVPREAPYNGPDAMVNYVLTTPDANNAKRKRTPFDWFHQDRMAEWDGYRNFVTSKIGTLGGKKVQLLTRSNAAELVGKYTSLAETAWIAKLAQTLIRLHFGWPLEHERGKERVTVVPGGLTGRIRRKYLLNTLLDERFKNLPTNQIKPEDEEEAEKDRKDLRHHGLDAMLISFFPDWMRNPLKGDFFRFPLPLDQPFPGKRNKHAVREFFKKQLDEVLPENLFLEKAKLAEMAYGRSFQPEETEANGEMVKYKKVKLPLAELAFRKDSNGKATYDYKHARRAAQGISDEGICASVEAFLKKQATEAEWSAFCQKFETELASQQKRGKTVKIQVRKVEEIRTRRRSVKEMAYEQGNSREYDVTYARENVNEILEDLPEQKVIKAKLRAFFAGTPSDSQWKAFAETLKPIDRCKLRSEFDEGGKKSKARTVNFLVFAHRPIPMKFNLEKAQARIDKICDEHVRQRLRAFVNQNPPPDQAAWNAFCDSFAQERKDENGNPLSDASGHVLYGAAIKKVRVNDGSPDEYKDFSKDGTGAFYKNKKEHKGQFVYVVDDGTPDGAVNVRPVYVFESVRKVKKTVENAPKFKRLVAYFESGCTISVTQPVPASSYNLVIRDTEKKKKWIKATTPLMPSKFLLNTIITKSQAIEAKTADGKVIVSTLEPCIKAGLHRVYQKAPISSKP

SEQ ID NO: 914 - protein, 1009 aa, unidentified
  REGION 1..1009: note = Description of Unknown: Cas Enzyme sequence
MTERILGLDITKKRIGWALIEHNPKDTSENLIVDCGGFDFNAGEIPKTGESPNKPRRDARLARRTIKKKRKRKAAMRSLFVEYDLLNKDIDFEVFISQNISPWHLRAKALGELLDGEELARILYHIGGKRGYQFTRAEEIDMHDGESGKIKEAGRALVSAIEESSSKTVGEYLAKLDRKRNTHIAVVDKKGKTSKEATYDRSTPRWLLKQEIDVIFTTQQSLGSKITTNELKKEFKDLAFFMPDPQSTERLLGKCTFFPNETRAVKASLDAEEFVALTRFINCVLEMSGTGIEKKITELMPLDELMTMAKEKASISHSDIRKRLSLGDEWIFKGVKYDTKTKKASKKAAIAKTGLFNEEPEDEIVLDYKYEKKALVEMKAYHTLKNALMDDFKAIEGVYNDVAFVLTVERGENSIKTRLQKLGLKESIIEKLIEKADPKIFKETINLSHKALDVVLPKMREGMRYDQSVLELGVTTFDKSHFLPALINTNIEVNNPIVLRVVAKLRTIVNEVIRFHGSFHKVHIELGSDMNTNAEKKMIDAAQREREAQKNIAKTKIKELFGEKINHENRRNIEKMMLFTQQNEMDLYTGKKFEIERLYEDGYAAVDYILPRSRSFDETFGNKVLTFAEQKIDKEDKTPFEWLGDNSDKWESFKSLVSSPMFFAKLGRGKVNRLLKENFNDQSAADAASKRLEKSRQYAARVIKQLFEDYLDMPKSPLGGKIQVFTRNAWLTAELRRQWIGFETYQEHADRISVLNAILVAFSTEHMIKNLTQHFKWKETKWTKEWLQSKRDKGEEAVSWEKEKKRFDKPYPEFKTDAIKLLQYDRSEYDRNGVLRKRLLIAKTPRKSTTGPAHDAGVSSIKGFGENAKGVVVRDGTALAAHKSIFRLDVFKNGKKNAFIPIYIADTKKPLSDVALIDSRGNTDVVSGEEFKFTLYRNDLIGIMQKGNMRIGYYTSFNRATLALDIIADTPLTIGGGTAEIVKYTVDPLGFYYPVKSEPRMPTLKQKRK

SEQ ID NO: 915 - protein, 1062 aa, unidentified
  REGION 1..1062: note = Description of Unknown: Cas Enzyme sequence
MSRGNSEMSEGRGAGYILGLDIGSSSIGWAAVAEGDGGEAGGIAGVGARVFEAGMDDIESGKDASRAAARREARSIRRRLERRSRRLMKLGGALQRRGLLPEGDIKAAGARKEYFDKLDAALAAADGGADAAMLPYRLRAKALDEALSPHEIGRALYHICQRRGYKSNRKDLSDDRRDKEKEESKKVESGIADLRAKMAEAGARTLGEYLSKLDPAAERLRSRYTHRDMYSDEFEAIWSAQAPRHPGAMTDEAKKEIHRAIFFQRPLKSQKNLRGRCELETGCPRAPIALMVSQRFRLLQKVNDLKFRYTDTKTGEIFDGPLDAAQRELLAAALDGKGEMTFGAIRKLLGLKGHQKFNFEEEGKGGKGLIGNKTASRLASVFGPERWAAFSDSEKDEIVQTVRGMRDETALAAAGARRWGLAPDAAARFGSVSLEDGYCALSQRALKKILPLMRQGAPYSTAVKEVYGAVRSEKVHDTLPPLQYSPMPTITNPTVRRALTELRKVVNAIIAKHGKPEYIRVELARDIKKSKKEREEIWKKNIANRKEREKAVSEMLKETGGREPSGRDIEKWLLAEECDWTCPYTGDHISRDSLIGPNPAFDIEHIIPFHRSFDNSFMNKTLCRADENRNVKRNRTPYETYGGTDEWEAILQRVRRFKGNAAKAKLEKFMKEKVDDLDGFCSRQMNDTRYASLLAVRYLGLLYGAGAQGIDAEGKRRVQAGRGGVTAHIRDSLGLNAILGDGRGKNRDDHRHHAVDAICAALSDAGIVKRMSDAAEESARGGRRGRFEHVAPPWDGFQRDARDAVRSIVVSHRPRRRVNSALHEQTTYSKTFIDPSGSECVHIRKRVESLSGKEDIVDPAVRKAVESKLAELGVSEPSKAFKDPANLPYLTTRDGRRVPIRKVRIRVKTTIKRIGDGASARNIKTGSNHHVEIFEVTDKKGNPKWEGRVVTTIEAMTRRRNSQPVIDRTHPDGGKFLFSLCGGDVIALKEDEGDNERLFVVRTIKKSSGNARLEYVSITDARKKEQIISNKNWYSGMMEPLRKKGCRKMNVTPLGEVIPAND

SEQ ID NO: 916 - protein, 1038 aa, unidentified
  REGION 1..1038: note = Description of Unknown: Cas Enzyme sequence
MAKPAEERILGLDIGANSIGWALVAYENGNPCRIVRAGVRCFEAGVTGDVESGRDESRARKRREARLQRRQTARRARRIAKVARLLMRAGLLPPAPVETSEQRLNFFTELDRSISSRYLGNLPDNTLERGRLAHVIPYTLRARALDERLEPHELGRALYHLAHRRGFLSNRRASVTKEEKPGEIAKGISKLQSDIQRAGCRTLGEYFAGLDPEKERIRARWTSRKMYQDEFEAIWERQSQFYPSILTEELRKQLEQAIFYQRPLKSQKGRIGECEFERGCRRAPKASLEFQRFCMLQNVNNLELISTEDGQVRSLTHEERQKLVAELETKKEITFDRARKVLGLSKGSHTFKLEQGGEKKLMGNKTAAALAKVFGARWGKLSEADRQAVFEDVWSIRKDEALKARAIRVWGLDEQAAEKLLRVQLEEGYCSLSRKALRKILPELEKGRRYGEIVHELYGERKRPVVEYLPPVDNSDITVLNPAVHRALTELRKVVNAVIREHGKPDKIRIELARDLRQPRKERKRRSADMRRNERAREDAKTRILQETGDPQPSATDIMKVQLADECNWECPYTGRHISMSKLVGANPQFDIDHIIPYPRSLDNSFANKTICYIPENRNVKGKRTPFEAYAGTDRWEDIIARVKAFKGRLAGEKLRRFQLEDLSEFEDFPARLLNDTRYVSTLAANYLSLLYGGLWDADGVRRIQATKGGITAELRNAWKLNGILGDGPGKSREDHRHHAIDAAVIALTDSGMVKRLSKQAERSLETGKRRWWNYIEPPWDGFLDDVRNAIEEMVVSHRVSRKVTGPLHEETYYSYREGVPYVHVRKPLEALSKGEVEDIVDDTVRECVRKELGDRKPEVAFKLRENHPSLRAGDGRAIPIHRVRIRKKASVQTIGEGVRRRHVLTGGNHHVEIVEVRDRAGKPRWKGYVVTTYEAMRRLRAREPVVKRDHGDDEKFLFSLTQGDIIKIGSGDAPDQYFRITTFWEEQGITRLQVKGISDARPAKDERGRSYTVSKLGRLACTKVAVTPLGEVRRAND

SEQ ID NO: 917 - protein, 1048 aa, unidentified
  REGION 1..1048: note = Description of Unknown: Cas Enzyme sequence
MKSNENGAYVLGLDIGSNSIGWALLSHDGKKSCGLEKAGVRVFEAGVEGDIKSGRDQSRGVNRREARLRRRMLARHNQRLRTLTGLLQKAGLLPAGDLSTDEARHKYFGDLDNAIFPESTRKEHPQTFHYQLRAQALDRQLSPFELGRTIYHLAQRRGFLSNRKAGKSADKDEGPIKEEIGHLSEAIKSSGARTLGEFFSKTDPEKERIRQRHTSRQMYLYEFEKIWTFQERHHPAILTDKFKKMVHKAIFFQRPLKSVKRFIGECELEPGRKRAPLAVLPAQRFRLLQKVNDLTFKGVNPATGAVANERSLTNEERAKLVAVLETEGDRTFAQIRKLLGFPKWMTFNFMEGGEKKLLGNRTAAAFREIFGEPWDKFASEEKDRIVDEVRSMQKPDAQYRRGMKAWGLEGEAADNFGDLVLEPDYCSLSRQALAKVLPLLEEGIPYATARKKIYGDRPAPKPIDELPPLDRAEVPEIRNPAVSRTLTEVRKVVNAIIRKYGKPAQIRIELARDLKKNRQDRKAIWKRNLENRDKREEAGCKLLAEAGIDRPSRTDVEKWLLYEECMHLCPYTGKPISVASLFGSNPQFDIEHIIPFHRSLDNTFLNKTLCHVAENRNVKRNRTPWEAYGSNQEKWGEIIQRATSFKGDAALAKLERFQLKDMESFDDFTERQLADTRYASRQAIQYLGLLYGTGAQGVDADHTRRIQAGRGGVTRYLRDEYGLNRILSDGGIKNREDHRNHAVDAICIALTDSKIVHMLSDAAARAWQERRRRFGLLAPPWPSFYNDTAAAIEKLLVSHRVSRKVSGPLHDETIYSKRHTDADGRTCVHIRKRIEGLSRSDIEAIVDPIVKQAVIDKLGDGEAKKVFADMACHPVLSSGVPIHTVRIRKYDTTMPIGSGVRRRLVISGSNHHLEIFEIKDKKGKPKWGGRVVATFEAMQRLRNGKPIVCREYDGNGKFVFSLAGREIIELNRNGKKKLYVVRKITTAKQKQSAREYVSIAFVNINDARKKKDIQKAGEWFTGLLEPLREMECRKVVVTPLGEPRLAND

SEQ ID NO: 918 - protein, 1125 aa, unidentified
  REGION 1..1125: note = Description of Unknown: Cas Enzyme sequence
MNDKNQRYRLGLDLGTNSIGWCIYSLDGNNKPEALIDMGVRIFSDGRDPKTKEPLAVERRTARGLRRILHRRKQRRKQMFCLLQEQGLMPNDAVQATALKSLNPYELRVRALDAKLEPYELGRVLFNLSVRRGFKSNRKEAVQEKEKDSQNDTKSQNEKCEQLAKAIKDSGFRTLGEFLWKHKNTETPQMENDAGDIGMRFVPGRSNYYPTRRMYAEEFDTIRKVQEPYYSGVNWDALYEKLFYQRPLRAQERGKCRYMPDKERTFKAMPCSQKIRILQEVYNMDYIDALGKAFPIGNAQTDMLIALLDKKEKLSFAAMKKELGLDESCTFNLERGGREYLQGNITAVKLRNKNRFGELWDSLSLAEQDRIVEKLITADEDAEIISILEQYDLTDEQKKNIVATVLPSGTSMLCKEVTEMLVQKMEQNKIPLTVAVQMLGYTYADQSVHEEGELPYYGVILTGSTMGAHPEADESKPELKYGKISNPTVHVALNQTRTVVNTLIKAYGKPQQIVVELSRDLKASREAKARIQKTITMNQKRNERDNKNITEITKNPYPNREDRLKYRLWEELGSDSFSRKCLYCGKPISGSEIFTKDIEIEHILPFGRTLFDGETNKTIAHTSCNAFKKDRSPFEAFGSSPNGYNWHDIRARANSLKNPAKRALFAENAMEKFEKDSSFIQRQLIDNAYLSRSALRYLRCICKDVWSVNGCMTKLLRDKWNIDSILKREIGDTEIAHFELKNEQIGQYKKNRYDHRHHALDASVIALIDRAIVQEISRLNQIRLKNRIEAPQMPVLRSELIEKVKHITVSFKPDHGRQGKLSKETLLGKIKKIEKVDIDSIQTDDIASIKDDAIRTRFETKRRELGDITKAKAALKTEFPKLDVFKTYYVSRTPIVSLTEKNIDSIVDEKIKEKLKTFIKEHADLSFAEQLQKFTETEWIGKPSVDGKPGKKYRIVKVRCINRVQTPIPITSSAVPRYLCPEDYLAAVVWQMPAKKKDAEPEYQATYLRRDEFDVNNKPKKLEKPHDAAKYICLLYKDDYLEFTEKGVAYLCRIAGFSATQNKIDIRPIYAVSDCKDWIIATSDNMLESCWKPQKGQNHVSVNVLFGKRKAHSVTVSPIGRVFRK

SEQ ID NO: 919 - protein, 1078 aa, unidentified
  REGION 1..1078: note = Description of Unknown: Cas Enzyme sequence
MNYVLGLDVGITSCGWAVLELNHEDEPVRIVDLNSRIFDKAEAGNGDSLAAPRRMARGIRRLTRRRKFRLHRVRGFLVRHHILTKEEIENLYTNPHKTDIYELRYRALTEKVSPSDWARLLIFFAKHRGFQSNRKNEKSGEDGLMLAAIGENKKVLENYRSVGDMLYSDEKFRDCKRNKGGTYRFTVSRSMLKEEVQTLFKTQRELGQTFAGEDLEDEYISIFSAQRNFDEGPGANSPYAGDQIEKMIGDCTFEDGKNGRPPQKRAPKASYAFMAFNLWQKINHIRVNSKGIERSLETEEKNKIAGLAWTKENITYYDLRQITGLDEETRFSGVTYPLDSTTEEAEKKVKFSWVKPYHAMRRALDKVEKNYIQKLSREEIDAIAYAFTVYKNDKKIRTALAEKGIEDNVADVLITHLDGFSKFGHLSEYACYKLLPFLEKGEEYYKACDSAGLTESPAKKIKDITNPVVKRAVTQTMKVIKAVQRKYGNPVEVHIELARELARSFKDRAAMDHRMKENYAKNEKIKERLSKEFHIMNPRGQDIVKWKLYEQQQGCCAYSQKPFDVDRLLHDGNYAEVDHILPYSRSFDDTYRNKVLVLEKENRDKGNRTPMEYLADKPERKEKFIAWVKTTIKDSKKREHLLRVKYGRDEEAEWKQRHLQDTQYISRFLYNYLRNTLELTPGYTDRKRRIIPVNGAVTGYIRKRLGIRKIRENGDLHHAVDAVVIAVTTQGMIQKVTRYSQIRENPKLIDKKTGEVLTAKEFHNKDNFPEPWPRFRQELEARVSEDPEEAIRRLRLPAYENVGEIKKPFISRMPRRKVRGAAHEETVRSGKLREDGYTILKTDLSKLKLENGEIKGYYRPESDRLLYEALKKRLEAFGGKGEEAFKEPFYKPKADGTPGPLVKKVKIIEKSSLNVPVHKGEGAAYNKIRIRIDIFGVNEKGKMAYYFVPVYVSDTVKRELPCRAVVQDKSYENWKMMDDKDFLFSLYPNDMIHVVAKRDLSFTAAEGSSLAPKMKTKDAYVYYKGADINGGTITVINHDNSYGIKSMGIKTLLQMEKCEVDILGNISVVKQEKRQGFR

SEQ ID NO: 920 - protein, 1082 aa, unidentified
  REGION 1..1082: note = Description of Unknown: Cas Enzyme sequence
MNYVLGLDVGIASVGWAVLELNEEDNPIRIEGLGARIFDKAEVPKTGASLAAPRRMSRGIRRVIRRRRFRLQRVRSYLKRHNILPAEKVDHLYDVPSAIDIYELRKRALTEKVTAEEWARLLIFFAKHRGFKSNRKKASGDADEGEMLKAIAANAEILKNYRTVGEMLCDNEKFRKRKRNRDGAYNFTVSRAMLMEEINTLFEIQRNLGQKFADEKLEEEYVILFASQRKFDEGPGENSPYAGNQIEKMIGSCTLEGKKEKRAPKASYVFMAFNLWQKINHLKVNRRGSERFLTEEERRRIADLAWKKEKLTYGSLRKVLSLDPEDRFVGLRYDLKKGKAENLEEPVSEAEKRSFSWVKDYHSIRKALDKVEKNRILKLSHEQLDTIATAFSVYKNEETIERYLEEGGIGKADREALLERLSGFSKFGHLSLKACYKLLPFLEKGEVYSRACELAGYDFSKSSLENIDDIPNPVVKRSISQTLKVINAIILRYGNPVEVHIELARELARSFRDRKKMEKGMQENQAKNEKIRQRLISEFGVLRPKGMDIVKFKLCEEQNGECAYSQKHFDMEKLLKDPSYAEVDHIIPYSRSFDDSYNNKVLVLTKENREKRNRIPMEYLADAPERKNRFIHWVKSTIRNSRKRENLLRTDYTATTENEWKRRNLQDTQYISKYLYNYLRHHLVLAKGYTERKRRIIPVNGAVTAYFRKRLGINKIRENGDLHHAVDAVIIACATQGIVNKVSRYSKSRELWDYEVDMETGEVLQKKNKNTKDVFPEPWLNFRYELEQKVRVRPLDIPETADITEMEEPFVSHMPNRKIHGPAHKESIRSGRLKEEGYTISKTALIDLKLTGDKEEIKGYYNKESDRLLYEALKKQLQRYGGKAKEAFKEPFHKPKADGTPGPIVNKVKIMEKSTMLIPVNDGKGLASNGNMVRIDVFRVEEKGKKKYYFIPVYVADTVKEELPNRAVLAHKPYEAWKIMKEEDFIFSLYPNDLIFVDAGKEIPFKAALKGSTLDPEKKVSRFLMYYKGADIATGSISGVNHDETYKARGVGIQSLREIKKCCIDVLGNISFASKEKRQTFR

SEQ ID NO: 921 - protein, 1131 aa, unidentified
  REGION 1..1131: note = Description of Unknown: Cas Enzyme sequence
MKYSLGLDIGTNSCGWSVINLDKKRIEDLGVRIFDGAENPKNGQSLATPRREKRGMRKRLHRRRIRLNFLKQFFVQQKILSRQQIESLLTPHKNQIDPYIVREKALSEKLTPEELFVALYHISKRRGYKSNRRTESSNDSSENKKTLSAITANQEFLKEYQTVAEALNHADKFKAHKRNKPDDYSNSFARADFENEITKILSKQAEFYPALNEENIKDLLYRPNFGVFFQRRFLTPKQIEEMRGKCQFEKDKPRAQRASYSFEFFRLASDLVHLTYNMGNKLTIDEIAACIEKAKELSVLKYSHIQKILAEDVEDEINFDYVRGLKRKDLIKDETEAKKKALEQKLGELKFYHAIKKALKDQPAEWKDIESNIELFDNIGFVLTANKEDDSVREELEKLGLKPSVIDGISNIKQSFAGFGHLSLEALRKITPFILQGETYDKAVVDAGYIFTAKLSGDSNRLSALSKEENNQITNPVVKRAISQSIKVVNAIILKYGAPTRLHIECASELAKSFEKRNEIIKTQDENRENNEKIIARLKDEFHVLSPTAMQIIKFKLYEQQDGKCLYSGSPIDLNRLFSDEHYCEIDHIIPKSRCGNDSMINKVLVLNQENQEKRNQTPFEAWGSDEKRWQSFIARVESNPKIFAKKRARLLAKTPPKEDWNARALNDTRYITRFLSNYFKQNLKFAEHTAGKKVVYTPTGNITSYLRHVWHIGKKDRSNNLHHAVDATITALVTDEVIRQCALMNKMIELGAKYVTKGINLANYQNGILAVTDPVTGEIVDLAKYEEVCESVLPWSNFDHEVRFRATPLACFIAENKEDKKKAEKKQLSDGAKAHLQNTSINTLAEWRDQFREIYKDQDEEFKNSIHPIFVSRMPKRKGTGSLHDDTIRSPKGILIDKKTGIISANPNRSSFIRKRLQDVKIADLENSILKQSDKVLYQQLKNLLEANDDDPKKAFKEPVYKNNVKIDKNGRPLSPVITIKINDDKNVKSGILLNHGTQFVNNGSMIRLDIYKKEIKGKNQLFYVPVYAHQVRKGSTRILPTTCGYDFVDETFIKLCSVYPNDYLIMKKGDEILQGYYIKYDITNAVIAFASNLIAGNSIFDRISCRSLSELHRLDISVLGDNYPWERLY

SEQ ID NO: 922 - protein, 1133 aa, unidentified
  REGION 1..1133: note = Description of Unknown: Cas Enzyme sequence
MNYSLGLDIGTTSCGWSVINLDKKRIEDLGVRIFEGAENPKNGHSLAEPRREKRGMRKRLHRRRIRLNFLKQFFIQQKILSSQQIESLLAPHKNQINPYTVREKALSEKLTPEELFIALYHIAKRRGYKSNSRAESSGDADENKKTLSAITANQVFLKEYQTVGEALNHAEKFKSHKRNKPNDYSNSFARADFEDEIKKILNKQSEFYPVLNEEKIQELLYSENFGVLFQRRFMTPELIEKMRGKCQFEKEKPRAQRASYSFELFRLASDLVHLTYNMGNKLTIDEIASCIEKAKELSVLKYSHIQKILAEDMEDEINFDYIRGLKRKDLLKDEAEVKKKALEQKFGELKFYHAIKKALKDQSTEWAEIESNIELFDNIGFVLTANKEDDSVRKELEKLGLKPQVIDSISNIKQSFSGFGHLSLEALRKITPFILQGETYDKAVVDAGYVFKAKLACGLNRLPALSKEENNQITNPVVKRAILQSIKVVNAIILKYGTPTRLHIECASELAKSFDKRNDIIKIQDENRENNEKLVVRLKEEFHILSPTALQITKFKLYEQQDGKCLYSGKQIDLNRLFSDEHYCEIDHIIPRSRCGNDSMINKALVLNQENQEKRNQTPFEAWGSDEKRWQNFIARVESNPKIDAKKRARLLAKTPPKEDWNARALNDTRYITRFLSNYFKQNLKFAEHMAGKKVVYTPTGNITSYLRRVWHIGTKDRSENLHHAVDAVITALVTDEVVRQCALMNKMIELGAKYKTKGINLADYQNGMLATTDPVTGEVVDLAKYEEVRESVLPWPNFDREVRFRATPLACFMVEDKENKKKAEEKKAQLSDDAKARLQNVSINTLAEWRDQFRDIYKDQDEKFKNSIHPIFVSRMPKRKGTGSLHDDTIRSPKGILIDEKTGIISANPNRSSFIRKKIQDIKLTDLENSILKQSDTVLYQQLKSFLEANGDDPKKAFKDPVYKNNVRFDKNGRPLSPVTTIKINDDKNVKSGISLNHGTQFVNNGSMARLDVYQKEIKGEKKLFYVPIYTHQVRRGSNRIIPTTCGYDFVDETFKKLCSVYPNDYLIMKKGDEVLQGYYIKYCINNSAISYISNIKEGRSDFVNATGRALSELYRLDISVLGDNYPWERMY

SEQ ID NO: 923 - protein, 1133 aa, unidentified
  REGION 1..1133: note = Description of Unknown: Cas Enzyme sequence
MKYSLGLDIGTNSCGWSVINLDKKRIEDLGVRIFDGAENLKNGQSLAAPRREKRGMRKRLHRRRIRLNFLKQFFIQQKILSRQQIESLLTPHKNQIDPYIVREKALSEKLTPEELFVALYHISKRRGYKSNRRTESSNDSSENKKTLNAITANQEFLKEYQTVAEALNHADKFKAHKRNKPDDYSNSFARADFENEITKILSKQAEFYPALNEENIKDLLYRPNFGVFFQRRFMTPELIEKMCGKCQFEKDKPRAQRASYSFELFRLASDLAHLNYNMGNKLTIDEIAACIEKAKELSVLKYSHIQKILAEDVEDEINFDYVRGLKRKDLIKDEAEAKKKALEQKFGELKFYHAIKKALKDQPAEWKDIESNIELFDNIGFVLTANKEDDSVREELKKLGLKSSVIDGISNIKQSFAGFGHLSLEALRKITPFILQGETYDKAVVDAGYIFTAKLSGDSNRLPALSKEENNQITNPVVKRAISQSIKVVNAIILKYGIPTRLHIECASELAKSFEKRNEIIKTQDENRENNEKIIARLKDEFHVLSPTAMQITKFKLYEQQDGKCLYSGSPIDLNRLFSDEHYCEIDHIIPKSRCGNDSMINKVLVLNQENQEKRNQTPFEAWGSDEKRWQSFVARVESNPKIFAKKRARLLAKTPLKEDWNARALNDTRYISRFLSNYFKQNLKFADHTEGKKVVYTPTGNITSYLRHVWHIGKKDRSENLHHAVDAVITALVTDEVVRQCALMNKMIELGAKYKTKGINLANYQNGMLAATDPVTGEIIDLAKYEEVRESVLPWPNFDHEVRFRTTPLACFITENTKDKKKAETDQLSEEAKTHLQNASINTLVEWRDQFREIYKDQDEEFRSSIHPIFVSRMPKRKGIGSLHDDTIRSPKGILIDEKTGIVSANPNRSSFIRKRLQDVKIADLENSILKQSDKVLYQQLKSLLEANDDDPKKAFKEPVYKNNVKFDKNGHSLSPVTTIKINDDKRVKSGISLNHGTQFVNNGPGSMVRVDVYQKDVNGEKKLFYVPIYTHQVRRGSNRILPTTCGYDFVNETFKKLFSLYPNDYLIMKKGDEILQGYYIKFDTDSARISYVSNLLAENSVSDRVSGRLLIEIYRLDISVLGDNYPWERMY

SEQ ID NO: 924 - protein, 1073 aa, unidentified
  REGION 1..1073: note = Description of Unknown: Cas Enzyme sequence
MSKPYLLSLDLGTSSIGYTTFALDEDNQPTDVTDLGVRIFSDGRDPKTKEPLAVSRRIARGIRRTRDRGQNRVRRLVKELIDFGLLPANEESRKVVFDKICPYEARHKAVNGKVDKETLARAIFHIGRRRGFKSNRLAGESEESDYKNKIKELRQELGENTLGEYLYAKLKENHKLAKAKRPIEQKVIRFRGGETDFYADRHMYDNEFHKIRAIQGNDHLADEQWDALHETAFWQYPLKPVPKGKCRFYPEETRAHIDLPISHQYRIFGEVNNLKYVSKGIEHELNERQRQALYSELNNKKTLSFKGMLKLKDVHKSPYFPSDATFNLDVKSRSGKLHGNKTMCDLRKPELLGELADELPSNKLNDIVHYLVEPLKKVNGKDVIVETPELKAWLKSKLPQLSDEQIRNLSKYRFKRDTPSVSRKFMEQINPVLEKTGLVYSDAVAQLEDEKGEKFHHSFIKPNTFDELPYYGVAMPESVWGDHSEIDKNKAPDERDEDAYQHGRIANPTVHVALNQLRVVVNDVIKKVGTTPSKIHIELTRDLKNSKEARKRIEQAQSKNKKKNDEIRKFLEEEFDIDNPHREDFQKIKLWEELGKQGARHCVFTGRTISARQLFNGEVEIEHIVPFSRCYDDGMVNKTLAYKNVNHRKGNKTPAEAFGGEEYEAILKRALASFGQGPKFERFKEDAFEHFYGEEKGTMIQRQINDTKYITRKAAQYLSCICTDVITVNGRLTAILRDVWQLNHFKDKETGHYRDDHRHHIVDAFVVGLTSRRLIKQLGTRRSKHEQSERNLYHFVKHRVDDIPHLKEQLMQALDNVYASYKPDHTDQGSMFNDTAYGIEYDDDGNQWCITRKAVGNLSWEEVFRIRGNRQRENLLDYLTDGQGIDFDVQSIRGFTKQLKEHFKNQKEFEKALQNYSEKTGIKKLRINVPNNSVKPIPSAPYKGYGLNGYAYCDVWQIPTKKDPKTGKWLYKYEGAFVPYAEIKKYKKKPKRPVDKQGRSHPAAKRLMRLYKDDNIQLTNLETGEIEVFRVAGYNTSVNCIDIRPNLQAVNTGQKFTSVNTIFQDHKVSRMKQ

SEQ ID NO: 925 - protein, 1110 aa, unidentified
  REGION 1..1110: note = Description of Unknown: Cas Enzyme sequence
MLAVEASVATIMAHRRTDGFYNKANNRKALPLPVLVIGGGILFVRRWLAMKYSLGLDIGITSVGWAVLNLDDRRIEDLGVRAFNAAEEPQTKAPLAEPRRTARGARRRLRRRAGRLRRAKDLFVQFGLIREDERESAFETGPNKRSPWQFRAEGLDRVLTGEEFARALFHMARHRGFKSNRKKVKGDEESKVVGPAIEGNRKLLEGGYRTAGEMLYRDEKFTDRKRNTTNWYENAVDRAMLEEEIKTLFIRQREFGSPFALPELERAFLEVFLWQLPFASGERILSMVGECTFIQGEKRAPKNAYHCERFNLLGKVNSLTYTTDGSRHRLTDEQRRALHDFAYSHAKVGYAQIRKLLSLPEEARFTGLDYIKRKKGEDPVESLDCEKKTFFELKGYHALHKASEKAGVWEQVGSNADLMDDLTHALTFYKTDEQIRDYLESSGVAAEIIGAAANCQGFTTTSNLSLAAIKRILPYLEQGMLYSEACKEAGFDHAKPEEYEKGPKLPTIGPDVTNNPVVRRALSQARKVVNAVIRRYGPPYRVHIELAREIGKSATDRREIQKWQNENRAENERLKDRVRQEFQREPTGENVLKFRLYSDQQCKCAYSQQKIDIERLFEPGYTELDHIVPYSRCFDDSRSNRGLVLTAQNRKKQNRTPFETFGHDAKRWAEFEGWVRTVIRDPRKRNNLLRKEVNEEAWKERSLQDTKYIAREFSRFVRRRLRFADPSVKVPVVCVNGRITARTRGLWGLQKAKDRDKDDLHHALDAAVVASLVQHQITLITEHARIVEVRGQDVDKDTGEIIQWEKGKKPRLPLPWKGFRKELLARLSEDPTEAIRQLQLPTYEGVTDLEPIVVSRMPQRKATGAIHKERIRSAKLVDTARKSAVRNPLTSLKPGDLENLACKATDPRLFEEICRRMEEHGGKADKAFAEPLHKPTNDGSPGPVVKRVKVCQAQYTGIKIRGGIANNDTIAWTDVFRKSGKYYLLPIYVSHVMARKLPDRLVPLKSGRAVDDSYEFLFALFPFDLVWVDEPRKGLKGFFHFRSTDVSDGRITVSLVNHAATTERFSSLSAKAIEKYEMSVLGEYRRIEKEVRRGLANGGDLGPGETEARE

SEQ ID NO: 926 - protein, 1053 aa, unidentified
  REGION 1..1053: note = Description of Unknown: Cas Enzyme sequence
MKNTSLNYVLGLDLGISSVGWAVVEIDEKENPLRLIDVGVRTFERAEVPKTGESLALARRLARSARRLTQRRVARLKKARRLLKSENILLSTDEHLPHQVWQLRVEGLERKLERQEWAAVLLHLIKHRGYLSQRKNESKSENKELGALLSGVANNHKLLQQTTYRTPAELAVKKFEVEEGHIRNQQGSYTHTFSRLDLLSEMELLFSRQQHFGNPFTSEKLLENLTALLMWQKPALSGDAILKMLGKCTFENEYKAAKHTYSAERFVWITKLNNLRIQENGLERALNDNERLALMKQPYEKAKLTYAQVRSILNLSDEAIFKGLRYSGEDKKTSETKTVLMEMKAYHQIRLALEKNDLKTEWAELKVNSSLLDEIGTAFSLYKTDEDISTCLAGKLSQPVLNALLENLNFDKFIQLSLKALHKILPLMQQGLRYDEACAEIYGDHYGKKTEENHLLLPQIPADEIRNPVVLRTLTQARKVINGVVRLYSSPARIHIETGREVGKSYQDRRELEKRQEENRKQREKAISEIKTLFPNFSGEPKAKDILKMRLYYQQNAKCLYSGKPLELHRLLEQGYVEIDHALPFSRTWDDSFNNKVLVLANENQNKGNLTPFEWLDGKNNSERWKAFKALVETSAFPYTKKQRILSQKLDEKGFIERNLNDTRYVARFLCNFIADNMHLTGEGKRKVFASNGQITALLRGRWGLAKSREDNDRHHALDAVVVACSTVSMQQKITRFVRFEEGNVFTGERIDRETGEIIPLHFPAPWKFFREEVEIRIFSDNPKLELENRLIARPQANHEFVQPLFVSRMPTRKMTGQGHMETIKSAKRLNEGLSVIKMLLTKLRLKDLESMVNREREKELYEALKARLEAFNDEPAKAFAEPFMKKGGAIVKSVRVEQVQKSGVLVRDGNGVADNASMVRVDVFTKGGKYFLVPIYTWQVAKGILPNKAVIQGKNEEDWEVMDDATFRFSLHQNDLVKLVTKKKTIFGYFNGLNRATGNIDIKEHDLEKSKVKDGIHQSIGIKLALSFEKYQVDELGKNIRLCKPSKRQAVR

SEQ ID NO: 927 - protein, 1054 aa, unidentified
  REGION 1..1054: note = Description of Unknown: Cas Enzyme sequence
MENKNLHYILGLDLGIASVGWAVVEIDEKENPLRLIDVGVRTFERAEVPKTGESLALSRRLARSARRLTQRRVARLKKAKRLLKSENILLSTDERLPHQVWQLRVEGLDRKLERQEWAAVLLHLIKHRGYLSQRKNESKSENKELGALLSGVASNHELLQQATYRTPAELAVKKFEVEEGHIRNQQGAYTHTFSRLDLLAEMELLFSRQQHLGNPFTSEKLLENLTALLMWQKPALSGEAILKMLGKCTFEDEYKAAKNTYTAERFVWITKLNNLRIQENGLERALNDNERLMLIEQPYEKAKLTYAQVRSILNLSDDAIFKGVRYSGEDKKAIETKTTLMEMKAYHQIRKVLEGNNLKAEWAALKANPTLLDEIGTAFSLYKTDEDISAYLAGKLSQPALDVLLENLSFDKFIQLSLKALYKLLPLMQQGLRYDEACAEIYGDHYGKKTEENHHFLPQIPADEIRNPVVLRTLTQARKVINGVVRLYGSPARIHIETGREVGKSYKDRRELEKRQEENRKQRENAINEFKEYFPHFTGEPKAKDILKMRLYKQQNAKCLYSGKPIELHRLLEKGYVEVDHALPFSRTWDDSFNNKVLVLASENQNKGNLTPFEWLDGKHNSERWRAFKALIETSAFPYAKKQRILSQKLDEKGFIERNLNDTRYVARFLCNFIADNMHLTGEGKRKVFASNGQITALLRGRWGLAKSREDNDRHHALDAVVVACSTVAMQQKITRFVRFEAGDVFTGERIDRETGEIIPLHFPTPWQFFKQEIEIRIFSDNPKLELENRLPDRPQANHEFVQPLFVSRMPTRKMTGQGHMETVKSAKRLNEGISVIKMPLTKLKLKDLEWMVNREREKDLYNALKARLEAFNDDPAKAFAEPFMKKGGAIVKSVRVEQVQKSGVLVREGNGVADNASMVRVDVFTKDGKYFLVPIYTWQVAKGILPNRAVIAFKHEEEWEFMDENATFKFSLHQNDLVKLITKKKTIWGYFNGLNRATGNIDIKEHDLDKSKGKQGIFEGVGIKLALSFEKYQVDELGKNIRVCKPSKRQPVR

SEQ ID NO: 928 - protein, 1055 aa, unidentified
  REGION 1..1055: note = Description of Unknown: Cas Enzyme sequence
MENKNLHYILGLDLGIASVGWAVVEIDEKENPLRLIDVGVRTFERAEVPKTGESLALSRRLARSARRLTQRRVARLKKAKRLLKSENILLFTDERLPHQVWQLRVEGLDRKLERQEWAAVLLHLIKHRGYLSQRKNESKSENKELGALLNGVDNNHKLLQQATYRTPAELAVKKFEIEEGHIRNQQGAYTHTFSRLDLLAEMELLFSRQQHFGNPFASEKLLENLTALLMWQKPALSGDAILKRLGKCTFEDEYKAAKNTYTAERFVWITKLNNLRIQENGLERALSDNERLMLIEQPYEKAKLTYAQVRSILNLSDEAIFKGVRYFGEDKKAIEIKTILMEMKGYHQICNALKGNNLKAEWAELKENPALLDEIGTAFSLYKTDEDISAYLAGKLSQPVLNALLLKNLSFDKFIQLSLKALYKLLPLMQQGLRYDEACCEIYGDHYGKKTEETHHFLPQIPADEIRNPVVLRTLTQARKVINGVVRLYGSPARIHIETGREVGKSYKDRRELEKRQEENRKQRENAIKEFKEYFPHFAGEPKAKDILKMRLYKQQNAKCLYSGKPIELHRLLEKGYVEVDHALPFSRTWDDSFNNKVLVLANENQNKGNLTPFEWLDGKHNSERWRAFKALVETSAFPYAKKQRILSQKLDEKGFIERNLNDTRYVARFLCNFIADNMRLTGEGKRKVFASNGQITALLRGRWGLAKSREDNDRHHALDAVVVACSTVAMQQKITRFVRFEAGDVFTGERIDRETGEIIPLHFPTPWQFFKQEVEIRIFSDNPKLELKNKLPDRPQANHEFVQPLFVSRMPTRKMTGQGHMETVKSAKRLNEGISVIKMPLTKLKLKDLELMVNREREKDLYDALKARLEAFNDDPAKAFAEPFMKKGGAIVKSVRVEQVQKSGVLVREGNGVADNASMVRVDVFTKDGKYFLVPIYTWQVAKGILPNKAIVALKDENEWIEIDNNYIFLFSLYQNDLIKVKTKKDKFWGYFNGLNRHTGGINIRTHDLEKSKGKQGIFEGIGVKTALSFEKYQVDELGKNIRLCKPSKRQAVR

SEQ ID NO: 929 - protein, 1048 aa, unidentified
  REGION 1..1048: note = Description of Unknown: Cas Enzyme sequence
MENKNLHYILGLDLGIASVGWAVVEIDKKENPLRLIDVGVRTFERAETQKGESLALSRRSARSARRLTQRRVARLKKAKRLLKSENILLSTDERLPHQVWQLRVEGLDRKLERQEWATVLLHLIKHRGYLSQRKNESKSENKELGTLLSGVASNHELLQQATYRTPAELAVKKFEVEEGHIRNQQGAYTHTFSRLDLLAEMELLFSRQQHFGNPFASEKLLENLTALLMWQKPALSGEAILKMLGKCTFEDEYKAAKNTYTAERFVWITKLNNLRIQENGLERVLNDNERLMLIEQPYEKAKLTYAQVRSILNLSDDAIFKGVRYSGEDKKAIETKTTLMEMKAYHQIRKVLEGNNLKAEWVALKANPTLLDEIGTAFSLYKTDEDISAYLAGKLSQPVLNALLENLSFDKFIQLSLKALYKLLPLMQQGLRYDEACREIYGDHYGKKTEETHHFLPQIPADEIRNPVVLRTLTQARKVINGVVRLYGSPARIHIETGREVGKSYKDRHELKKRQEENRKQREKTISEIKTLFPNFSGEPKGKDILKMRLYYQQNAKCLYSGKPLELHRLFEQKYVEVDHALPLSRTWDDSFNNKVLVLANENQNKGNLTPFEWLDGKNNSERWRTFKALVETSAFPYTKKQRILSQKLDEKGFIERNLNDTRYVARFLCNFIADNMHLTGEGKRKVFASNGQITALLRSRWGLAKSREDNDRHHALDAVVVACSTVAMQQKITRFVRFEAGDVFTGERIDRETGEIIPLHFPTPWQFFKQEVELRIFSDNPKLELENRLPDRPQANHEFVQPLFVSRMPIRKMTGKAHEETLRSPKKLSEGKSIKKERLSNLKLTDLERMVNKEKEPELYQSLKEHFSKYGDYSKEKFFKKGGTEVKSIRLYKTQNKYVELNNGKTIADNGDIVRVDVFKKEKKYHAVNIYAWQVAKGILSKETSTGLFLDDNYIFQFSLFKNDLVKIPNPNNKSEYLFAYFIRPDDEPRWILKLQDNAIIPDGFSKKEKNSFRFSFQNQSFIEKYHIDELGKNINLCKRSKRLDVR

SEQ ID NO: 930 - protein, 1052 aa, unidentified
  REGION 1..1052: note = Description of Unknown: Cas Enzyme sequence
MENKNLHYILGLDLGIASVGWAVVEIDEKENPLRLIDVGVRTFERAEVPKTGESLALSRRLARSARRLTQRRVARLKKAKRLLKSENILLSTDERLPHQVWQLRVEGLDRKLERQEWAAVLLHLIKHRGYLSQRKNESKSENKELGALLSGVDNNHKLLQQATYRTPAELAVKKFEIEEGHIRNQQGAYTHTFSRLDLLAEMELLFSRQQHFGNPFASEKLLENLTELLMRQKRALSGEAILKKLGKCTFEDEYKAAKNTYTAERFVWITKLNNLRIQENGLERALSDNERLMLIEQPYEKAKLTYAQVRSILNLSDEAIFKGLRYSGEDKKAIETKTTLMEMKAYHKIHNVLKNNNLKAEWAELKANPTLLDEIGTAFSLDKYKTDEDISAYLAGKLSQPVLNALLLENLNFDKFIQLSLKALYKLLPLMQQGLRYDEACREIYGDHYGKKTEENHHFLPQIPADEIRNPVVLRTLTQARKVINGIVRLYGSPARIHIETGREVGKSYKDRRELEKRQEENRKQRENAINEFKEYFPHFAGEPKAKDILKMRLYKQQNAKCLYSGKPIELHRLLEKGYVEVDHALPFSRTWDDSFNNKVLVLANENQNKGNLTPFEWLDGKHNSERWRAFKALVETSAFPYAKKQRILSQKLDEKGFIERNLNDTRYVARFLCNFIADNMLLTGKGKRKVFASNGQITALLRGRWGLAKSREDNDRHHALDAVVVACSTVAMQQKITRFVRFEAGDVFTGERIDRETGEIIPLHFPTPWQFFKQEVEIRIFSDNPKLDLENRLPDRPQANHEFVQPLFVSRMPIRKMTGKAHEETLRSPKKLSEGKSIKKERLSNLKLTDLERMVNKEKEPELYQSLKEHFSKYGDYSKEKFFKKGGTEVKSIRLYKTQNKYVELNNGKTIADNGDIVRVDVFKKEKKYHAVNIYAWQVAKGILSKETSTGLFLDDNYIFQFSLFKNDLVKIPNPNNKSEYLFAYFIRPDDEPRWILKLQDNAIIPDGFSKKEKNSFRFSFKNQSFIEKYHIDELGKNINLCKRSKRLDVR

SEQ ID NO: 931 - protein, 1054 aa, unidentified
  REGION 1..1054: note = Description of Unknown: Cas Enzyme sequence
MENKNLHYILGLDLGIASIGWAVVEIDEKDNPLRLIDVGVRTFERAEVPKTGESLALSRRLARSARRLTQRRVARLKKAKRLLKSENILLSTDERLPHQVWQLRVEGLDRKLERQEWAAVLLHLIKHRGYLSQRKNESKSENKELGALLSGVASNHELLQQATYRTPAELAVKKFEVEEGHIRNQQGAYTHTFSRLDLLAEMELLFSRQQHFGNPFASEKLLENLTALLMWQKPALSGEAILKMLGKCTFEDEYKAAKNTYSAERFVWITKLNNLRIQENGLERALNDNEHLMLINQPYEKAKLNYAQVRSRLNLSDEAIFKGVRYSGEDKKAIETKTTLMEMKAYHQIRKVLEGNNLKAEWAELKANPTLLDEIGTAFSLYKTDEDISGYLAGKLSEPVLDVLLENLSFDKFIQLSLKALYKLLPLMQQGLRYDEACSEIYGDHYGKKTEENHHFLPQIPADEIRNPVVLRTLTQARKVINGVVRLYGSPARIHIETGREIGKSYKDRRELEKRQEENRKQRENAIKEFKEYFPHFAGEPKAKDILKMRLYKQQNAKCLYSGKPIELHRLLERGYVEVDHALPFSRTWDDSFNNKVLVLANENQNKGNLTPFEWLDGKHNSERWRAFKALVETTAFPYAKKQRILSQKLDEKGFIERNLNDTRYVARFLCNFIADNMRLTGEGKRKVFASNGQITALLRGRWGLAKSREDNDRHHALDAVVVACSTVAMQQKITRFVRFEAGDVFTGERIDRETGEIIPLHFPTPWQFFKQEVEIRIFSDNPKLELENRLPDRPQANHEFVQPLFVSRMPTRKMTGQGHMETVKSAKRLNKGISVIKMPLTKLKLKDLELMVNREREKYLYDTLKARLEAFNDDPAKAFAEPFIKKGGAIVKSVRVEQIQKSGVLVREGNGVADNASMVRVDVFTKGGKYFLVPIYTWQVAKGILPNKAIVALKDENEWIEIDNNHIFLFSLYQNDLIKVKTKKDELFGYFNSLNRATAAIDIKVHDLDKSKGKNGIYQSVGVKLALSFEKYQVDELGKNIRLCKPSKRQAVR

SEQ ID NO: 932 - protein, 1058 aa, unidentified
  REGION 1..1058: note = Description of Unknown: Cas Enzyme sequence
MENAHLTYILGLDLGIASVGWAVIEIDQQENPLRIIDVGVRTFERAEVPKTGDSLALERRLARSTRRLIRRRAHRLLRAKRLLKREGLLRAEDFSSPTELQNLPINAWELRVKGLTHKLERKEWSAVLLHLIKHRGYLSQRKNESKTDNKELGSLLKGVKENHRLLQSNDYRSPAELAVKKFKEDTGHIRNQRGEYTHTFDRLDLHSELQLLFNIQRELGNPYTSISLEQQVSALLMSQKKALSGEAVLKMLGKCTHEKTEYKAAKNTYSAERFVWLTKLNNLRILENGTERGLTESERQLVINQPYEKSKFTYAQLRKLLELSDNAIFKDLRYIKDNVESAILMEMKAFHAIRKALENNGLKTEWQGLATKPELLDEIGTAFSLYKTDEDITKYLNNKLPKPVLDALLNNIGFDKFIQLSLQCLRKILPLMEQGQRYDEACKAIYGDHHDKQRREENLYLPQIPTDEIRNPVVLRTLSQARKVINGVIRLYGSPARVHIETGREVGKSFQERHEIKKRQDENRNQRESAVKKFKEFFPDFSGEPKTQDILKMRLYELQQGKSLYSGKEIDLTRLLENNYVEIDHALPFSRTWDDSLNNKVLVFKNENQNKGSQTPYEWLGGEENSERWKMFVALVNGSRFSYTKKQRILVQKLDEDGFKKRNLNDTRYVARFLCEFITNNMLLLGKDKNKVFASNGQIAALLRRRWGLSKNREENDRHHAVDAIIVACSTVSMQQRITNFVRFKEGNVFTGELTNRKTGENIPIHFPEPWKYFRQEVEIRVFSDTPKEDLIIQLPDRPQANHEFVQPLFVSRAPNRKMSGQGHLETVKSAKRLDEGISILKVPLTQLKPSLLENMVNRERESELYKALKTRLNQFKDDPAKAFAEPFYKKGGQQVKAVRVEMVQKTGVLIHNGKGVADNASMVRVDVFTKNGKYYLVPIYTWQVAKGILPNKAIIANKDESQWDEIDDSFKFEFTVYPNDLIKVITKKETFFGYYSGCDRATAAISIKEHDLEKTKGKDGLHRGLGVKTAVSFEKYQVDELGKNIRLCRPGKRQNVR

SEQ ID NO: 933 - protein, 1068 aa, unidentified
  REGION 1..1068: note = Description of Unknown: Cas Enzyme sequence
MSDSNFYSPYVLGLDLGSNSIGWALIKLDNDDNPCGIEKVGVRVFEAGMEGQYESGKEESRNKKRRDARLVRRQIERRARRYRRLANVLQQIKLLPEGNLNDSLERKNIIDNLDVELRKMYIKEDLPEYEKNRLNQIFLYYLRSLAVGQKLEPYALGRVLYHLGQRRGFLSNRRGQKKDDEEKGKVKEGIAEIRKEMACLGARTLGEYFAKIDPIAEQKRIRGRWTARDMYEQEFYTIWDQQAQFYPDILNDENKKLVFKTIFYQRPLKSQKEKIGFCQFECIARGGQRNRRRAPWVILKAQRFRLLQKVNDLEIKEDKFNKRPLTGEERKVVIDYLEKNGDTTFAQLRKILSLPKTVKFNLEEGGEKKIPGNKTASAIRNVIGERWDNMNAEERDKLVEDIYSIVNNKALERRLIKHWKFSEEEALQISEMIIEDSYCNLSRQAIDKFLPGLEEGRRYGELVKEIYGMDNVRDEFKVDLLPPLEEAPIGEIRNPTVTRTLAEMRKIVNELVKRYGKPRFIRIESAKDLRNTKKEREKIWKNNRDLEENRNKIRQELINRGIPNPTRSDIEKYMLAEECGWKCPYTGRPINGFNALFGSEPQFDIEHIIPLSRCLDDSFKNKTLCYHEENRTRKHNKTPYEVYAFDESRWEAILGRVEKFNSHCAAEKLRRFKLHGKALEDFIDKFSSSQLNDTRYASREACMYCGLLYGSEYRKHIFAVSGSATSVIRRMWDLNKILGSPEKNREDHRQHAIDAIVIAITSPSMVKRISEQAENIPIKERKNKNWWRFIEPPWATLSKEAEEKVLSIIVSHRPERKVSGRLHEETNYSPPKIDENGETVVHVRKSLSNISKGEIDDIVDPIVRKAVQDKLIELGGDPKKAFADPMNYPLMPNKKGLQIPIKSVRVKKKVPVFPVGEKERVRYVTSDENHHIEIFETKDKKGRTVWDANVVSMFEAMQRKKRGEEIIQRKLIRDGKEVEDAKFLFSLCKGDIVFMKDIKDESKYEYFKLIKMDINCVLMFLPIYMARIPEKNGKKDFTGLTRRLSSLLSSEAKKHSVNILGESQIAHD

SEQ ID NO: 934 - protein, 1138 aa, unidentified
  REGION 1..1138: note = Description of Unknown: Cas Enzyme sequence
MNKERIILGLDIGVGSIGWGLVKIKEEEYCDEKADGTIDKKYRITDGKIIDKGVRTFQIPQDRQKKSLALKRGNARRSRRTTRRKAKRIKNLVKLATEFNLIENNFNRDAILKPKKGDKECNWDIWTIRKEALERKLSDTELFRILYHIAKHRGFHFHTKAEFLPTEEDEQKIGKKEKKEAETNEKEKEDKKVKKGLRRIQKMLKDGGYKTVGQMFCEKFKQTDKKNKRKRNAKDKYENAIHRNLLKEEIEIIFDEQQKLKNSKSTEELKQRYINEVLMSEEGIDDNRLQNMMSRCEFVPGELCAPKEGYTSERFTLFNRLNTMELVDTQNSDKHLPLDDEQRKKIEALAYKNNKVTFAQIRKELELENDLDKRFNLCSYREKNPEYNKKLECKVNNRKLDFEEKHKLQIVNTVTGEITVLDKEIKGIFKKRKETWKNAKNLYVYYYDIRKQLKIPDDFRFSGLKGYTQSESELVSKAKYIQQFEDKDTFVELKGYHKIRKSMESCGEGKWDELKEDTKKLDIIAEALVYHKSDETRTKYLKEKGITDKDIIEAALTIGMKQLANHSKEALGNLLKYMDSEQRMLFNDAKEKCGYGKIDYDKQAILQPYHGFFENNPAVARVISQTRKLVNALLRKYKKQYTIDQIHIEVAKELASSEKRKNQIRQGQNRYREDKKAAAERCREWNLDPEEGQNLLMFRLAEQQNNKCPYTNKTITFYTTGADDEVYVKDCEIDHITPMSRSFNDSLNNKVLCSPEANQNKTDRIPFEWFEDIYGKDSKQWIEFKHRVEKMYGIPYPNGIPYPKRKNLLRISWTEKDKEKFLSRNLNDTRYATRHIADYLRKYFDFSMSKRDDIKDVSRIQLRSGGITAFLRHMWGLNKNREENDLHHAIDALVVACSTYGHVYLVSNLAKQIERKGKNWYKHFGRDKFKPWDSIRDDIQSAVNNIFVSRMPRHTVTAAAHKDTVISKETTTSKRVIEINRGYAEMGDMVRADVFVDEDGRYYAVPIYSVDIFTNKPLPDKYVPHDKTIPYAQWPSIFENNLKFKFSLFKDDLIGINDNMCYVSFFEATTVNINVENVNGSIFPDKKNAQDPYIKKIGYRPKSRTRKFILKKCSVDILGNYKEVKQENRLGNRFQNGV

SEQ ID NO: 935 - protein, 1113 aa, unidentified
  REGION 1..1113: note = Description of Unknown: Cas Enzyme sequence
MSKERITLGLDIGVGSIGWGLVKIREEEYRDEKEDGTIDKKFRITDGKIIDTGVRTFQIPQDRQKKSLALQRGNARRSRKTTRRKAQRLKKIIKLAKEFNLIDNNFSRDEILKPQKGDKEAKWDIWFIRKKALEAKLTDTELFRVLYHIAKHRGFFFHTKAEEIQEEDSKYEAGEVKKGLARIRKKLEDGGWETIGQMFCDEFKQTNKKYKRKRNTQDKYENSIHRSLLREEIEKIFEEQQKLGNSKATEELKQRYIDEILMYEEGIDDNKLQKMMSKCEFTGRLCAPKEGYTAERFTLFNRLNTLGLVGTQSKDKNLPLDDKKRKKIKALAYKKSKVTFHQVRKELGLENDLDIKFNLCLYKEKDPEYNKKLTCKIKSGRLQFEEKHKVQLVNINTGELTVLDEEIQGIFKKKKLWPNSKNVYVYYSDIRKQLSISSDFRFAELKGYTKSVAELGSEAEYIKQFEKDDTFVELKGYHKIRKAVENFDDGKWEALKKDTEKLDIIAEALVYYKSDETRAEYLKENGIIDEEIINAALSINMKQLANFSKETLSNLLKYMDSEDRMLFNDAKEKCGYGRIDYKKHAILEPYRGFFENNPVVARVISQTRKLINALVRKYQKQFPIDQIHIEVATELASSEKRKNQIRQGQNRYREDKKAAAERCREWKLDPEEGQNLLMFRLAEQQNNKCPYTGKAITFYPTGAENEVYIKDCEIEHIIPMSRSFNDSLNNKVLCSPEANQNKRDRIPFEWFEDGYGKDSLQWMEFENIVKKMYGMPYPKRRNLVRKSWTEKDKERFLSRNLNDTRYAARHIADYLRKYFDFSKSQRDDIKDVSRIQLRSGGVTSFLRHMWGLNKNRGENDLHHAVDALVVACSTYGHVYLVSNLAKQVERKGKNWYKHFGRDKFKPWDNIRDDIQAAVNKIFVSRMPRHTVTAAAHKETILSKAEATKKRVIEINKGYAEMGDMVRADVFVDDAGKHYVVPIYTTDIFTNKPLPDKYVPHYRTITYEQWLRIFDNNLKFKFSLFKDDLISINDKMYYVSFFEATTVNINVENVNGSVFPDKKNAQDPYIKKIGYRPKSRTRKCILKKYSVDILGNYREVKQEKRLGNRFKNIV

SEQ ID NO: 936 - protein, 904 aa, unidentified
  REGION 1..904: note = Description of Unknown: Cas Enzyme sequence
LLKEEIETIFDKQQELRNPKAKKEFKQRYIDEILMKEEGIDDDKLQKMMSHCEYIKDKLCAPKESYTAERFTLFNRLNTLELVDTNNKEMHLSLDDNQREKIEALSYKNAKVTFTQIRTELGCQDDLHIRFNLCSYSEKNPEYNKRIECEIKKGQLEFEQKHKVPIVDINSGEIRVLDGEIKKIFRSKKLWPNSKKIHVYYSDIRKQLNRPGDFRFADLKGYTKSASELGSDAKYIKQFEDATFIELKGYHKIKKAVIDHCGDKKWAELSANTNNLDIIAESLVYHKNDETRTVYLKNNGIIDKETIDATLTINMKQLANYSREAIEKLLVYMEKRDLFNEAKEKAGFGKIEFNKQAILKQYSGFFENNPVVARVISQTRKLINAIKRKYNEKYPIDQIHIEVATELASSEKRKIQIMQGQNRYRESKEAAIERCREVGLDPEEGQNLLMFRLAEEQNYFCPYTRTKITLYPTGAVNEVYIKDCEIDHVIPMSRSFNDSLNNKVLCKQKANQDKRDRIPFEWFVEMYGKDCRQWTEFENTVKKMYGMPYPKRRNLTKKSWTEEDKDRFLSRNLSDTRYAEKHIANYLRKYFDFSKSLRDDIIDVNRIQVRSGGITAFLRHMWGLNKDRGENDLHHAIDALVVACSTYGHVYLVSNLSKEIERKGKNWYKHFGKDKFKPWGNVRKDIQAAVDNIFVSRMPRHTVTSSAHDENPESLVEERRIKKERKKNPKKKIDSMPIKNRIIKFNCGYAEMGDMVRTDVFVDKDEKNYVVPIYSVDIFSNKPLPDKYVPHERTLPYEQWPSICNNDLKFKFSLFKDDLISINDKMYYISFFEASTVNVNVKKIDGSIFPGKKNAKDPYTKKMGYRPKRRGKKCVLKKYSVDMFGNYNEIKQEKRLGNKFEHQK

SEQ ID NO: 937 - protein, 1113 aa, unidentified
  REGION 1..1113: note = Description of Unknown: Cas Enzyme sequence
MNKERIVLGLDIGVGSIGWGLVQIREEEYCDEREDRTIDKKYRITDGKIIDMGVRTFQIPQDRQKKSLALQRGTARRSRKTTRRKAQRLKKLIKLAKEFNLIDNNLNRDEILKPQKGDKEAKWDIWFIRKKALEEKLSDIELFRVLYHIAKHRGFFFHTKAEEIQEEDSKSETGKVKAGLSRTRRKLEGSNWKTVGQMFCDEFKQTNKKYKRKRNTQDKYENAIHRSLLKEEIEIIFDKQQKLGNSRAKEELKQRYIDDILMKEEGIDDKRLQKMMSKCEFIPGKLCAPKESYTAERRSLFDRLNTLELVDTKYRDKNSSLDKGQRDKIIALAYKNAGGVKFAQVRTELGLQDDLHMRFNLCSYSEKNPEYNKKLVCNIKDGRLDFEEKHKLQIVDINTGETKALDKEIKEIFKKRKETWKNAKKLYVYYSDIRKQLNIPDDFRFAELKGYTKSAAELGSESKYIKQFEDDTFIELKGYHKIRKAVENCDKNKWDELAGDTNKLDIIAEALVYHKSDETRTDYLKENGIIDEDIINAVLTINMKQVANHSKEALKKLLEYMETGDLFHEAKEKAGFGGIEYEKQAILKPYGGFFENNPVVARVISQTRKLVNALVRKYQKQFPIDQIHIEVATELASSEKRKNQIRQGQQRYREAKEAAAARCREWKLDPEEGQNLLMFRLAEQQNYFCPYTGTKITLYPTGAVNEVYIKECEIDHILPMSRSFNDSLNNKVLCSPEANQNKRDRIPFEWFEDIYGKDSLQLMEFENRAKKMYGMPYPKRRNLIRKSWTEKDKEQFLSRNLNDTRYATRHIADYLRKYFDFSKSQRDDIKDVSRIQLRSGGITAFLRHMWGLNKNRGENDLHHAVDALVVACSTYGHVYLVSNLAKQIERKGKNWYKHFGRDKFKPWDNIRDDIQADVDKLFVSRMPRHTVTAAAHKETILRKAEATKKRVIEINRGYAEMGDMVRADIFVDEAGENYVVPIYSIDIYTNKPLPDKYVPHDRTIPYEQWPSIFDNDLKFKFSFFKDDLISINDKMYYVSFFEATTVNVNVKNIDGSVFPNKKNTKDPYTKKIGYRPKSRTKKCVLRKFSVDILGNYKEVKQEKRLGNRFENRN

SEQ ID NO: 938 - protein, 1108 aa, unidentified
  REGION 1..1108: note = Description of Unknown: Cas Enzyme sequence
MINQKNILGLDIGIGSVGWGLVQLSEEKYMDEKADGTVLEKYKICDGKIIDTGVRTFQVPQDRQKKSLALKRGLARRSRKTIRRKARRLKSLVKLAREFNLITGDFNHDNVLKPKKGDKEKKWDIWFIRKEALERKLTDKEFFRVLYHIAKHRGFYFHTKSEELKKEEKGSETGKVKAGLIRIRNKFEDSNWKTVGQMFWEEFNQINTENKRKRNAKDKYQNSIPRLLLKEEIKAIFKRQKELRNPKAKEKFKLRYIDEILMNEESIDEYRLQKMMNKCEFIKDELCAPKESYTAERFTLFNRLNTLELVDTNNKDRHLALDDTQRNKIEALSYKNTKVTFAKIRTELGLQDDLHIRFNLCSYSEKNPEYNKRIECEIKKGQLQFDQKHKVPIVHINSGEIRALDREIKKIFHSKKLWPNSKKIHVYYSDIRKQLNLSDDFRFADIIRGYTKSVSELGSEAKYIKQFEKDTFVELKGYHKIKKAVVEHDSENKWAELAADTNSLDIIAEALVYHKSDKTRTEYLEQNGFVDKDIIDAVLTINMKQLANYSIEAIRKLLVFIEKGDLFNDAKEKAGFGKIEYEKQPILKPYNDFFENNPVVARVISQTRKIVNAIVRKYNSKYPIDQIHIEIATELASSEQRKIKIQQGQNRYREDKEAASERCREAGIDPEEGQNLLMFRLAEQQNYFCPYTGTKITLYPTGAANEVYIRDCEIDHVIPMSRSFNDSLNNKVLCTQKANQDKRDRIPFEWFEEMYGKDCRKWAEYEYTVKKMYGMPYPKRINLLRKSWTDKDKEKFLSRNLNDTRYAEKHIANYLRKHFDFSKSLRDDIKDVNRIQVRSGGITAFLRHMWGLNKNRSENDLHHAIDALVVACSTYGHVYLVSNLSKAIERKGKNWYKHFGRDKFKPWTNIRDDIQDAVDNVFVSRMPRHTVTASAHKDTIISKGKANKKRIIEINSGYAEMGDMVRADMFVDKDGKNYIVPIYTIDIFSNKPLPEKYLNKNNASYDQWPSINEGKLKFRFSLFKDDLISINNQMYYVDYTRATRSKISIKKVDGSLINKMKGEKTKETGYRNVELKKYSVDMLGKYKEIKQEKRLSNRFEHQNKALQN

SEQ ID NO: 939 - protein, 1131 aa, unidentified
  REGION 1..1131: note = Description of Unknown: Cas Enzyme sequence
MSNEKVVLGLDIGIGSVGWGLVKLREEKYTDEKPDGTIEEKYKISDGKIIDTGIRAFQPPQDRQKKSLALQRGSARRNRRTTRRKVQRLKRLIGLAKEFNLITDGFNRDGILKPKKGDKEDKWDIWLIRKQALERKLTDTELLRVLYHIAKHRGFYFHAKSEFLPEEDEKKLNKDKKQEAEKNEKEKESGKVKQGLRRIKKMLKDGGYQTVGEMFYEKFKQTNPDSKRKRNAADKYANSIYRPLLRDEISKIFECQQKFRDSKAKDELKRRYIDEILMYEEKIDEDKLRKMMSRCEFTGGLCAPKESYTAERFILFSRLSTLELIDTQNKDKHSQLDKDQRDTIIALAYKNAGGVTFAQIRTELGLEDNLHIRFNLCSYREKNPEYNKKLECKIKNGQLEFDEKHKIPIVEVDTGEVKVLDDEIKKIFKGKKLWGNRQKMHIYYSDIRQQSNLSENFRFANLKGYTKSAAELGSDTEYIKQFEKDDTFVELKGYHKIKKAVEENGGTEKWEELSKDTTKLDTIAETLTYCKRDETRTEYLHQHNITDKEVIDAVLTINMKQLANFSKEALTSILRYMDSENRMRFNEAKKECGYGKIDHKKQVILDPYRGFFEKNPVVARVISQTRKLINAILRKYNDKYPIDQIHIEIATELANSEKRKNEIAQGQRRYKDDKKAAEERCKEFNLDPEQGQNLLMFRLAEQQNNKCAYTGKAITFYQTSADNEVYIKDSEIDHIIPMSRSFNDSLNNKVLCTQKANQDKRDRIPFEWFEDTYGKDSQQWAEFENTVKKMYGMPYPKRKNLIRKSWTEKDKEKFISRNLNDTRYAARHIADYLRKYFDFSISERDDIKDVSRVKVRTGGVTAFLRYMWGLNKDRKGSDLHHALDALVVACSTDGHVYLVSNLAKEIERKGKSWYRHFDFIRDKFKPWDNIREDIQKTVANVFISRMPRHKATAPAHKDTIFSFKKTPTKNRVIEINAGYAEMDEMVRADVFTDDKGKNYVVPIYAVDIFQNKPLPDKYLHKNDAPYDEWPSAAADNLKFKFSLFKDDLISIDGKMYYVDYVRATRTKISVKEPDGSFIDKTKEEKTKEIGYKNVELKKYSVDMLGNCKEVKQEKRQANRFEKNEKRISDQG

SEQ ID NO: 940 - protein, 1137 aa, unidentified
  REGION 1..1137: note = Description of Unknown: Cas Enzyme sequence
MDNEKVVLGLDIGVGSVGWGLVKLAEEKYTDEKPDGTSYERYRITDGEIIDTGIRAFQLPQDRQKKSLALQRGSARRSRRTIKRKARRLKQLIRIAQEFNLISEDYNRDQALIPQKGDKKEKWDIWRFRKEALERKLTDDELFRVLYHIAKHRGAYFHTKAEFLPEEDEKKLSKNKKQETEESKEGNEKEKVKKGLGKIQKLLRDSGYKTIGALFYETFKNERKRNAPDKYEHSIRRELLRDEIIEIFKEQQRLGNLKAKEELKQRYIEDILMKEEGVDDEKLQKMMSTCEFVPGKKCAPRESYTAERKMLFDRLNTLGLVDEQNRNGRLPLDKGQRDKIIALAYKNAKVTFAQIRTELELQDKLHLRFNLCSYREKDPEYNKKIKCDVKGGLLQFEEEHKVPIVDIETGEIKILAQEIRDILQKKLKPNYTHVTLYYSDIRKELQNLADFEIPDFRFVDLKGYTKSAAELGGEAKYIKQFEDDTFVELKGYHKIKHAIEGKCGSEKWGQFSNDIAKLDTIAEALTYCKSDETRREYLRGKDISDEGIIEAVLTINMKQLANHSKEALSNLLRHMETGALFNDAKEKCGYGKIEYDKQAILKPYSGFFEKNPVVARVISQTRKLINAIVRKYNNEHPIDQIHIEVATELANSEKRKNEIAQGQKRYKDEKKAAEERCKEAGLDPEEGQNLLMFRLAEQQRQLCPYTGKHITFQPTGTSNEVCIRDCEIDHAIPMSRSFNDSLNNKVLCAPEANQNKTDRIPFEWFEDMYGKDSVQWRDFENTVKKMYGMPYPKRKNLIRKSWTEEDKEKFLSRDLNDTRYAARHIADYLRKYFDFSKSKRDDINPLSRIQVRSGGITAFLRHMWGLNKDREVNDLHHAVDALVVGCSTYGHVYLVSNLAKEIEIKGKNWYKHFGRDKFKPWANIREDIQNKVNNVFISRMPRHKVTAAAHKDTVESLKEIPNNKRVIRVNKGYAEIGEMVRADVFTDDKGKNYVVPIYAVDIFSKKPLPDKYVPDDGKPPHEQWPSVGDMKFKFSLFKDDLISINDKMYYVSFFEAATANVNVKNIDGSIFSDKIGAQDPYTKKICYRPKSKTRRCILKKYSVDMLGNYKEILQEKRIGNEGVKRVKHRKKRPKNEN

SEQ ID NO: 941 - protein, 1059 aa, unidentified
  REGION 1..1059: note = Description of Unknown: Cas Enzyme sequence
MRYILGLDVGIASVGWAVLDPDAKRIVDLGVRAFQAAESPKNGAPLAEPRRLARSARRRLRRRAGRLRRIKELFVRRGLIPQSEIEMAFQVQNGKQDPWQLRAEGLDRLLTPQELARALFHIAKYRGFKSNRKNIKDAKDGEEGKMLASVQANTQMLREKGYRTAGEMLYKDEQFQECKRNKAGSYKNTLDRAILEDEINTLFECQRKLGSQFATTELQEEYLELFRWQMPFASGDDILRKVGKCTFEPDEYRAPKSMPTVERFVLFQKLNQLTYYQNGDRQQLTAHQREAVLKEAYKRGEIKYAHIRKILNLSDDVRFCGLQYVQKKKGVTTESLECENRALCPMHGYRALKKALSEAGTWDKYSEDFETLDHLAAALTLYKTDEDLRKYLDEKGIEPALVEAIASIPSFTGFSHLSRKAILKILPHLEDGYKYHEACAKAGYNHSRPVQLDKSEKLPPINADEIRNPVVLRALTQARKVINAVIARYGSPYRVHIELARDIGKTYEERSKIAREQEENRKAREEEKQHLRELKGDPSFEPSGEDILKYRLYREQNGQCAYSQKPLEISRLLREPGYAEIDHILPYSRSFDDAYTNKVLVLGSENRQKQNRTPFEYFGSDEQRWSKFENWVHANIRNYEKREKLLRKDFDQEAEEKFIKRNLNDTRWIGRYLKNFIANTLIFADPAEKVPVVCMNGQVVALARGLWGLSKQREEDDLHHAVDAACVAALTQELVKRITEYRKLREIGRLHPGEDSVVDTRTDEVIEFVGARNFAFPQPWKLFRKELIARLSSDPVSEMEKLGLQAPEGTDLRRVIVSRAPYRKALRQLHEETIRSRKHIADTGQSTVRKPLTELTEKGLDCLLARETDPRLYSAIRERMEQYGNDAKKAFAEPLYKPTKDGKPGPLVRRVKICQTQNSGVYVRGGIADNSSMIRIDISTRHEKGKTKWRATPIYSKDVAAGNIPDVPGDFMFSLYPYDLVRIVANGKEHFGYYRGYDVNRNSIEICDPNNAKTRDRVPFSQATIFEKYTVGLLGDYHLVKREKRVGVAGNCNTESSQT

SEQ ID NO: 942 - protein, 1043 aa, unidentified
  REGION 1..1043: note = Description of Unknown: Cas Enzyme sequence
MKYVLGLDIGITSVGWSVLNLDEHRIEDLGVRGFNAAEDAKTKASLAEPRRLARGTRRRLRRRAGRLRRAKDLFVHYELIREQDRDSAFTTRSDRLEPWQLRYEGLDRLLTGEEFARALFHIAKRRGFKSNKKATKKSDDGKALSGIEENRQLLERYRTAGEMIWRKEDKKFQDRKKNTTGDYRKTLSRSMLEDEIKALFAAQRREGSGFAGAEIEERFLEVFNWQKPFASGEDILRKVGPCTFEPDEKRAPKRSYTVERFDLLHKINSLTYSINGDRCGLSDEQRRMLVALAYSLDKPKYARIRKELCLPEEARFTALRYVRKQEGGGWTEDVATAEKSEFFSLKGYHEIKKKCEKAGVWDRVKDSPDVMDAAAYALTFYKNEDEIRRTLAENAVPDNVAEAVRDCDGFSGVSHLSWKAIKNILPFMEDGLRYDEACEKAGYDHSSPRAGDKQDKLPVIEPEDVRNPVVLRALSQARKVVNAIIARCGAPYRIHIELAREMGKSAEERDKISGRQEENRRDNERRAQEFREAFNLDRSPTGTELLKWRFYREQNGQCAYSQKPIDLNRFFEDGYTEIDHIIPYSRSFDDSLSNRALVLTSENQNKGNKIPFEFFGHEARWHTFEAWVKAPTIKNPRKRENLLRKKFDEEDEKQWKKRNLNDTSYVTLLFSRFLRENLRFANEEKEQAVICLNGQVVARARWLWGLPKEREEDDLHHALDATVVAALLPHNVEMITAYSKVGETRQRYVDRETGEIIEWVENKRPKLPRPWKGFCEELMTRLADVIVSRMPQRKATGELHRQTIRSVKRLAADGISAVRTRLTELKEKDLANLFAPETNERLYEAIRNRMSAHDHNAKKAFAEPLHKPTDGGSPGPIVRSVKVAQTQTTGVRVRGGTADNGDMVRTDVFKKDGKYYLVPVYVKDFMQKKLPNRAIAKKKPEKEWPVIDSSYEFVCTLYPYDLVRIKTKKEEFFGYYRGTDRSDGRITVSKPNKNGDCRRTGTKEAILIEKYEMGILGDYHPVRKEVRRGVENRRNLQSREAEA

SEQ ID NO: 943 - protein, 1065 aa, unidentified
  REGION 1..1065: note = Description of Unknown: Cas Enzyme sequence
MKYILGLDIGIASVGWAVLNLDRNRIEDLGVRTFSAAEDPKTKAPLAEPRRLARSARRRLRRRAGRLKRMKEVFLQYGLITPETVDDAFISASEKPSPWQIRAEGLDRILFGEELARALFHIAKRRGYKSNRKLNGKDSETGRVLTGISENRRILEENGFRTVGEMFSQYDKFQERKRNTTGCYNQCVERTMLEDEIKALFASQRGLGSQYASPEFEKQYLEIFNWQLPFASGEAILSKVGCCTFLKTEKRGARNSYTAERFKLLSDINKLSWYQDGEKRQLSPEQRSLVEKLAYQKCELKYEKLRKELKLSEEARFTALTYSRPKDGEDTTCEKAFFCKLSGFKEIRRISETAGVWDVVMQNPDLMDDIAYALTFYKTEDDIRNYLAERNAPERLIPEAANSAGFSKVINLSIKAMRNILPYLETGDVYSVACEHAGYDHSNPTAGSEKATKLPPVTLETTRNPVVLRALAQARKVFNAVVDRYGAPHHINIEMGRDVGRRIDERKKISRNIEENRNARQRDDEHFKEIYGMDPRNSEDRLKWKLYREQNGKCAYSLKPIDLENRFFEPGYVEIDHILPYSRSFDDRMSNKVLVLSSENQNKGNQTPYEYFGQHDKDRWNVFEAWVTSNLRDRKKQRNLLLMEYTEEERTDWIPRNLVDTQYIASDFSKFVRENLKFADENEKLPVVCLNGRITGLLRGLWGLAKVREENDLHHAMDAVVIASVTPHMIKIVTEYRKVRESTRWSPGDTFIDPETGEVIEFKFSFPMPWKGFRKELTARLSDDPATEIKNLGLQSYSDEPKIKPIHVSRKPVRKVTGPIHKETIRSIREQEGKRVAVIRTDITSLKKADLDKLYAPETNEKLYSLIKERMAQYEWNAKKAFEEPLHKPTNDGSVGPVVRKVKLAETQPSGVEVRGGIADNGSMVRVDVFTKDGKYYLVPVYTVDFSMGILPNKAITQGKPWQEWPEMDESYGFLFSLYPYDLIRIQTKKEEFLGYYRGCHRSTGALSICLPNKGDELIEGIGARTALLIEKYEVGILGDYYKVGKEKRRGLEDYSNIESSDTED

SEQ ID NO: 944 - protein, 1004 aa, unidentified
  REGION 1..1004: note = Description of Unknown: Cas Enzyme sequence
MNKKVYAFDLGKASIGYVAREGFNIFEIGSVIIEKDHAEVVSNRERRRTYKTLKAHKTREKFFDNLWTDCNLEVLDKSDKRFTVEFSNKNDDTIYNSALLRIALLQNKKLETWQIYKALHSAIQRRGYDTNVAWANASSDDEKKNIELSNRYTKNENGIELIENPEYFYPCYYDAVRLGLWDENNPNEFKRILPQIDLIKVRTAGIVAPRELVEKELINLYLNAQKQLPQLEKYSVNYFLYGEYGEKYASYNNPEYKRYRGREKDSEGVLGQKIPRFDNRIISKCKLLPKRNVCKAETLENVIFTLLMKLKNLRITLTEGEKYFLNPEAIKLIYENWVTKATTSGDFKLDTTITKKEIEKILGIKILDKIEPMKANLSGRSSFCRRACQIMNKIILYGVENPLEMDISEFIDDENSPNGITEDEIKTMLSKVGNWYNLYIPDNRYEMQELSTDERQKTDIFIGSVTNPIVRNRLQLLRDKLLCLKEQYGTPDEVIFEFVRDGADKSLYGSKKANDYLASLKKNEKENEEIIKELKDCDSLSAINFEKLKLLRKQGGACIYSGKKISISDFDACEIDHIYPRTLGGNDAIYNKVLCYSIENQKKKGRTPYEWLSGDKEYWNIYVKRVNDLKQSLGKKKFELLTSKPEDCEKLIESYNGLAETAQISKVAQQLTAFVFGWGLQTEGSKRHIYTNNGSITSSIRKRYGLNKILGDDIKKNRENNKHHALDAICISFSREFKYDESSKKDIIEGFTYDFVKNAIDNLIPYPYANKKPFKGNIRPKETYYGKRLVEGKWKLTERTELAEIKQDKKTIEKIVDEFIKKDLLEKAEKLSKDEWQEFLKSYIHPKKQTKVKKVRTLIGCNAEASFDENGRERFDTFVDFGTKGTKGQFKRSKGHKGQILYYDKKGKVKVMPIYANIKTSEVKQKLSDLGCELYKKGMIFVSGSLVDIPNDFKSSSNTFPAGTYLLRTIRSDGFVMLENDKGNEIPPMNINYLAEAGMIKHKN

SEQ ID NO: 945 - protein, 1102 aa, unidentified
  REGION 1..1102: note = Description of Unknown: Cas Enzyme sequence
MDRDLDYTMGLDLGIASVGWSVVELGYDEKSQDYYPKRLIDCGVRLFDKAEVPKTGDSLNLKRREARSARRIIRRRKARIVEVRRRMEEFGFLPHDADLSMNSLDKDIWEIRGKDVFERVLTDRELTRLIVHIAKKRGYKSNRKKLDDDMITDKEGKKVLSAIERNKELLKERNLRTYGELVYSLYGGTDRRDTLKHNTTDQYIFSFDREGTLEELRFVLNCQKELGNTKITDDFIKEIVGIVSFQRPFASGEVVKKMVGKCEFEPDELRAPKISISFLEFEFWQNALNNLKLIDTEEGKPAKPKMISLEQKEKLFAEVFSSSKDKITYSFVRKVLDIPNNEIFYNFRYDMLYRAGNKSIEDERIFLNLTEYQKFRRGISKIDELLWEKIRNDRSLYNSLAEALTWYKTDEDMEKYLREKGLGEYVELAKSLPTFSKFGHLSIKALEKILPYLKENDYTEACRKAGYGGKLEAQKLETLPLINYDEIRNPIVFRGVTQARKVVNAIVRKYGPPTFVNVELARELSKNFKARKEMERWMELRRKVNEEACEEIVKTFGISNPSGSDILKYKLWKEQGGRCLYSGEPIQAERLFEDSYCQIDHAIPYSQSMNDSYNNKVLVLTKENQEKRDETPYQYLNRIDPSGNRWKKYKEMVESNPRYKSGDDEKGDKKSKNKNDKGNKKFKKKDYLLIENTENFTINDFIERNLNDTKYICKFFKNYVEDNLKMKELKSGKRQVYTFQGGFTSNLRRMYGVEKDRELNDRHHALDAIMLAVGNQSMLMRIIDYNKKKERHKADWEVFKEKENLKFPEPWVNFRRDILNRVLGTTFEEISDISNFEELYGDIKSEIKPLFVSRMPRRKVEGAAHEETLYSPKHLDEGFVLVKKRLSDLKRKNVENIYGDEVVKNLIKERFENNPENPFGEPLYKPSPKNNNPNQIKSVKLKVKTGGGGILLNHGRAYAENDLMVRIDIFSKGGKYFIIPIYVSDTVNKELPNRAIVADSESEEEWTLIDDTFKFEFSLYKYDLVSWDDTDGKRELYYYIKTNRNSGSSTFYNHDRSGKEVYRGIKTARNFTKYEVDVLGNVHKVRAEKRHGFQKHSNHKTL

SEQ ID NO: 946 - protein, 103 aa, unidentified
  REGION 1..103: note = Description of Unknown: Cas Enzyme sequence
MVKNHKLAKSIADVAWSEFMRQLEYKASWRGKTIIKIDKWFPSSQICSYCGASTGKKPLSIREFDCPHCKKKNIDRDINASINIRNYGLGQVDNRNTVGTIGI

SEQ ID NO: 947 - protein, 980 aa, unidentified
  REGION 1..980: note = Description of Unknown: Cas Enzyme sequence
MKRIILGLDLGITSVGWALVHIDDLEMRNNTIIDSGVRIFTIAEHPKDGKSLALPRREARSARRTTKRKVQKTRAVKRLLLKNNILTQNELDNLFIGNKHQKDVWELRKESLYRELNNKELSRIMIHLAKHRGYFSNRKSEEPSDNEGKAVLSGISTNKEILLNKTYQTIGEYISTKVKKRNGKDSEGKLNYENSVSRSMLKDEISIIFSKQKEFGNKLINDKLLQTYKEIAFEQRPLKSVADMVANCPFEADEKRASKSSYSFEYFRALQKLKNLRVINEDGHEMPLLLEQIEQAIREAKTTKNFTYKSFKKLFPQYKDMKIKGLVYYDHKTGEIKEPEKVKFLDFSAFQKIKKAIQEADNIYWDKIENDSNILDAIAKVLTTEKNDKESIKQLKEIVENEKVCEALVGISFSKFGHLSNKALKKIILELEKGFDYDVACKNAGYDFKAIFKGDKTRFLPVLTKQENLEMTNPVVKRAVAQMRLVYNAIARKYGELDAVHVEFTRDIKNSHDDRRKIEKAQGEFRDTKEKARAEAIDKLGKEPNAKELLKFRLWEEQNGYCIYSGIYINPETLCDSYATEVDHILPYSRSLDDSLNNKVLCLTKENQDKGNKTPYEYVDNDKWEEFVIKINSMKNLKLAKKNRLTKTNFDKNSEIAFKERNMNDTSYISKFVKNYIESHIEFKDSKMKRHVYTMNGMLTSQLRYKWGIGDKNRDNHLHHAEDAIILAFSTQSMVQKLSTVSAKREGFSFKDKEEKSKSLHFIAPLNNFHKEVQNSLASIFVSHMPRRKVNGTAHKATVYSDKTLSMKKENGMIDSLKGGSKTNNVKLKHGLALNNSMPRVDLFQNKETKKYYLVPIYVSDFVKDTLPNKAITSGNKPWIEMDDEYEFRFSFYKRDLIEVKTRNTAKKESVQILGYYDGTHSGTANLTIKSNDGSDEYSLGSQNLVFIKKYQVDALGNYVEVKSEKRQGTIKEGRLKRKK

SEQ ID NO: 948 - protein, 1063 aa, unidentified
  REGION 1..1063: note = Description of Unknown: Cas Enzyme sequence
MENHINYRLGLDIGIASVGWSVINLDKKRIEDLGVRIFNAAEHPKDGSSLALPRRIARGRRRLLRRKAYRVKRVRKLIVDYNILTKDQLNDLFKQKCQNSVWEIRVKALDNKVTNEEWARLLINLCKRRGFKSNRKNEADDKETKKVINSIKSNIKGMKESGSRTIGEYIYTQTLSSGDISKSFRNKDGQYNNCVSRKMIEEEIKILFKKQRELGCEFASEEIEEKYLAIFNSQRPFSKFEDLEKMVGFCTFEKASKERRAPKCSISAEEFVLYDNMNKLSILNKGDTRKLTNEERKIIVENAFKNKEIKYSKLRKILNLSNDERFSTLSYSNKTELSKTENSKFVALKGYHEIKSAIEKSFGKDTWNRVKNNRTMLNDIAYVLSIAKTDEDIIKQLSLRNIPREIIDAVLGLSFSKFSNLSIKAIEKILPYLKDGQQYNEACKSAGYDFKATYNGEKSYKLPLIDIDEIVNPVVNRALSQTRKVINAVIDRYGSPIGINIELARDLAKNFKDRSKIKKEQEENRANKEKIKNELKMLMNKEPTSSEILKYRLWKEQREECAYSQERIYIEDLFKVGQYEIDHIIPFSRSFDDSLNNKVLVKAAENQRKANRIPYEYFGSDEDRWYRFEVWVEQSSLSFKKKNNLLKKRFSREDSIEFKDRNLVDTQYISRYISNFIKSRLIFKESDSKQKVITINGRATSYLRAKWGLLKVRENGDKHHALDATVIAVATQGMVQEISKYSKAHELKYIRQGDEFIDIETGEIVKVKDHKHLSKDRLPEPWLGFSSELRLRLSENPIEELKKSPISTYDEEFIRKTVRPIFVSRVPYRKVTGRLFEETVYSPKAFIDEGFIAKKKLQDLTLKDFENIYNYNSDKKLYDALRERLEEYGGNAKKAFAEEFRKPTKTGKLGPIVKSIKVKTKIPFKDGIDLNGGKVKKDGLVRIDIYEKEGKYYVVPVYRLDIQQGNIPKKAAVANKEEKDWILMDESYNFKFSLYKNDLIYIKYDSKGEYFGYYDGFDRHTGAITLERHDNSERYRGIGIKTGVKEIFKYNVDVLGRYYKVAK

SEQ ID NO: 949 - protein, 960 aa, unidentified
  REGION 1..960: note = Description of Unknown: Cas Enzyme sequence
MTERILGLDIGIASVGWAVVNHDSKNEENNKIIKSGVKIFTQAENPKNGKSLALPRRLARGTRRTIKRKAQRMRNIKLLFRSYLELPYSELFGDEGTIYHQKGREEVWKLRDRALKRKLLNDEFARVLTHIAKRRGYKSNRKSEEKKDSEGKKVLSAISKNKELLGEYLTIGQAIFQTTKTGEKRRNEDGNFKFSVSREMLFDEIRVIFEKQRLYGSEMATKKFEEAFVEVASSQRDFASVDYMVGKCTFEKKEKRAPKQSFSAEEFVSITEIINNRLVLEDGKEIFFSKEQIEVLLDLYKQNKIITYNKIRQTLKIESSTLFKRVKYYNKNGEVLSVKDAEKVKIKNGFEKGYHSLKKVFETSLSKMHWKIFSKDTNMLNKIAEIFSHHKSDEKIEKYLKNLLEKNTYLSDDEKITIIDALIENISFDKFIHLSIKAVEKINPEMKKGLTYDKACLNVGYENIEGIKEKYLRPLNKDENNELTNPVVKRAISQTRKVINALISRYGQFDKVHIELTREIKKSHSDRKKVEKGQKEYQEQKEKVVKKFIEEFGREPRGKELLIFRLMQEQDGYCFYHDKAIDRKRLLDVGYVEIDHILPFSRSLDDSMSNKILCFVKENQNKKNQTPYEYFASTDKNWHRFEELVKGAVRFSYGKKKKLLKKNFDENSENEFRERNKNDTSYMSKFLKNFIENNLELTAKSSQKVFTRNGSLTALLRHNWGVAQKNRDNHYHHAQDAIVLAFASQSQVQKLSTVSGKNEGFIYEKKEEKSKKVRFEPPFRNFREEMDKSIEEIFVSYTPRKKVTGAAHKETIHSKDDKKGVFPVNYGMAENGEVKRIDVFKKDGKFHFIYLYPADFEKKELPDETIKKKKIDGSYQFVFSIFKDELLHLKNKNGEYFGYFKFALSDGRFMIYSHYASSCDKKDCRVSTGSLIDLKKYHVTPLGDYHEIKQEKRLGTKRSK

SEQ ID NO: 950 - protein, 1060 aa, unidentified
  REGION 1..1060: note = Description of Unknown: Cas Enzyme sequence
MRYRLGLDIGITSVGWSIINLDENRIEDLGVRIFNAAENPKDGASLAAPRREARGRRRLVRRKAYRVNRVKEMLVDEKILSKDELDNLFTNINVASVWDVRVEALDRSVTNEEWSKVLINFCKRRGFKSNRKNEVNDKEAGVIITSIKSNEDNMRAAGSRTIGEYIYNKAKNCDDRYKPLRNKSGQYNMCISRGLIREEIHTLFEKQRSFNNDFASDAIEDLYLEIFDSQRPFSKFEDLEKMVGFCTFEKGKYRRAPKNSISAEEFVLYDNLNKLSIIKDGSKRKLTKEERNVVVNEAYAKKEIKYSRLRTLLELDEKEFFSTLTYNLKESYLKTENCKFVSLKGYHEIRKAIEHGISKDYWKDNIKENRKMLNDIAYVLTLGKTDDDIRVQLRKREIPKEIIDVVIDISFSKFGNLSIEAIERILPFMKDGYQYSDSCEKAGYDFKAIYQGEKSYKLPVIKIDEIVNPVVNRALAQTRKVINAVIDDYGSPVGINVELARELSKNFKDRKSIEKEQKENRDNKEKIKQEISSLMGKEPTGTEILKYRLWEQQKSECVYSQVGISINDLFDTGICEIDHIIPFSRSFDDSLNNKVLVLARENQNKKNRIPYEYIGDDEERWHRFEVWVTNSRLPYKKKQNLLKKKFSEEEQRDWKARNLQDTKYICKYIANYINNRLIFAESESKQKVITVNGRATSYLRAKWGLIKVREEGDKHHALDATVVAVTTQGMVNEIAKYSKANELKYVRQGDDFVDIETGEIVKLADYKYLLKDKLPRPWEYFSEELKLRLSDSPIEELKKWLIATYDQEFIARKVKPIFVSRVPFRKIGGKLFKETVYSKKAFKDNYFVTKKRLDDLKISDIENIHDYHCDKKLYEAIEVKLREFGGDGKKAFKEEFRKPTKSGNLGPVVKSIKVKTKVPFKDGIELNEGIVAKNRIARIDIYSKEGKYFVVPVYVHQIASGIIPKKAVVAAKSEKDWINIDESYEFEFYLHKNDLIEIKYGNKKGYFGYFDSFDVGTGALTIEEHDSSKQYRGVGVKVGVTKFNKYDVTVLGKFYKVKRG

SEQ ID NO: 951 - protein, 1085 aa, unidentified
  REGION 1..1085: note = Description of Unknown: Cas Enzyme sequence
MFYGKIATMKRDFDYTLGLDLGIASVGWSVVELAYDEKEKVYSPKRLIDCGVRLFDKAEIPKTGESLNKTRREARSARRIVRRRKARIRALRKIIEDAGFIPAKEDLSTLPSDKDIWEIRGKDVFNRVLTDREITRLIIHIAKRRGYKSNRKKLDSDDTDSEKKKVLSAIKKNQELLKSKGLRTYGELVYHLYGGSAKRDTLKHNTADQYILSFDREGILEELQIVLNYQKNLGNSKVTDQFINNILEVVSSQRPFATGDQIKDMVGKCEFEPNELRAPKASISFLEFQFWQNAFNNLKLTDIEKGRNAKKTDLTLEQKEKLFKEVFDSKKDKITFAFVREVLNIPNNYIFYNFKNELLYRAGDKSIEKERIFLNLTDFQNIRKAVNKIDESLWEKIHEDRFVYNTLVEALTLYKTDPDIENYLKEKGLDEYIEIAKSLPTFSKFGHLSIKALENILPYLKENDYTKACELAGYGNKLKEQKSEILPLIEYDEIRNPVVFRGITQGRKVVNAIVRKYGPPTFINIELAREFAKNSQERRKMERMMESRHKDNEKALEEIRGLGISNPSGFDILKYKLWKEQDCKCAYSGETIPIERLFEDSYCQVDHVIPYSQSMDDSYNNKVLVLTKENQEKRNETPFQYLNRIDPSGKRWEEYKARVENNAHYYQHKKDILLIENADKYTIEDFIERNLNDTKYISRFFKNYLESNLKMKELKYGKRQVFTFHGRFTSELRRIYDISKDRQGSDRHHAIDAIILAVANQSMLQDIVRYRELEEEHKKNWEIFKEEQKIKHPEPWENFRQDIYNRVFEDTFEGISNISNFESLYGDIKNEIKPLFVSRMPRRKVEGPAHEETLYSPKHLDEGFVLIKKSLSDLKPEDVENIYGDDVVKNLIKERFKKNPEKPFEEPLYKPSPKNNNPNQIKSVKIKKPTGGGGVLLNGGRAFAPHASMVRIDIFSKDEKYYIVPIYVADTVKKELPNRAILQGKKEKDWTLIDDSFKFKFSLYPYDLLSLDMSDGKLDGWYYIKTHRNTGVITLRSHDGSKEIERGIKTALNLTKYQVDVLGNISKVRAEKRHGFQKRHNHKTV

SEQ ID NO: 952 - protein, 1005 aa, unidentified
  REGION 1..1005: note = Description of Unknown: Cas Enzyme sequence
MKKKIFGFDLGIASIGWAVIDHSDENFDPETGEIIEGKVVGCGVRCFPVAENPKDGSSLAAPRREKRLLRRITRRKARRMLGIKRLFVAKGLVASTTELEALYAEQTGGNVWNLRAEALRRPLSKEELLRVLTHLAKHRGFKSYRKAAEEADKESGRILTAIAENRKETVGFQTLAQMIVERAKHSDDHKMRNYTPQKGPNKGVAVYVNSIPREEIEKETKLIFEYQKQFGWFTEDLYCDFCKIAFRYREAGSVGHMVGRCRFEPEQPRAPKEAPSAELFVALSKINNLKVTVDGERRFLNGEERKALLELLKNTKEVKYSTIKNKLFKSREVFFDDVNYAQKTKKGKSGEEKAVNPEDAKFYAMKGWHKLKAAFSPEQWKEVGSNLPLLDLGMTAVVCEKNDAGIERFLSEKGIPEDYREVFKKLTGSEFINLSLKALYKLNPYLAEGLKYNQACEKAGYDFREDGIKLAEEKGLLLPPIANDKLTTVPVVNRAVAQFRKVYNAMVRTYGAPDQINLEIGRDLKKSRDERNQIMRRQKENETERKEAEDGLEKEGLAANGKNMLKYRLYQQQNGKCIYSGKAIDLRRLDENGYCDVDHIIPYSRSLDDGQNNKVLCLAEENRKKGSQTPYEYLEPLGRWEEFETVVNTTPSINRYKRNNLLNKDYKEKENDLEFRERNANDNSYIARYVKRYLEDAVDFSASSCAIKNRIQVRTGSLTDYLRHQWGLIKDRNENDRHHAQDAVVVACATQGMVQKLSKLSAIFENKDDFRRKKAEKLGHEEAEVWYKYIKQQIREPWSGFRTEVLASLEKVFVSRPPRKNATGEIHQETIRTVNPKRKKYNEKEILSGIKIRGGLANNGLMLRTDVFVKKNKKGKDEFYLVPVYLSDMGKELPNKAMVPGKKENEWLELDETYQFKFSFYMDDLIKIKKKENEIFGYFRGTNRATASVSVATHDRSHTFEGIGVKTLDGIEKYQVDPLGRIAKVKKETRLPLTMIKKNRHKKGE

SEQ ID NO: 953 - protein, 1363 aa, unidentified
  REGION 1..1363: note = Description of Unknown: Cas Enzyme sequence
MKKYKLGLDIGTNSIGWAVVSFEGEVITESQQNTVDVPLEIVKSGVRLFSDGREPDSKVSLAASRSTIKAQRKQKQRKINRVKLLNSYLLKENIISQENLDTHVYTLNAYEARANAVSNNPELNKVLRAILHLNKHRGYYDNSIIKPDLAKIKAEEYKNILKVMEEFLGEDNKFNNLTEEEKEKFVADILSLETYKNDTNKKQEFFNKWQLEGFEFEKEIKFKKDTKKINIFREIKNAKGLNDELSRIKKGIPHLAKILKDGNLTLGQFLYKQYLENEKIKETNFTAQKAVRFTPEGEYFASREMYEDEFERIKELSQKASLPISVNQWNRIHDIIFKQYPLQSKEHLIENCVLEEDEKVAPKTSPIFQKFRSLQFLNNLQYDFVDSESDKPSYKNLNQKQKEDLLNIINQENLTLKKLQDSLGKEYKDKILKTNWKVKDDNVLMKSNNTFAVMNSCLGDKWSNLTLESQDKLVKDILDLEFLDINENKKEDFYTKWQNLGELDNLFIEKGTTKTPKTIFTELTKEKGYANYSNKALLKLIDAWENTNGTIDKIIEQVYPSYSHAEEKGVLPTVKYELPYYGDLEVLKNSLTGEIYGDPVLKSDGNVELSLEIKRGNQTLTKKAIAKHGSQAHKELTTGKINNPTVHIALNQIRVVVNSIIAEMQKKFGEGFKFDDIHLEMARDIINSPATKKEIDDKNLINKNWNEFIDKELGHKASRDENRKLKLWYEQQGYDLRKSPKDNQKVEKAQCIYCGDSIGYTTDVEVDHILPISQTGDDSFTNLVLVCRQCNQIKENKTPYEAFSNHKDYNYDDLVKRAEKIYGKKNPKYLRFTPSGNEIAEKLRENFSNNQLNDTRYITKVAKQYLSALVENNHNVVCMQGKITSSYRHYLGLNEILNVNEENKKNRDDHRHHSLDAITVALINRGLVQKVSGELENRMQKFKEQKIVGEAYLKERKSAMGDILKYSVSNDLIKYGDFYNKVKESLNSIIPSVKVNHKTQSALYKDTAYGIVLDSKGEVIRNKEGQYLIKERKAIDGLSLGDISSVICLNYKANPEEPYNAEEDSLRMDIRKYLAENGLSVFQTDMWNLKKEIKEPKGKEAKELSNLLKTFGEHRGIKKVSLKYYATVKPINQKQKRKDTYSQFTKDVKGTDSPYKAYVVDSYKCVDIYQISKGVDRKTNQENFAYQGNFILYADFAEHKGNRGAESYKNSENFKEILTKDKNPKFLMRLHKEDTVVAYKKEDGKIDSEKDIQFLFVVKGLQRLGGRLDLRPLLLSDNKQQPYNISTVLRKEPKEHDSFFNLKKVAVLPNGEIRGIQMESLPKEYKTWLEDKKKEAKKDKKSQENNNPQENSKESTEENNNSE

SEQ ID NO: 954 - protein, 973 aa, unidentified
  REGION 1..973: note = Description of Unknown: Cas Enzyme sequence
MTEKILGLDIGISSIGWAIINYDKELTKKEDFSNNKILKSGVRIFTIAENPKTGESLALPRRLARGARKTIKRKAQRINAIKYLCMNFLNLSKDDLFSTENSIFNAKKRVDVWQLRDKALKRKLTNKEFARILIHIAKRRGYKSNRKVDELGNSDGKKVLSAIDKNKELLNTYLTIGQAIYQSTKNNHIRRNKKDDYNHSISRAMLEEEINIIFEKQQILNNKLSTNEFKKEYLKLFLKQKDFTSVDSMVGYCTLEGKDEKRAPKTTYSAEEFVTLTKLINTKIIDENGKERFFSKKELEKALELCTQIEQPTYLKLKDTIKLKKNEYFKGVDFYEIDKKTGEVTKKTTKFISGFKGFHKLRKVIEQALSKTHWQNISQDKNLLNKIAKIFSYHKSDEKIENELKNLEFKSLTQDEVKILINSLIENISFDKFLNLSIKAIDNLLVYMRAGLRYDEALEKCNYKKLEGTKDKFLRALNKDEQLELTNPVVKRAIAQTRKVINALIREYGQFDKVHIELTREIKKSHIDRNKIKKGQNDYKDHKERLFNKFIEDYGREPKGNELLKFRLLHEQDYRCAYSGFNEQSGYIKPERLLEQGYVEIDHILPFSRSLEDGLHNKVLCLAKENQDKKNRTPYEYFTDINRNWNKYEVWIKSLKGIKKPKRDRLLKKNFDKNSEKEFRERNANDTAFMARFIKTFIEENLQLNSSDKKKVISINGSLTNMLRHNWQVGNKSRDNHLHHAVDAIIIAFATQSEVQRLSTLSAKIDGFTYTKGEEKAGKLKFTAPMENFRDKVQNSIDNIFVSFAPRRSVTGAAHKETVYSKNVEKQKGNFKVNGGLAENGEVKRVDIFKKDGKYHFIFLYPSDFLKEKLPHNSIKNIQIDDTYEFLFSLFKDEFIEIKQKNKNPFSGYLKFVESDGRFNILPHFQSELNKKENRFSTGSLEYIKKYQVDPLGNKNEIKKEKRKGTKKQSKRI

SEQ ID NO: 955 - protein, 960 aa, unidentified
  REGION 1..960: note = Description of Unknown: Cas Enzyme sequence
MSERILGLDIGISSLGWAVIDYDKNNSLNNKIIKSGVRIFTIAENPKTGESLALPRRNARASRRTIKRKKQRIKGIKNLLVKYLDFSKDEIFSPKNIFNEKKQKDVWQLRDKSLKRELTNKEFARVLMQIAKRRGYKSNRKVEEKENSEGKKVLSSIEKNKKLLNNYLTIGQAIYQTTKETKTRRNKKDDYNHSISRDMLVDEINIIFEKQKEFKNPFVSDNLKQEYLELFLKQRDFASVDKMVGFCTLEGKPNKRAAKASYSAELFVTLTKLINTKIIDSNHKERSLTKEELEKIILLCHQSEQPTYLKIKEIICLDESSHFKNVSFYEIDKKTGEVSKKTTKFISGFKGFHSLRKVVEKTFSKTYWQNIAQDKKLLNDIATIFSHHKSDEKINNELQKLEIKILNGDEKQILIKALIENIHFDKFLNLSIKAIDKLLKYMLLGKRYDEAVELCKYKKDEGTKQKFLRALNKDEQFELTNPVVKRALSQTRKVVNALIRVYGQFDKINIELTREIKKSHSDRKKIEKAQDEYQTLKQGIVKNFIENFGEEPRGNELLKYRLWQEQGERCIYSGKEIDIKRLISEVNYAQIDHILPFSRSLEDGMINKVICLSKENQDKKNRTPYEYFTDEKKDWHWFEEFVKSLKNIKKGKRDRLLKKNFDENSEIAFRDRNANDTAFMSRFIKDFIENNLELKSKDKQKVFTRSGTLTNMLRHNWGIGNKSRDNHLHHAVDALIVAFSTQSEVQRLSTLSAKIDGFTYEKSEKKAGQLKFVPPIEHFRDEVQKSIDDIFVSFAPRRGVKGAAHKETIYSKKAEKKKGTFEINNGLAENGEVKRVDIFKKDGKYHFIFLYPSDFLKKELPLLTIKGIEIDDSFEFIFSLFKDEYIEIKQKNKEPHYGYLKFVESDGRFNVLPHFQSQLNKKDNRISTGSVEYIKKYQVDVLGNTFEIKREKRVGTKKQR

SEQ ID NO: 956 - protein, 1065 aa, unidentified
  REGION 1..1065: note = Description of Unknown: Cas Enzyme sequence
MRYVLGLDIGIASVGWCILNEDLQRIENLGVRTFTKAEHPKDGSPLAEPRRLARGMRRRIRRRAHRLERIRRLLVRTGFGTQVEIEANLEASTIAGKTPYDFRAEGLDRKLSKEEWAKALYHIATRRGFKSNRKSEENEKEGGKLLQGVRANAGLMEDKKYRTVGEMLAKDEKFSLYKRNKGGSYEHTLGRGDLLAEIELLFSRQRELGNPLTNPEFEESFSKIFAAQRHYASGDQVFKMIGHCTFENEKNGKENQPRAPKMGYSAERFALLTRLVNLRILRQGATIPLDEEQRRSLMGMAYETKKVTYKQARKKLGLEEEDRFNGLSYQSDKKDPEEGTLAELKGYHGIKKAVEGSLGKIAWLNLSQQVDQLNFIAEALTYYKTDEDIQKYLTEKEVPEEIQAAVLSLSFDRVIHLSNFALNQLLPHLESGKRYDEACTEVGYLHYSPHQVDQKKVLLPSLSEEMKNPVVRRTFAQTRKVVNAIIRKYGAPREIHVELARELNKPWDERQKIQKGQEEYQSQKEKAVQKFKEISGREPKGADLLKFRLWGEQDGFCAYSQEYIDPTKLVYDPTYTEVDHILPYSRSFDDSMSNKVLVKTVQNQRKGNRTPYEYFAPDQWNTFEVWVKTQKKLSHRKKTNLLRKNFGDAEVAEMRNRNLNDTRYISRLISNYMREHLAFHEECEKNPVRVLNGQLTAFLRARWGLLKNRSESDRHHALDAAVIAAASQRFVSRLSKHSKWRELWNIKIDENKYVDPETGEILDSPYRQSLMENEKFPQPWEHFREELLVRLSPIAPTEIEKLNLPSYREGIEVTPIFVSRAPYRNASGAAHQETIRSTRWLKSGLTSVKTPLAKLTLKNLEDMVGKERDWRLYEGLKERLEAFSGNGQKAFVEPFYKYRKDGTPGPIVRSIPLFSTGTAGVSVRQGIADNDRMVRVDVYLKDKKYHLVPYYIADIVNKTVKDKAIIAGKSEEEWTQINKTFQFQFSLYPNDLVRIVTKKETFEGYYRGTHRGTGNITFDVHDRDQSIGKKGTIEGIGVKTAQSFQKLQVDPLGNKSFVSLEKPRP

SEQ ID NO: 957 - protein, 1102 aa, unidentified
  REGION 1..1102: note = Description of Unknown: Cas Enzyme sequence
VWGGCWHCIRMRRVNYHFRRNSFMKYTIGLDIGIASCGWAVINNDKDRIEDLGVHIFLAAETPKDGSPLAAPRREARSARRRLKRRAKRMKDIKKLFIDCNLLTKVDVQNLNLSLPKDITPYTIRTKGLDELLTPEEWARALLHIAKRRGYKSNSKEEKEHQENKAGKKENDTETGKILTGIKENKERLLQGNYRTIGEMFFKDSRFTDCKRNKEGDYSHTIDRDSLENEIHMLFSLQRSFGNTFATEAIEQTFCNIYLSQLPIQSVEHMIGYCTFEKTEKRAPVNSYTGERFTLLQKIANLKIISNHQEKSINLEQYKPIIKLAYENVKVTYKQLRKVINIADNATFKSLKYYEKGVYNKKVEDDNFIELKGYHAIKKAITNALGEKYWHNLEITTNMDPTILDTIAYAVTIHKEENAVVKELQEQGITDINLIESVKRLSFSKAKHLSIKAMQNIIPFMEQGDRYNEACQKAGYDHANPNEGRNNKKEFLPILSRDEITNPVVFRALTRTRKVVNAIIRKYGSPHSIHIETTKELAKSKKDRDEISKNQEQYQKEKKTLATEFTELVREPKGKDLIKYRLWKEQNGFCAYTTKQNIKAIELNRLSEPGYVEIDHIIPYSRSFDDSITNQVLVKGEENRNKGNRTPYEYIAHHSLDEWHAFTEWVKTNIKNRAKQLKLLRENYDAHAENEMRSRNLHDTGYITTYMANYLRENLQFADTASKKPVITIKGEMTAYLRHRWGLNKDRSTDLHHALDAAIVAVASESMVQKIARWSRGSELYLTTINDQIVNFETGEVTMTAPEKIDNKRLITPWEHFRQELNARLSDNPAEEIKNTEIHTYTVEELNQLKPVFVSRMAKHKVTGEAHKASISRFREEEQIKVIKMPLEKINLKNLETIFDKKRNLKLYTIIKERLEMHEGNAKKAFQENIYMPTNDGNKGPQIKGIRLADNSSTGIKVNGGIADNAAGSMVKTDVYSKEGKYFLVPFYVSDIIQKKPIKHAIVKNRPKSQWIFMDETYTFLFSLFPNDLIQLNADRGKIFGYLRSVNSGSGQLLIDTHDRRQPGIGKKPNGWDITITTVNLLEKYQVDMLGNYTKVKKEKQQ

SEQ ID NO: 958 - protein, 958 aa, unidentified
  REGION 1..958: note = Description of Unknown: Cas Enzyme sequence
MSEKILGLDIGISSLGWAAINYDKENPLNNQIIKSGVRIFTIAENPKTGESLALPRRLARGARRTNKRKKERVKAIKKLFIQYLNLTKDDLFGKDNIFNQKNRKDVWQLRDKALKRELNSVEFARVLTHIAKRRGYKSNRKVDEKENSDGKKVLGAIKKNQELLKKYLTIGQAIYQTSKLSKIRRNKKDEYLHSVSREMLEEEIKTIFEKQREFGNVLASKKFEEEYIKLFLKQRDFASVDKMVGYCTLEGKKEKRAPKTALSSEEFVTLTKLINTKIIDKNENERNFTKEELGKALDLCKHSEQPTYLKLKEFIGLDESDYFKGVVFYEIDKTTGEITNKVMKFVSGFKGYHQLRKEVEKVLSKTHWQNLSQDRKLLNEIAKIFSYHKSDEKINNELQKLEFKSLNKEEKQILIKALIENINFDKFLNLSLKAIDKLLVYMKEGKRYDEALDLCKYKKQNGKKEKFLRALNKDEQLELTNPVIKRALAQSRKIINALIRKYGQFDKIHIELTREIKKSHSERNKIQKGQEEYKKIKENLVTKFVENFGREPRGNELLKYRLWEEQDGKCIYSGKTIKIEDLVNDFRYAEIDHILPFSRSLEDGMHNKVLVLAKENQDKKDRTPYEHFTQINRDWEWFEGFVNSLKNIKKPKRIRLLKKNFNEDSEKEFRERNANDTAYMARFIKNFIEENLELKSNEKLKVFTRSGTLTSMLRHSWGIGEKSRKNHLHHAVDAIILAFSTQSEVQRLSTLSAKTEKFIYEKSQEKAKKIIFEPPMQNFREEVQASIDDIFVSFAPRRSISGAAHKETIYKKDSGKGVFEVNGGMAELGEVKRVDVFKKEDKYHFVYLYPADFEKYDLPNTSIKNIQIDESFDFIFSMFKDEFIEIKQKEKDAIAGYFKFAEGDGRFHILPHTQTQLDKKKNRFSTGKLEYIKKYQVCPLGNRSEVKSEKRVGTKRMR

SEQ ID NO: 959 - protein, 1036 aa, unidentified
  REGION 1..1036: note = Description of Unknown: Cas Enzyme sequence
MPIQYRLGLDLGANSIGWCAVQLDDAGTPCGLLDVGVRVYPDGRSPKDKSSLAAERRGPRAMRRNRDRYLRRRANLLNALTRVGLMPADDQAKRSVSTLDPYALRAAALNRRLDPHELGRVLFHLNQHRGFKSNRKIDRADNEGGLIKDAAAATQAELQREGFATIGAWLAHRHAQRAGVRVRLAGSGKTAAYPFYPTREMIEGEFDTIWAAQSAWNPMLTDAMRDELRSVMFHQRPLKPVPVGKCWLEPGEERAPRALPTVQRARIAQTLAHLRLAVPGMPEQLLTDQQRTELMTPLYQGKDLSFDRIRRLLKLSAETDFNTRDDKLVGCATADRLANGKKAPIGPAWHALDLATQDAAVRAIQNADTDEETTKTLVALGIDPEAAERAAKAMLPDGHAALSARALGNILPFLEVGERYSDAVQSAGYAHHSDRRTGEVRTELPYYGELLCQRIGTGTGKPDDPTEKRLGRAPNPTVHMALNEVRRVVNAIVHRHGPPTEIVVETLRELGRSARQRQEYEKQQKQNRDKNDARRKLLAEMRVPDNAANRMRLRLWEEQSTDPKNRVCPYSGTLITGRMALSDAIEEDHILPFAVTLDDSATNRVLVTREANRSKGRRSPFEAFGHSAQWPEILERVKLLDESKRWRFAPDALERFLGKGDFLARHLTDSATIARWAREYLDVLAPGRVWSIPGRLTGLARHALGLTSAAVLGKGGARKERDDHRHHAIDAVVVALCDRGLLKRMTDAAKRADERGQRLMVDFTPPWDGFVRDVAERMRALVVSHKPDTGWQGALHNDTAYGPIRGAKGKEPNVVVRKPLDALADWSAQDIRDGVRDQVLARKLASAVVDGNAQASKAALSSLTHSGGHVVRRVRTVERLVSTVAITNRQTGAPYKVLKRDGNHRTELWRMPDGKVTLEVVPTFNAAQQAEAARLGRKVPDHRPHPAAKLLIRLHKDDMVAFGDGDGRQLLRVVKMSGGNVTLAPAHEAGNLKARDAAKDDQFKYVTASARKLIVERARKVHVTPDGRVLDNGPAP

SEQ ID NO: 960 - protein, 1135 aa, unidentified
  REGION 1..1135: note = Description of Unknown: Cas Enzyme sequence
MSDKPTDPLIFGFDIGISSVGWCVLLYGRYILALGARCFDKAETTDGESLNYARRVARLMRRRLRRRAWRLTKLARLLKREGLIDSIQSMRQAATESPWRLRVEGLDRKLTPEEWARVLYHLCKHRGFHWISRAEEKKAEEDKKEESGKVKKAEMGIKRRMNEKNYRSAAEMVLNEFPDAQRNKQGEYSKALSRVLLAEELALLFQRQREYGNSYATTDLEMHIAGCGDRKSGLFWKQKPSLSGVELLKMLGRCTFERSGGSDGKGEYRAPKHSFTAERQVWLTSLNNLRLNVDGNIRQLNEVERRVALPLPYQQTSELTYKQLKTALVKAGMLSENTKFTGLSYPTQRAGGKTKDPESKRLVKLPGWQELRKTLKEHGLETEWHSIAGAAFGGQTELLDQIAWILSVYKEGNEVEHELRKLGLPGGEKMIEALSEISFDKFHNLSLKALRKIVPYMETGLRYDEACKEAGYHHSRPVKIEEGERSKHLPSFYEGRKDGRMLFKEGDLPRNPVVLRALNQARKVLNALIRRYGAPSEVHIEMARDLSRPKDERDKISNAQNEFRARNQAVRNKFIETFQFDPKAREFEKYKLYEEQNGKCAYSLKPLDIHRVVHDDDYAEVDHALPWSRSYDDSKNNKVLVLNEENQNKGNRTPYEYLTSFAGGENGERWRNFVVYVEGNKNFREAKRNRLLRKNFGKEESGEFRERNLNDTRYICKFFKSYVEDHLQLKDSGSKRCVVVNGGLTSLLRAVWGLPTSKEKREESDRHHAMDAAIVAVCGHRAVQRTSEMLNTDGWAHRPDLGGYLNVETGEILTTQKFARKSEVYKLFPLPWRHFREELLTRLNTDDPDLLKSETERLGYPPEALENLRPLFVSRAPKRRKGGAAHQGTIYSQPEHLKSEGKVKQRVALTKLTLKENSDFYVGNLSDQERNKKLYAAIRARLEAHNGIGDKAFPTDNPLRIPDHDGNPTGPVVRSVTVVINKLTGIPVRDGIAKNDTMLRVDVFRHKKDQKYYLVPVYVHHAVAKELPNRAIVAHKDENDWTLINEEHFDFCFSLYPNDLVKVSLKNEVHLGYYAGCDRASGTINLWSHDRSRAIGKDGLIRGIGVKTASCVEKFHVDTLGNIYPAPPEGRRGLA

SEQ ID NO: 961 - protein, 990 aa, unidentified
  REGION 1..990: note = Description of Unknown: Cas Enzyme sequence
MVERILGIDLGIASLGWAVVEYDKDNDTNNRIVDCGVRLFTAAETPKKESPNKARRDARGIRRVLNRRRVRMNEIKKLFIENGLIKEKDLDENGGMYYGKESRTDAWKLRYEALRRKLTGNELARVLVHIAKHRGYDFETEDSEAGKVKSAGEVLKAKFESAGYKTIGEWLWVTKGAKGKKRNKSGDYEFSIHRDFLVSEIKTIFETQKHFGSNFASDELLGAYSDIAFFVKEPPSVENMVGNCTYFPEEKRAPKCSITAEKFVALGKFFNTVIIDNAGNEQKIVERKSIEELLDFATSQDRLEFRHVRKFLGLAENEIFKGLTYKGKPKKPKKGEEQKADEWEFDKADAEKKQWISLKGHAKFREVLGEMFDDFIFNTSIADEVAKILTYHKSENQKLIALNKLLPDGVIAEKLSKISFSDFLMLSLKAINAILPEMQSGKRYDEAIGILGAPSTAKSEYLPPLKDTDIAILNPTVIRAFAEFRKVANALVRKYGAFDKVHFELAREVNTKEQRKEWEKASNENAKLKNILANDIREAGYKDGIKNILKLRLFREQGEMCPYCQSKLKYPDIFDDGHQIDHILPRSRSAEDSYANKVLVHSDCNQNKQNKTPYEWLKNDTERLEKLKSFTNSGLHQMSAKKRRYLLKENFDENSEKEFLSRNLNDTRYMAKAIKTYCEKYWRLRQDDDKLRIQVRSGKLTSELRGRWLEGFKKDRGWHPHHALDAIVIALSTQSMVKKLADYYAAKETRCEKQKPELKTPMSNFRVEVEKALELAKDKNGHKRLLISRPPRASVTGAAHKETIQSPKEYKGKGLPINNGKGVCDNGDMPRVDVFTKDGKYYLVPIYVADFAKHELPNKAIVAGKDKEWVEMGESCQFLFSFHKDDVVEIKLKNKESFLGYFKQADSSTANIKLQKIDSDEQFNFGSKTAEYIKKYQIDPLGYYHEVKGKKRLSTILQEAKRKSKKDGKSVIERRAAKRRIKTKSKNTII

SEQ ID NO: 962 - protein, 987 aa, unidentified
  REGION 1..987: note = Description of Unknown: Cas Enzyme sequence
MSKIILGLDLGITSIGWALVNIDEKIENNKIIDSGVRIFTIAEHPKDGKSLALPRREARSARRTTKRKAQRLRAIKRLLVKNKFISNDELKSLFIGNKGQKDVWELRRDALYRELNNKELSRIMIHLAKHRGYFSNRKSEEPSDSEGKAVLGGIGKNKEILQSKNFLTVGEYISTKQKKRNGKDRDGKLNYDNSVERYMLADEIRTIFSKQKEFGSKLVDDEILDSYLEIAFNQRPLKSVEDMVGHCPFEQEEKRASKSTYSFEYFRALQKLNNIRLLTPEGEARLSQEEILQVIHDEKNRPTPKNYKARTYKQVRKLLKLDDAVEFKGLTYYDHKTGEVAKKDPENEGLVDFSSYHKIKKVVQEADHLFWQKLENDTNKLDEIATILTTEKDDEESLKKLKKIVDNEKVCEALVAISFSKFAHLSIKAIKKIIPHLENGLDYDKACEEAGYDFKAIFKGDKSVFLPPLSRQENLEMTNPVVKRAIAQMRLVYNALARKYGAIDAVHVEFTRDIKNSHDDRRKIEKAQGEFRDAKDEARKHATEILGHEPSPKELLKFRLWKEQNKECVYSGEYIDPQMLADPYATEVDHILPYSRSLDDSLNNKVLCFTKENQDKTNQTPYEYMDEQKFREFEVRVNANKNLKQAKKNRLLKTNFDQSSAKDFRERNKNDTSYISKFVKNYIESHVEFKKSNDKQHVFTRNGMLTSQLRFKWGVGDKNRQTHLHHAEDAIIVAFATQSMVQKLSDISAKKEGFSFKDKEQKSKELRFVAPMDDFHKKVQESLAEIFVSHMPRRKVGGAAHKETIYSNKTLSVKKADGKVESLKGNSVNNNVELKQGIALNDSMPRVDLFQNKKTKKYYLVPIYVSDFVKDKLPNKAIVAGNKPWIEMDDDYEFMFSFYKRDLIEIKTKKTPTKESVQLLGYYNSTDSANAKIIFNSHDGSNEYGFGVQSSLFIKKYQVDPLGNYVEVKNEKRLGTIKEGKAKKQSR

SEQ ID NO: 963 - protein, 982 aa, unidentified
  REGION 1..982: note = Description of Unknown: Cas Enzyme sequence
MTKIVLGLDLGITSIGWALVKVDENIENNTIIDSGVRIFTIAEHPKDGKSLALPRREARSARRTTKRKAQKLRAIKRLLIKNKILTQEALETLFIGNKGQKDVWDLRRDGLYRVLEPNELARVMVHLAKHRGYFSNRKSEKPDKSDKEGQAVLGGISKNEKILKSEKYLTIGEYLCTKVKKRNGKDKEGKLNYDNSVERYMLIDEIKTIFFKQKEFGSLLVNNELLHTYLEVAFEQRPLKSVAHMVGKCPFEVEEPRASKSTYTFEYFRALQKLKNLRVIDADGHEMPLIFEQIEHIVREAKKTKNFTYKSFKKIYPQYKEMNIKGLVYHDHKTGEIKDPERVKFLDFSAYQSIQKSIQETDNLYWDKIENNYDILDAIATVLTIEKNDEESIKKLKEIVESEKVCEALVELSFSQFGHLSLKALKHIIPFLEKGFDYDKACEKAGYDFKAIFKGEKSLFLPPLTSQQNLEMTNPVVKRAVAQMRLVYNAIARKYGELDAVHVEFTRDIKNSHEDRRKIEKAQGEFRDAKDDARKQAQEVLGHHPSSKELLKFRLWKEQNKECIYSGKYIDPQMLVDPYATEVDHILPYSRSLDDSLNNKVLCFTKENQDKGSKTPYEYMDANRFNAFEVRVKAYPNIQEAKKKKLTKTNFDESSAKDFRQRNKNDTSYISKFIKNYIEAHVKFKDSKDKRHVFTMNGMLTSQLRFKWGVGDKNRQNHLHHAEDAIILAFSTQSMVQKLSSVSAKKEGFSFKDKEEKAKELRFITPMEEFHTKVKESLSNIFVSHMPRRKIGGAAHKATTYSNKDYSHKKENGKVEFLKGGSVTNNVKLKHGVALNDAMPRVDLFQNKTTKKYYLVPIYVSDFVKDTLPNKAIVAGNKPWIEMDEEYEFIFSFYKRDLIEVKTKKTAKKEAVQLLGYYDSTHSGTAQILIKSHDNIKELLLGSQNLVFIKKYQVDALGSYVEVKSETRQGSIKEGRLKRNNK

SEQ ID NO: 964 - protein, 1062 aa, unidentified
  REGION 1..1062: note = Description of Unknown: Cas Enzyme sequence
MHSVDNRPYRLGLDLGSNSLGWFMVWLDQTGAAAGLGRGGVRIYPGGRDPQSGTSNAADRRVVRGMRRRRDRYLARRGQLMALLVRHGLMPDDESGRKELQALDPYALRAKALVGILPLHHVGRALFHLNQRRGFLSNRKTEKGDEEAGAIREAAGKLEQSMLDADARTLGKFLHDRHRLRPPAPVRARNQGQGNKAEYDFYPIRQMLVREFEAIWQEQAPHHPAMTEAARGEIHHAIFHQRPLKSPPTGKCSLDPATDLADAEGFRCPWAHPLAQRFRIWQEVRNLSVTEVGKMTRTLAEATGNNEAGDKIALALLQNNRLSFDAIRKLLKLPPEARFNIESARRDGLDGDETAAKLSHRRFFGKAWRGLTLDRQIEIVDRLLDEPDETVLIEWLAAETGLDRAAAERVASAFLPEGHSRLGLRAIREILPHMARGLNYPCAAEAAGYDHPLRPTGQVSGDGFLPYYGAWLPDDVVGSGDSREVKERRWGRFPNPTVHIGLGQLRRVVNALIRDYGPPAEITVEMTRSFKLSPKQLAEVEREQAENQGRNDKRKAELLRLGQAVNARNLLKLRLWEELNLHDPLDRRCPFSGDMISIEKLLSEEVEIEHLIPFADSWDDSASNKVVCLRSANRLKGKNTPFEAFKDDPKWPEIAARAIGLPRNKSWRFAPDARKRFGEEDGFQARQLNETGWLARVARQYLSAVTDVYRINVLPGKLTAMIRAKWGLNDLLSDHNIRSGDKRAGNNFSDGKNRKDHRHHAIDAVVAALTDRSLLTRMSKAPEEDRNRIIIPPPWPDLRDDLARALARMTVSHRPDHGLQGQLHEDTAYGPIRPDKEGGNLVYRKTFRDLNEKEIARIRDRRLRDLVQAYVSAELAAGRDLKSALLTFGNRTDIPGLPQGVRHIRLTKTENQAYLVPVHDRSGRVYKAYSAGRNAFVDLFEDGDGKWLGVATSIFQANQPDHRSATPAAARFIMRLFKGDLIALDHEEERRIMVVHRLDVAAGRFKLAGHNETGNLDRRHADPNDPFQWLMASYNTLKKKKAERVRVDELGRVWRVAAAEPD

SEQ ID NO: 965 - protein, 960 aa, unidentified
  REGION 1..960: note = Description of Unknown: Cas Enzyme sequence
MTERILGLDIGISSLGWAVINYDNTNSENNSIVKSGVRIFTIAENPKTGESLALPRRSARSARRTIKRKKQRLKAIKNLFVKYLNLSKNELFSGETIFNDKMQKDVWQLRDKALKRELTKKEFARVLVHIAKRRGYKSNRKVEENGNNEGKKVLSSIEKNKELLSNYLTIGQAIYQTTKDTKIRRNKKDDYNHSISRDMLEDEINVIFEKQQEFNSPFANNAFKKEYFELFLKQRDFASVNKMVGFCTLEGKSQKRAPKASYSAELFVTLTKLINTKIINVEGIERNFTKEELEKILELCQQNEEPTYLKIKETINLNENLYFKNIDLHEIDKKTGEITKKATKFVSGFKGFHCLRKIVEKTLSKTHWQNISQNKKLLNEIATIFSYHKSDQKINDELQRLEFKALEKNEKQLLISALVENINFDKFLNLSIKAIDKLLIYMRTSKRYDEAVELCSYKKIAGDKQKFLRALNKDEQLELTNPVVKRALAQTRKVVNALIRVYGQFNKVNIELTREIKKSHSDRNKVKRSQEEYQILKQEIVKNFIENFGREPRGNELLKYRLWQEQGERCVYSGKGIDLSRLISDVNYAQIDHILPFSRSLEDGMQNKVICLSKENQDKKNRTPFEYFTQENKNWHWFEEFVKSLKNIKKAKRDRLLKKNFDENSEISFRNRNANDTAYMAKFIKDFIEDNLELISKDKQKVLTRNGTLTSMLRHNWGIGDKSRDNHLHHAVDAIILAFSTQSEVQRLSTLSAKLDGFIYEKSEKKAGKLKLTAPLENFRDEVQKSIDSIFVSFSPRRGVNGAAHKETIYSKKTEKTKGTFEINNGLAENGEVKRIDVFIKDNKYHFIFLYPSDFLKVELPNISIKNIKIDDSFEFLFSIFKDEYIEIKQKNTNPFSGYLKFVESDGRFNILPHSQTELDKKNNRFSTGSLEYIKKYQVDPLGNISEIKREQRVENKKQR

SEQ ID NO: 966 - protein, 990 aa, unidentified
  REGION 1..990: note = Description of Unknown: Cas Enzyme sequence
VQKSLKEDKMTERILGLDIGIASVGSGLIDYNKEDISQNKILFSGVRIFTQAENPKTGESLALPRRLARGSRRVIRRKRQRMQAIKNLFIQYLDLKKSDLFIQEDGTDKTIYREKGKSRSDVWELRYKAVHELLDNVELARVLTHIAKRRGYKSNRKSIEENDSKSDSKKVLSAIKENEKYLETYITIGETIYALTKESRIRRNRPGDFSFSVSREMLTDEIKTIFSKQREFGNTYATEAFEEVYLRLFLKQRDFASVDDMVGSCTLEAGEKRAPKRALSSEEFVTLTKLINTKIIEENGKERLMTKEELQKAIEICKKKKEPTYLELKESLALNDTDFFKGVDFYEVNKKTGEVSTKKNKFKSAFTGYHELRIITEKTLSKAHWKNLSEHTNLLNEIAVIFSYHKSDEKIQEALEQLTFPDINQEEKDLLINAMMQRINFGQFLYLSLKAIDKLLVHMREGKRYDEAVATIGYKKETGTKQKYLRGLTKEEANELTNPVVKRALAQTRKVINAIIREYGAIDKIHIELTREIKKSHKDRKQIKDAQDEYQKFKEKVVEEFKEDFLREPRGNELTKFRLWKEQDGRCAYSGFMESKGYIDPKRLIEDPKYAEIDHILPYSRSLDDSMSNKVLCLAHENQEKRDRTPYEYFMAIGRDWEQYEVFVRDLKNIRRSKKQKLLKKNFDENSAKEFRERNINDTAYMARFIKNFIEDNLELGSKEKNKVLTRSGTLTNMLRYNWHVGDKSRETNLHHAVDAIIIAFSTQSEVQRLSTLSAKIEGFAYTKSEEKAGALKFKPPMENFRDAVQKSIDDIFVSFAPRKKVTGAVHKETIYSKKLKKPKGSFEVNGGLAENGEVKRIDVFKKEGKYHFVYLYPADFEKDILPTKTIKGLEINENYEFQFSLFKDELVELKSRNKEPFLGYFKFSEADGRFNLQKHIESQYDKKTGRFSTGSLEYIKKFNVDMLGNITEIKHETRVGTKKMLRKQRKENR

SEQ ID NO: 967 - protein, 1049 aa, unidentified
  REGION 1..1049: note = Description of Unknown: Cas Enzyme sequence
MATWRLGLDVGTNSIGWAAIGLFQIKNTWMPVKIISSGVRIFSDGRNPKNKQSLAVQRRLPRQQRKTRDRYLKRRQEFMDKLTKHKLMPDNYESRKKLEKTDPWALRVKGLDEKLTLHELGRALFHLDQRRGFKSNRKTDKSEGDESGKIKSAAEKVVFEMKQRGARTLGEYLASPRVADPKAAHDHRVRARLHGAGAKAYYDFYPTRALIEQEFITLWQTQAQTRFHGPQLSEQAREDLLNTLLFQRDLKAQPVGKCSIDPTQRRAHKALPSVQRLRIYQEINHLSVRLPGEPERKLNKDDRDLLVKKALTTGKVTFDSMRKALKLPQSARFNLESEKRKHLDGEKTAAALAARARWGKQWRDIPIVDQEKIVHRLLDEEDGEALINWLTSAYGLTRDVAEAVGDVKLPTGHGRLSEAVGHNVLDELIKDVITYDEAVIAAGYNSHFDLDSDDEVHDRLPYYGKVMERHVAFGSGEPLDSDEIRYGKIANPTVHVALNQIRHVVNDLIKRFGPPTEIVVELARDLPLSAKQKFDLEKMQRENQEVNETRRKTLGRLGEADSSDNRFRLRLWEELNPTNPLGRRCPYTGEQIGIGRVFSPDVEIDHILPRSRTLDDSPANQTLSMRWANRLKTSQSPFEAFGHSPEGIDWQEIVQRSSTLPHNKSWRFSADAMVRFENEERNFLDRQLVDTQYMSRLAHTYLKRTGADVWVTPGRLTADLRWAWGLNSVLADHNQSEQASPGKNRFDHRHHAIDAVVIALTDRGLLKRVATMAGQAELRFDRRHLSGIAEPWKNFRETVRQSVHEIVVSHKKDHGLQGALHEDTAYGIVKDPISGESRLVSRKPLIKVSRKEVGKIGDLKIRGDIEALINGLSDSEMKTALIQYSSETGVKRVRIHKKEDHYKTIVHGDDYLKAVIPGENYCVDVVKTADGRWHGLGLSVFDANQKNPGEHWKVQFPDALHVMRLHKNDQIKLVCDGTEKIMRIIRLVPSDHRVFLAGHCDGGVLQKRHEDADDFFRWDWPTFDALKARRARLVHVTSSGRVFDPGPIS

SEQ ID NO: 968 - protein, 1045 aa, unidentified
  REGION 1..1045: note = Description of Unknown: Cas Enzyme sequence
MKNNLCYRLGLDIGTNSIGFALIELDGEENPLRPVHLGSRIFSDGREDKTKTSLAVARRDARGMRRRLDRYLQRRQVLMEKLMALGLMPQDRSERKNIEKFDPYNLRKKGLDEQLTNYELGRVLFHLNQRRGFQSNRREDKKADETGKIKTAVEELKSKLEEKNYRTIGEFLYHSKIKRVRSIGEGTKLAYEFYPQRDMLKAEYDLLLAKQAEFKSQIITQEIIQELKDTIFFQRPLKPVEKGKCSLISNETRAYSALPSSQRFRIFKEVNNLGIMDRFRRNREDLSDEQKNRVIAELYKRKPRTFNDLRKLLDLDSSSVFNLETEAREKLEGADTHISLEDKKCFGEIWNTITLKQQDEIVEKILDDTTNEEELFLELKETYPNIADENIKNIMNVKLDDGTMRYSTKAIEKLLPHLEVGLKEYDARKTEGFEDIRDRKELPELPPYTEILENYLGVNGRIANPTVHIVLGQIQKLVNELVKDYGKPKEIAIEFARDLKMNKKEKSKYEKEIRDNQKNNERYDEQLISSGRVPSPEYRLRLKLHTQQGGICVYSGKSISIRELLSDTVEVDHILPFSKTLDDSAANKVVVLREYNRTKGNRSPSEAFGEDNKELLERINNLPSGKKWRFLSTAMEKFENEKDSGDAGWLARQLTDTAYVAKLAREYLRYLVPDRKPNYPAIDTYPGTMTAKLRRAWGLNSLINPNGDDKNRDDHRHHAIDALVIACSNRSMLQALSMATGAGEYIDANWLKRVPQPYLEFDRAKLQEKIDNIIISHKIDHGTAGQNGSTSGRLHKDTFYGMVKNQDELKKGQVRLVVRKKFSKGALDRIKEDAIADICDPVIRQKLAYYVAEQKESGVKAEDAIELFGKDNYLRGLRVFVAKGENSLKAIKDKQGKPYRYVATGGNHHIDIYCPIKDNKELKIKAMKWYAETVSIFDANQKDFQPQWRKDHPTAKLIMRLHINDMVAYDENGKREIRRFKKTTNGLMYLVSHLVANEQADKLSWAASASQLQQKNARKIAVTPSGKIHDAGKAPMPKIGVKIDA

SEQ ID NO: 969 - protein, 1144 aa, unidentified
  REGION 1..1144: note = Description of Unknown: Cas Enzyme sequence
MNWRLGLDLGTNSIGWAVIELNKNNEPTRLIDLNSRIFSDGRDPKTKEPLAVARRTARGIRKNLYRKKQRRRQLFRQLQADGLFPQKKEEAAVLKTLNPYILRIKALDFKLEPFELGRALFSLGVRRGFKSNRKDLSDLNQSVSSLSDDVQENKTSAGKNEKMSQTDKCNHLAQTIIDSGYRTLGEFLWKEQEKNQGIRFVPERTQYYPTRKLYEDEFHAIKQKQQQYYTNINWDKIEYIIFHQRPLKPQERGKCQFMYDKERAFKAMPCSHEYRILQEVYNLRYYDSINVPHDLLRDQQNVLIKELHNHKELSFDKIRKILKIGGTFNLETENRSKLNGNSTSVIMRDSKRFGLLWDTLSLKEQDKIVEKMITAQEDSEILEILTKYSLTEEQQKSICSVIFQSGTTSLCSKLTEMLVEIMKDKRIQFDLALEELGFKHYEEQVEHFDLLPYYGQVLIGSTMGISKDLNEKNVEKKYGKIGNPTVHVALNQTRVVVNALIKAYGKPSQIVVELSRDLKNSKDARKEIEKAQGEKARQNIITNKKITDSIPSIQYPGRFERMKYRLWEELGKENLSRKCIYCGKTIGMSELYSKNIEVEHILPFSRTLLDSETNLTIAHAHCNAFKGDRSPYEAFGDSPKGYDWIEIMSRVNALGNPVKRSRFTRDAMEKFEKDSTFIARQLNDNKYLSKAARRYLTCLMNKPSDVWVIPGQMTKMLRDRWEIDSILKRKISEKEAVQFGLKDVEIGEYKKNRYDHRHHALDAMVIGLVDRSLVQQIATLNAQRKTERLEIPALLFPRVEVIEKIKNCVISFKPDHGLQGKLSKETLLGCIKEETLLPIAALREEDIPSIKSPVVKEKLNKLIEQGNMTKAKASLKDEYPFIVVFRDKYVTRVPVISLKEKNIEDVVDGGIDGSKGIRNKLRTYVAEHSSEKIEKVMQDFSQKEWNVKNSEGQIKKHTYRIKKVRCYNHDQKPIAFPCVINGKETFRYYGSDSYVCAVIWQIPPKKEGNNPTYEGQFVRYDQIVYNKKTGKQELPGKDESIHPAAKKICTLFKNDYIEFSQDGVWLKARVAGYDTNANKLDIRPIFTVQYIKPWQIATNEAVLEKGWKPQPGHNFVSINVLFGSLSAGHITVSPIGRVFRDKKE

SEQ ID NO: 970 - protein, 1101 aa, unidentified
  REGION 1..1101: note = Description of Unknown: Cas Enzyme sequence
MEQTSLDLSQAMKKVAQPQKPYRLGVDVGVASIGAAAVTDTEILGIHVRTFEKGEINGKSGRKPLNADYRRQKGQRKRLRRKKNRLLSLRRLFRRVGMIESAAIEAFPISSTSPWQLRTEGLDRRLTNEEWAQVLYHIAKHRGFQSNRRVDMDEATKLSDAAGDSPETTTNTESDSDTKKMLAGVADNKRLLAEKGYRTIGEAVARDPKFSHRIRNKEESYSHTIGRDEINAELNCLFQAQNHYGNPHATEELSEQIIDLINWRRKTVTGDDIKRMVGRCTLEPKEYRAAIHSVSAEEFRWLSTLSRLRIVTQGESRPLTKCEWDKVVDLPWRQEAITYTSIRNAIGLRHDIRSRFNIRYETGGKKTKTDTKNETTKGQSADAVTSEVKTAEKETAFKAKGYHILRKAYKAFGYDEQWDRDRFNTELLDTLATAVTFYKDDSEIQAHLETNDTPEYAIQIALRLPTLTKFSKLSNKAILKILPHMRERQSYSNACLLAGYKNHHKQYDDTPQNGKIPRSAIEHIKNTVVYRSLNQARRVINAMVKEYGAPQEVHIELARDMEKSAKKKDEIDLWMKKRKKKNDELRERFGKNLSRDELLKYKLYEEQNGQCAYSLQPIQLGRLLEPNYVEVDHALPRSRSMDNSYNNKVLVLTKQNRDKGDRTPFEYFGEDQESVDWKRFTNWVESNPQMPQAKRRKLLTKSLQKGILDNFSARNLSDTRYIARELKTLIEHYILNTPEREKTKYERCVVISGKLTAQMRQLWGISKARDVSDRHHGSDAAVIACITPSMVRRITRYLQLQERRAMPSAPGKGDEHPAVVARAIPHAPVPWPTFEHDLEAALEKVLVSRPQSRKWSGPIHADTIYGEHKDQETNTVAPTQRIKLTQLTKSNYKNIVGYDEERNKDFIDQIEERLECHNFNGKQAFGTSQSPIYRIKKNGELGPEVKKVTIKLPIKNSVFRIRRGYVKNAKNSTIYINIYQNTKTGKFEMHPVYAKDLTSSANASKSFEYSPDLQLVDTIRRGDYIEITRRNGEVISGYYATHNISTSVLELQPHDTTDSRNNRTPAIKTSLNIERFHIDILGRKRRVVRRAKNGLADDRDK

SEQ ID NO: 971 - protein, 1074 aa, unidentified
  REGION 1..1074: note = Description of Unknown: Cas Enzyme sequence
MGFVNMDTLLFNKPYILGLDLGIASVGWSVVEINEKEEPVALIDLGVRTFEKAEVPKTGESLAANRRNARSIRRLIRRRAHRQLRLNRKMKQIGLLAQQDVGKDNVVSGLPVNVWQLRVKGLDEKLTRYEWAAVIKHIVKHRGYRSMRKNEETGDNKELGRLLQGVKENNLLMQDKHYRTAAELALNEFTHYFRNKGGSYSHTFSRQLLKDELQLLFAKQREFSNSFATSEFEQFVVELLMSQRPALSGNAILAILGKCQFETTEYKAAKHSYSAERFVWLTKLNNLRFYEQGEERALTLQEIHLLIDEPYKKVKLTYLQVKTLLDLPENVRFKGLRYSEDKLPEEIEKQTLMELKGFHKLRQTFEKSGLKTEWQGLASQSEKLDKIVTALSIYKTDEDILQALEELVLSDNVKQALLNISFNDFIQLSLKALKNIVPLMEQGNRYDQAIAELYPNCKQQGEANLFLPTIPGDDIRNPVVFRALTQARKVINAVIRQYGSPARVHIETAREVGKSFKDRRAIEKQQQENRNKNERERERFKEYFPHFGEPKSRDILKLRLYEEQNGQCTYSGKAIDITRLMENNYVEIDHVLPYSRSWDDSYNNKTLVLASTNQNKGNQTPYEWLNGKDNSTEWQNFQGRINSLKIALVKKQRLLSKTISNDFIERNLNDTRWISRFLVNFIKENLQLTGKGKDRVFASNGQLTALLRGRWGLNKLRSENDRHHARDAVVVACSTLSMLQRITNYVRYNELKNIKGNQYVDPVTGEWIDLKQYQHEKLHFPPPWHYFREEVDIRICSDNPAQILKQELPDRQFAHHSFVRPLFVSRAVNQKVTGQAHQDTIRSAKRIHEGISVSKVSLTSLKISDLERLVNREREPQLLLALQARLEQFNGDGAKAFQEPFYKPDRNGKLGAQVKSVKLEKVQNTGVRVRQNKMGIADNASMVRVDVFTKNGKFFAIPVYTWQVAIGLKPNLAVVANKPESEWTEIDESYQFLFNLFSNDLIKITLKKETWFGYFIGLHRGTGAVNILAHDRSMYFGKDGMKGGIGIKTALTLEKYRVNVLGDVYPVRKEKKIY

SEQ ID NO: 972 - protein, 1038 aa, unidentified
  REGION 1..1038: note = Description of Unknown: Cas Enzyme sequence
LRRRIRRKAHRLERARELLCINKENPNDYAGKQRFDVYELRAKAIDEKIEEKEFARVLMLILKRRGYKSNGKRENNADDGLVKDAIKKNRELLLEKGYRTVGEMLYCECAEEKDGIRTYNVRNHGNYERCIAREMLIEELQILFAKQRECGNALATEEIEEKFISIFSGQRSFDEGPGKGSKYSAEYKVGDCPFESGEKRAAKGTFAFEYFRLLQSLNHMKISSCGSVRTFTEEERKRAIEKCLYKERVTFADLRKYTGLADEELFDALYYGKNQESGIAAAEKKAKFCGMPGSGKIRAKLSEDNKNNTDLIDAVAEILSYNKSDKKIAQAFGERPICQCLSQEEKDALMCVNLSEFGHMSLKALKKAIPYLERGDVYSTAMEKAGYNHANPYGEVKKSDLIDVCEKSFREELEDITSPAVKRAVSQTIKVINAIIRKYGRPVAINVELARELGKSFDERKAIEKEGKSRFENNEKIMVKLKADYGIAVPTGQDLVKYRLYEEQDCKCIYSGKPLDIDRVLRDGGYAQVDHIIPYSRSFCDAQYNKVLVLSEENQKKGNRLPKEYLGDGERWTDFCVRVNAMPLLSRKKKETLLREKFTKENGKEWKDRTLNDTKYASKFIFNMLQRRLLFADCKMGAKRVFAVGGAITSTARKLWGIQKVRENGDLHHALDAIVIGCITDGFINGLNRYSKKKELKYIASGENIIDTETGEVIKRTELMEKFPDRLPMPHENFRKEIEMRLSDDPKREEYSNEYYKFGYDGNEVEAVRKAFVSRAPERKAKGAIHLETVYSRDKAGNTVLKTAITDLKLKDGEIDNYNELAKQSDTLLYNALRKRLVEYGGDAKKAFAEPFYKPKADGSNGPLVKKVLIDQKASAPVDTGRGNAKNGSMVRTDVFCKGSKYYGVPVYALDVYRGTLPNRAVKSGKPEEQWIEMTADYEFKFSLYPNDLVRLESKKGIPFHAVNKDKDDIKCENVFAYYKGFNRNKAAMNFILHDNSYFADTIGIQNLCKITKHVVDILGEVHEVKSEKRPPVKMKNK

SEQ ID NO: 973 - protein, 1044 aa, unidentified
  REGION 1..1044: note = Description of Unknown: Cas Enzyme sequence
MEENIILAFDIGTGSLGCCVREDKEIKDLSVELLPNDFADLKEARERRRQIRTRIAHKKREEWWKEQAQKAGIEVLETGHLENGIFIRPDDRISRQFPENGDDTIYNSSLLRIAILQGKKLEGWQIFKAIWSAIQHRGYDSSLPWKNNPKRNVDEEGNPEITKDEKENQEAVKKYNDMLKDVFGDKKEYYYPCYYEAYKMGIWSPEDPDNLNKKFSNNPNPARNKDGKVDLVIPRDLIEKEIKDMLVKIGENYPYIKENLDLILYGPGKSKYAAYKSKEYRKYLGKDWEWQGLLSQKTPRFDNRLISKCVLIPRLNVCKAKDELNKEVVFLMKLKNIRYYKINGGEEKILTNEEIKKIYEKFKDKLEITGRQWTKYLKENLQGVPNPSQPKIEPSKPSGRSRFCRPALRIIKEIILSGKSPHLLYRELTENNINTNPKKGLIKEDYSFLLKMPEKWENFHIPDNRIEESKLDETERKNLIEEIFSKISNPIVKHRLKIFYDKLVEYKNKFGEPEKVIIEFVRDPNEGFYGEIRRREIIAEQNKNRKENDLAFKEAQELGLKGGEAILKIKLYREQGGVDLYDGKTIETNKIDDYEIDHIVPREDGGPDSYINKVLTSRKNNDDKGKRTPYEWLSKTENWKAYFERVKSSKTISRNKKDLLVSSNAKELVEKYTQLAETAYIAKLSQKICHLFFGWEQGTEGSKRKVIVANGGLTAKMRNAYNLNKILHTGLSDEEYKELCRSGNIDKKNRDNPRHHALDALVLSMLPEIRMNDKKKDFFPIWFNPDYCKEKLEQCFPKKIRYEKPKLAETIYGLREIMDDKGNKKYVFVSRLVGDVKNIEGYYDIKTAKKYLDKIFSDKIRKDFKEKLDSNPSDEEWKNFLDNYFAGGKPKKILLKVSELYNYEDIKDFLEGKVKNCGEFIKGKLPGQYLKQKKEAYGYFIYKNERGKWIRDVIYAFDSVFNKMKEIKLKYKEAYFFRSGMLVEIQKDFNIKLKGEDVIIPKGKYYLKTISDNNFCKIETIDSSKEFLINIKYLMEDGLMKPIS

SEQ ID NO: 974 - protein, 1087 aa, unidentified
  REGION 1..1087: note = Description of Unknown: Cas Enzyme sequence
MPDNLIFSFDIGTGSLGECVRRGEKIEHLDSLLMPAELASTKEARDRRHLIRTRLAHHKRENWWRQCAEKAGIEVLETRQPIYEKKTGKLIEHKPDPRMLREFPEKGDGTIYTSCLLRIALLQGQKLESWQIFKAVWSSFQHRGYDPDVPWANKKGRKTAEEDKPTEEISAKEKKEADDEKANRKASEAFVRYFTDNNIPEQYISPCYYEAHRLGLWDPRQARAFKLRIEKPTTEPARNSGEEKRMPAREMVSKEITALLEQARKQYPKLPPTEYIMYGEAGKAYPSYNCETVLVKGKKLPAQAITGHEIEAQGVLGQKVPRFENRIISKCCLIPRLNVCKAKEQLNKEVQFLRALQNLRYKDSNSHDKALNVDQVKNLFEQFIPRLLPPAGKSAPKETITAKMWHTWVDKNLPGCKVHPAHTDVKAPKLGERSRLCRPALRLVKELILSGKDPKPFYAEKVAACKNTDEHKGLIKNDHKFLQDMGDSWYKIHIPDNRREEASLAQSEKAREQKIAETIGEVNNPVVRHRLNFLLSRLRCLKNKCKSVPDKVVLEFVRSDFMGEIAKRDYDIQMKRNQMEKDEAHKAAFALGLTGDGLTKMRLYREQGGMDFYDFSNTPKLTPEDVADCEIDHIVPRSKGGPDALYNKVLTRAEHNKNKKDRTPFEWIGEDKEKWRMFCERISACNALERKKKKRSLLTASDYKELLDKYTHLAETAYTAKLAQKIICLYFGWPQGTKGSTQKIVVSDGAQTAAIRRRYKLDRLLHKEMTDDDFIKLARQTTQFDKKNRGNPRHHALDALVISMQPELKYDPASDEDKLPKWFTPDLCKTALETVTPHSVAFEKPKLAETIYGVHLAKRDENGKPSEYVAVTTAKTSNTKPTRVEDWASLSVKEAGKRSEKIYSPDIRADFERKLSENPSQEEWKTFITGYRCANGTRPKKIAYIESRDIAPASNGKAPDTFGEFRNAQMPGQYIKDKKEHKGQLVCQDEKGKWEVVPVYVWESLWKKSQEMRKKYKRVEFFHSQQLVEVQKSCNVPAGIYKLNSIMISGQVLLTGMDGTTVPTKPGIGHLIDAGNIHSAQKKSGKI

SEQ ID NO: 975 - protein, 1174 aa, unidentified
  REGION 1..1174: note = Description of Unknown: Cas Enzyme sequence
MSILRLGLDIGSNSIGFALLNINESKNQIVFDELERNSIVFSEPSNAEDRRKARGARRRNERKSTRNIKARKVFVDFQIAAKEFIDDTTYYINNLKPSTRDVYNLREKAVNGAQLTKDEFLLATYSILTDRGYNNMFAIDSSDEEEGKINEAINKNKQIYSEENYLLPSMVLTSHRKELEKKYQNIPIRNKADDYRNSLSRDMHKEEFKKVVLSQLSNTEIFLIPEECNKFIENILNEDEINSPFYQRPLKSFEDMVEYCTFYDKYNPKGSYKRVPLANIKNIESTLRQKLDNHEIIESKTGVIATLSKEDIDKVIDFWTDTPSSSKIDFKNILKSAGFKNFELFAGKNVSDTILDIKAYIGMQEILKKYNIDFKTKDNEFYNDVLLQLYYFKNKKLRVEKINDLIKKYDLSLDINFSNEIASLSNMDGFGSLSLKFINEILDTMKAFNLKHHEALEKLGYFSKHIGMPTYNYLPPLEPTKADIRWLQEKIPYFDMKHLFYQPMISPKVKRVISVLRKLINEIIFKYGPIDEIVIETAKELNSTSEAEQIKENQAKDKKKNDEAKKYLKDKKIVENDKNVERAKLFIEQRCKCLFSGENITDDDAFDENKTEIEHFIPRSIIWINSYKNKILVKKKYNQNKSNQNPIAYLTSKGEWEKFKNRVEELSISPNKKEWLTNEEIINSAMAKDNWQDSYLNDTKTATRVIQKYLNHYLFPYENAHGKDAKKHIFSVTGRAINELKYLWGINAIMPKDENGKKDRNTNYHHTLDAFTIALCSNSAIKNLHDYFKQKENKFKTQAIRENLKASLPKTSTGINIVEHLKSIVKKYEANELYVCPYNKRKTNMKGFKDGNLKLYITKSSNGKEILAEIEKIDVNINNILMKPKKQGQGFERRCDDEVLSYVKSIQQRLDSNKQGKIIKAMEIYTHELLVLRSKIEPLDEQIKEIRKNLKISKSKKEHLEENEQILAQIKPLEELRDMLIKQQQELRCSFATKNGKQQIVRSLRLPKIKLEESKADAIIFTARKENKINRLNVENFKKAIENKEPFLIKANESTLNVRLFETKSKGQAVGLNYFSSIANKIDTKINERYTGEIDEKSTKTILYKNDIIKVRDAKNQVSNIYIFNGGGNISGGNNKLEVKGINSLLTQRLFITLNKLTIASKVKIDFFGNITED

SEQ ID NO: 976 - protein, 1174 aa, unidentified
  REGION 1..1174: note = Description of Unknown: Cas Enzyme sequence
MGSLKIKKVLGLDIGSNSIGFSLLELSENNNEIIFNELTSNSIIFSEPSDASDRRDARSSRRRNERKSARNKNARSVFIGFGIADKSFLIDTTNYLNDFKLKDNDVYNIREKAITGVNLTKEEFIISTYSILTDRGYNNMFSISNEDGVINEAVTKNSKEYIASSYKLPSMVLTSHRKELEDTFQNIPIRNKKDDYKNSLDRDMHIEEFKNVVLSQSNNKDIFSSHEQCEEFINEIIVGKYNSFYQRPLKSFESMVEYCSFYDEFNPKGSYKKTPLANIRNIELTLRQKIDNHSCIDKNGEVKNLTKEDIDTIVYFWINTPSSKEINATNIFKSAGFKDIKLNINEQSSQVILNIQAHRNILDILNKYNVDFANTQNSFYNEVLLELHYFKNNSSRVEHISSIIKKYNLSLDDDFVQELADLNNMDGFASFSLKFTNEVLEMINKENKTHHEALESLGYYSKYVGMPTYTYLPPLEPTKADIKWLQENISYFDTKHLFYQPMMSPKVKRVISILRKLINDIIKKYGAIDEIRIETAKEMNSKTEKEKIDKNQSKDKKKNDDAIKLLKNSDLNLKETPKNIERAKLYIEQGRNGCQCLYSGEPITLDEAFDENETEVEHFIPRSVIWINSYKNKILVKKKYNQNKGSQHPIDYLNSIGQWENFKGRVQSNFMAFNKKDWLTKEDIINSVMAKEHWQDSYLNDTRSATRTIQKYLNHYLYPNETLYGKGEKRSIFSVSGRAISELKYMWGIHTVMPKNEDDKKDRNTNYHHTLDAFAIALCSNGAINTLHSHFKKKENKFKTMAEKKKLTSNIPTTKNGVNVVEHLKSLVEKYETNKLYVCPYNKRKTNMKGFKDGNLKLYVTKDPKDETKEILAEMEKVSIDSSILIKIVGGFPKPRSDKEVVEYIISLQDRLNPQKQKNIIKAIEIYANELIELRNKTFIVENNIKDIKKTFKTGIQHKEYNATINENLKPFTEQNNTLSKQIQELKCSFAIKNGKRQIVKSLKLNKLNKNNKPDNTKADAIIFPSRITNKIERLTLNNFKNAKEIGEPFIIKINESTLNINIFTDKKQGQLVGLNYFSSIANQNILPKFKKTLDETNTYEMTIYKNDILGLYNKDNILQYIYSANGGGEIKAKNVIALNKINSNSNDLVKISVGKDKKIKKMTIDFFGNIKEV

SEQ ID NO: 977 - protein, 1174 aa, unidentified
  REGION 1..1174: note = Description of Unknown: Cas Enzyme sequence
MMKKVLGLDIGSNSIGFSLLELSEQNSEIIFNELTSNSIIFSEPTDATDRREARGSRRRNERKSARNKNARNLFVDYNIANKEFVSNPTSYLNNFQLEDNDVYNIREKAVLGASLTKEEFILATYSILTDRGYNNMFSISNEDGVINEAVTKNSAEYLANDYQLPSMVLTTQRKKLEDTFQNIPIRNKKNDYRNSLDRDMHRVEFKNVVASQSHNQEIFASSEQCEKFINEIVEGKYNSFYQRPLKSFESMVEYCSYYDEFNPKGSYKKVPLSNVKNIELTLRQKIDNHECINSKTGEIVILSKDNIDSIVKFWINTPSSKEINATNIFKSTGFKDTKLNLHEQLSQVILNIQAHKNILTVLNKYNIDFQDTQNSFYNEILLELYYFKNNSSRVEHINNIVNKYNIKVDDAFVQELAILENMDGFASFSLEFTNEVLEIIRNENKTHHEALESLGYFSKYLDMPSYDYLPPLEPTKKDIQWLQDNISYFDTQHLFYQPMMSPKVKRVISILRKLINDMIKKYGKIDEIRIETAKEMNSVKEKEKIDKNQSKDRTKNNDAIKFLKAHNLKESNKNIERAKLYKEQSKNGCRCLYSNEEITEEDAFDENETEVEHFIPRSVIWINSYKNKILVKKKYNQAKGSLHPIEYLKSKGKWEEFQNHIINNTFMSFAKKDWLTKEEIINSVMQKEHWQDSYLNDTRSATRTIQKYLNHYLYPKENLHGKAEKRSIFSVSGRAISELKYMWGIHTVMPKNEDEKKDRNTNYHHTLDAFTVALCSNSAINTLHSHFKKKENQFKNKAQKKKLTANIPKSKEGINVVEHLKNLVERYETNKLYVCPYSKRKTNMKGFKDGNLKLYVTKDKNDKPILAEMEKVSIDSSILIKTVGGFPKPRSDDEVMNYIQTIQERLDNLKQKKIIDAIEVYATKLTTLRSKIDGVESEIKKLKKAFKTGKQHKEENDSINESIKPYSEKTKILSKELQELKCSFTIKNGKRQIVKSLKLKKIKISETGADAIIFKDRIERLSVSNFEKAIKDKEPFVAKMNESTLNVELFNTEKRGQAVGLNYFSSISNDINTKINDKFIEEIGNNQSNLILYKNDIIKVNDSKNLKEEYYIFNGGGKINVANKLTIKNINKNSFYKIDRKGNKKEIKEDAVSPGKNTVISIVNIDFFGNIKEG

SEQ ID NO: 978 - protein, 1173 aa, unidentified
  REGION 1..1173: note = Description of Unknown: Cas Enzyme sequence
MKKVLGLDIGSNSIGFTLIELSEKKSPIIFNELASNSIVFSEPNSAQDRREARGSRRRNERKSKRNKKARKIFESYKLVNQNFISNPTQYLELLNVENKDVYILREKAVSGISLSKDEFVFCLYPILTDRGYNNMFSTSSEDGVINEAVTKNAKEYEEKSYKLPSMVLTKKRKELESEYQNIAVRNKKDDYSNSLDRAMHIEEFINVVSSQAYNTKLFNSPSEAQDFIDEIIDESEVNNPFFQRALKSFENMVAYCAFYDKYNPRGSYKKVPLSNSKNIERTIRQAIDNYGVIDIKTGEVQTLTLENKNEVVNFWIQTPSSNEINAKNILKSVGFNNLVINIPESSSQVVLDIKSHRKILDILRKYEIDFSGKDNDFYNEVLLILSYYKNESSRKEELYKLIEKYKFNLDEELINDFSLLENIDGFAAFSLQFTNEILELMQKKSKTHHEALETLGYYSKYIGMPKYDYLPPLEPTKKDIEWLEDHLEYFKTSHIFYQPMVSPKVKRIIGVLRKLINEIINKYGAIDEIRIEGARELNSKNEQEKIDKNQAKDRGKNKEAINQLKAYKVKESSKNIELMKLFLEQQEKCFYSGEPITIDDIFDENEVEVEHFIPRSVIWINSYKNKILVKKKYNQDKGSSHPIKYLKSISQWQNFKGRVQASKIAKNKQEWLTNEEIINSVMNKEHWQDSYLNDTRSSVKTIQKYLNHYLYPNENTYAKGEHRAVYSISGRAISELKYMWGIHEVMPKNEYAKKDRITNYHHTLDAFTVALCSNSAISTLHNFFLQKENSYKNKALKEKLHDAIPHSEDGINIVEYLRSIVEKYEKNQFYVCPYNKRKTNMKGFKDGNLKLYVAEDTKEILSEMQKVSIDSGLLEKMVGGFPKSRSDAEVIKEKESIQSRLDYIKQNKILKALDIYVDRLLELRLNIANTEQEIKSLNGTKLTKKDANLNGEIDIKILPLKEEKSFLELELKNLKCRYKVKNGKYQVVKSLRLYAQKITETKADAIVFYTREKNKIERLSVESFKNALEKKEPFVIKANESTLDVKLFNTQKGQKVGLEYFSGIANKNIGIKINSKNQELVRNAHEVLTLYKNDIIKVNNIKTGIIEYFIFNGGGNITATNNKVSIKNINKNNFIKKDKKGTVKFTNEDNITPNATTIISRVKIDFFGNIIEV

SEQ ID NO: 979 - protein, 1169 aa, unidentified
  REGION 1..1169: note = Description of Unknown: Cas Enzyme sequence
MRKILGLDIGTNSIGFSLNEVSIEKDQTTFNELISNSIIFSEYIKAEDRRKFRSGRRRNERNSRRKQIVRKLLYNFSFANNTILTQPIKYFNKLSNNQNPYILRQEAVNGKNLTKDEFTFALYTIVTRRGYSNQFKTEESKDDGVINGAISKNKELYLKNNFAIPSLVLSSKKIELGKEGFINTNIRNKKDNYNNSLDRELWQEELEILLKSQKNNIELFENNNKYELFKNKLINGIRENSLGIFEQRPLKSMESMVGFCSFYNLHHQNPQKRVSRSHISSIEFTLRQRIENSILGNLIFNSKTGEVCTPTKEEINNTIEVWLKKPPTQVINTKNIFDKAGLKNIKIKTAEKQDDTILDIKLHKQILEIFKNTKIEIFEKDRDLYTKILEKIHYFVNKEQIVKELNKLNTRQLLDDETIDKLSKIDKGTKESYASFSLLFINALLIKMKEGKNYQDSLTELGYFRKYLNIKPYDYLPPLNPSKDDIKWLEKNVKNFNREYLFYQPLISPNVKRVISILRKLINDLIKKHGKIDQIIIETARELNSKKEEEQIKDAQKQNTKEINEAKKALINDYDITNKNILRARLLIEQKAKCLYSGNPMTLEEALDETQTEVEHFIPRSKIWINSYKNKILVFKKYNQNKGNQHPITYLKSKNTWKDFKDRIEENLTNKNKVFWLTNEDNINKNWKRENLEDRFLNDTRSATKIIANYLQHYLYPKENEHGRGERNTNVIRVTGKAINELKHLWGIDKVQPKNEHDKKDRNTNYHHTIDAIVISLLNNSAKKALNDFFKQNENGFKTKVILENLSSRFPKTKAGSSLVDFVKDKVKKYENNEFHVCPMMKKRDNIVGFKDGNIKLYFDKNKEEFHQIDKKPIDKNLLFDQNGKDVNDSEVEKRVLELVKSLDLPKQNNIKEAIFIYKENLLHTRAEIKSIELQIKDIKGNLPNKKDYIDIKEQIEVLEKEKQAQINIQNQPCFLLTSKGQKQIVRNIKVKTKSASKVDSVIITDKTKTSRVQRLTKDIYDELKSNQIPFVAKLNDTTLNVDLYNTEKGQVIGLNYFSSIKNDIPANINPSKYHLIKSFEDKITISTGDLLEIENLKDNSKKYYIQSGGGNISKSNHKLRVEFINVRSIFITNKKGERKEKKFLEPTINEEVFVRKVNIDFYGNITYV

SEQ ID NO: 980 - protein, 1170 aa, unidentified
  REGION 1..1170: note = Description of Unknown: Cas Enzyme sequence
MLKVLGLDLGTNSIGFALNEIEEKDGVIVFNELASNSIIFTEYMNAEDRRNFRSGRRRNERTSRRKENTRKLLVSFNLATKNILDNPIEYFNSLTKLYKEPYTLREEAIKGKRLTKDEFTFSLYTIISRRGYTNLFATQDDEKEAKESEKINSAIQNNKNIYKNNNFLLPSKVLTVKKENLEKDGFINVAIRNKKDNYNNSLDRKLWQEELEKLCDSQKNNKELFKDLEAFEKFKDKLLNGVNNNSLGIFEQRDLKSVEDMVGYCSFYNLYHKNKQKRVINAHIKAIEFIIRQRIENSISGNLIVNKKTGEFESLSKEDIETTIKFWLETPNVQKITAKNIFKNVGINDLEIKTSDKQDDTVQDITTHKAISEIINYEMIIKNEDFYSELLEVLHYYVSKEQIIAEILKINKDKILTNEQIEKLSNINKNSSSYMSFSLKFIDELLQKMKKGISYNDSLTELGYFKKYTNMKAYEYLPPLNPKDEDINWLERNITNFKKEDIFYQPLISPNVKRVISVLRRLINKLISEYGKIDRIIIETARELNSKKDEEKIKKSQEQSNKDKKEAEALLKNMNKEISSKNILKVRLLKEQKSRCLYSGENLTLEDALDENITEIEHFIPRSKIWIDSQKNKILVLKKYNQNKSNQHPITFLKSIGEWENFVGRVNEYILNKDKKIWLTDEKNIERIYNDEKLEDRFLNDTRSATKIVANYLEHYLFPKQNEHGKGEVNNNVIRVTGKAISELKKLWGIHEVQPTNEDGKKDRDTNYHHTIDAIVISLLNNSSKKALNDFFKQKEDKFKTKAILENLKNRFPISKSGKSLFEFVKDKVEKYEKNELYVCPFMKKRENIRGFKDGNIKLIWDEEVNNFVQIDKIEISKKLLLNDFGRDLKDEEVKKEFEKIKDKLNFPKQNNIKIALEEYEKRLLEIRTKINSINEDIKQEQSKLPRDKKAIETVEILELKQKIEKLKQTQKELVKELEIPCYFLTKDGKKQIIRNLSLKSNSVTKADSIIITDKKQKNRVQRLTKEVYENLKSSKIPFVAKLNDNTFSVDLYNTSKGQLIGLNYFSSIKNDVEPKIDEKKKELITNFEDKINISKNDILEIIDLKNSKKEYFVFNGGGNISSGKNQIELKSINKKEDKRLFITLNNNIIVKLIKINFFGEIFYEDFKKN

SEQ ID NO: 981 - protein, 1204 aa, unidentified
  REGION 1..1204: note = Description of Unknown: Cas Enzyme sequence
MYRGKKMGKINKTVLGLDIGSNSIGFSLLILEEQNGQIIFEELTSNSIVFSEPNTAEERRKARGARRLHRRKSTRNKNVRQIFVKYGIADKLFVTDTTGYMGNFKVKSNDVYHLREDAVLGHYLTKDEFVLATYSILTDRGYTNMFALVEEETEENKKQKKEDEKLNGFIQKNKDKYLANKYPLPSMVLTSYRKELEDKYQNIAIRNKKGDYRNSLDRDMHKEEFERVVRSQSTNKDIFESIENCETFISEIVQGKYNAFYQRPLKSFEGMVEYCSFYDEFNPKGKERRIPLSNIRNIELTLRQNMDNYKVIDKNGHIRAAIKDEKDQALDFWLNSPNADKINNKNIYKNAGLKDIKIYINDDKELLILDIQAYRAMLEILNKSNIDFQDTQNTFYNEVLLELYYYKNYSSRVEHINKIIHKYNIVIDDSFAEDIARLTHMDGFGRFSLKFANEVLELMHEKELMHSEALDSLGYNSKYLDMPSYDYLPPLEPSAADIAWLKENITYFDTKHLFYQPMMSPKVKRVVGILRKLINELIKKYGKIDEIRIETAREMNSKKEAENITKNQTDYNRKNKEAEKFLKSNDIKETHKNIERAKLFKEQECECLYCDKNLTRDEAFDETMTEIEHFIPRSVIWINSQKNKILVHKKCNQNKGSQNPITYLKSIGEWENFKGRIKLHPKNPKYKWLTDEDTINSAMAKDNWLDSYLNDTRSATRSIAKYLNHYLYPNTNAHNKGGENHIVSVSGKAISELKYMWGIHTVMPKNEEDKKDRNTNYHHTLDAFTIALCSPSATHALHNHFKKNENKFKTKALKEKLASNMPISSDGKNIVEHLKVLVEKYETNTLHVCPYNKRKTNMKGFKDGNLKLYVTKEKDKNKEILAEMEKVAIDTSLLVKNVGGFPKPRNDDEVRKEIASIQERLNPEKQQNIIDAIEIYVDELLNLRNKIDVIDKEIEKKKKTIKIGKQHKEVNEIIKAEMQPFQDESKSLSRELESLMCSFSVKNGKKQIVKSVKLHKVKISKTSADSILFSRRDDKSIERLSLSIFKQAIKRKEPFVIKENESTLCVELYSHPKQNQVVGLKYFSSISNPHIKTKINEKYNNVFDDVEPSLTLYKHDVIKVINIKDLTENYYIFNGGGNVSSTQTGASNKLTIKNINLNTFIKINKKGVKNQFLEDTVTPSKTKVIAKVKIDFFGNITEDKQNEK

SEQ ID NO: 982 - protein, 1196 aa, unidentified
  REGION 1..1196: note = Description of Unknown: Cas Enzyme sequence
MADLKSKKVLGLDIGSNSIGFSLLKLYEQNGQIIFDELASNSIIFSESHTAEERRLARGARRVHERKSTRNKNARKLFVKYQIADKDFISNTTQYMQKFSINDTDVYRLREKAVAGIDLTKDEFVLAVYSILTDRGYTNMFALVEEETVDNKEQKKEDEKLNGAIQKNKDAYLANNYALPSMVLTSQRKKLEDSYQNIPIRNKKGNYNNSLDRDMHKEEFRKVVLSQIENKEIFDSKENCKAFISEILESKYNSFYQRPLKSFEGMVEYCSFYDEFNPKGSEKRMPLANVANVELTLRQSLDNYEAADKNGEVKKFTKDEKDKVVKFWLNSPNADKITNKNIYKNAGFKEYKIYINDDKELLILNIQAYRAMLEILKQYEIDFKEKNNIFYNEVLLVLYYYKNYSSRVEYITELIQKYHLKVENAFVDKLAKLTYMDGFSSFSLKFANEVLTSMKTENKLHSEALEALGYYDKYVDMPSYDYLPPLEPSRADIEWLQSNISYFDTKHLYYQPMMSPKVKRVISILRKLMNELIKKYGKIDEIRIETAKELNSKKEEDAIKKNQTEFNRKNNDAEKFLKANNIHTSNKNIERAKLFKEQECQCLYCGASLTKDEVFDESITEIEHFIPRSVIWINSQKNKILVHTKCNQDKGSQNPITYLKSIHEWENFKGRIKLHVKNPKYKWLTDESIISSVMQKEHWQESYLNDTRAATRAIQKYLNHYLYPSENRHNKGGKRYISSVTGKAISELKYMWGIHTVMPKNSEDKKDRNTNYHNTLDAFTIALCSPSAIQALHNHFKKNENKFKTKSLKEKIANTIPVSKEGVNVVEHLKVLVEKYETNALYVCPYNKRKTNMKGFKDGNLKLYVTKNPKDKTQEMLAEMDKVQINSSLLFKKDGLNTKPRNDKEVLDEMKSIQSRLHPIKQKKIIEAIEIYVNSLLKLRADIDAVDSEIKELSKTLKTGEKYKEENQLIREKLNPYKNKKDDLITKQQELRCSYKVKNGKNQIVRTLKLHKIKIEETKADSILFSKRKDQSIERLSILNFKKAVSSQEPFVIKANENTLCVELYEHPKQNQVVGLKYFSSVANQHIKTKINQKYKSIFDNSVPALTLYKNDIIKVVSTKDNSTSYFVFNGGGNIAGTNNKLSIKNINYNSFTKIDKNGVIKESKESAVTPNMTTIVSRVKIDFFGNITEDKQNEN

SEQ ID NO: 983 - protein, 1113 aa, unidentified
  REGION 1..1113: note = Description of Unknown: Cas Enzyme sequence
MTQKYSYSLGLDIGTSSIGWAVLDLDKERIHDLGVRIFERPEVPKTGKSLAEPRRIDRSNRHRLRRRRQRLNYLKRFFIDNNLISESRIGDMLSPTHPKKWRPIYDPYALRIKGLNERLSPEELFVALYHIAKRRGYKSNRISVEEQDIEGSQVLSAISENKLLLEKYKTKSVAKVLTLDEKFKNNKRNKINTYKNSFVRKNFEDEVMLLLDSQKKFGLKLPYEKIQTLLYGDIKNGNYNGIFSQRPFMTSELIKKMRGYCEFEPEKPRAPKASYSFELFRLAQNLSHLRIVVDRETRQLSEDEIAKIIEKAKNVKVLKYEHIRDILGYKDDQSFSFAQGMIRGKIKNDDKKNGESNKFDSMIFYHTVKKALEQHPKDWDILATNNFELLDTAGLMLTVNKDDSSLRTELSKLNISTYAVEALLPINVSGFVHLSFDSLHRITPWLLRGLNYSEAVEKAGYSFSQSLSGNKKKLPPLSEKQAAQITNPVVKRAVSQTIKVVNAIIRKYGMPYSVKIETASELAKNAQERNKIKNIQDENAEYNEKIKQKLITEFNIPTPTGLQITKFKLREQQNGVSLYSGKEINLENLFADEHYGEIDHIIPFSRCGNDGLNNKVLVFADENQEKGNLTPYEAWGGDDKKWTQFEARVRATAGLPTAKRDRLLSKSKPVEDWNVRALNDTRYISRFLRQYIRDNLDFPKIEGETGAQRVFSPSGSITSYLRRVWHVGNKNRDDNNLHHAADACIIAATSPSIIQKISSLNKYYELFKYTDKNEIVDKLTGEVLDRNQFEQHIADLEPWNDFGKEVRKRSKPYNTPSELHNELTGLKNYDEEFRLSTLPIFVSRMPKRSGKGSANDATFRSPKIVAGYIDEKGKPAIARKHRVSLHSVDLKKLYDSPIRETDPKLYKILEQRLKDFNGDPKKAFAESVYKPTKDGKRGNIVRSIKIYNTRDSRSGFLVNKQRAFVNNGKTIRLDVYKRKNYKDIYEYYFTPVYTHLINTQRIEVLPTPTGRSKNEKADFDTIRTEGNKIYATLENGFIKQFSIYPNDYVRIYFDNEIVEGYYVKYNTNDSSLKLIKHSDTSKNDSDLISKVAKTATLIERYDIAVLGDNYRWL

SEQ ID NO: 984 - protein, 1139 aa, unidentified
  REGION 1..1139: note = Description of Unknown: Cas Enzyme sequence
MKPSKYSLGLDIGTTSVGWAVIDLEKERIHDLGVRIFERPEDPQNGDSLAKPRRDARSARHRLKRRRQRLNYLKRFFVNEKILTQAQIAEILDPKSTYNKLDVYALRDKALNHKLTAEELFKVLYQISKRRGFKSNRKSVEETDREGGRVSKALTINEQLLAERGYKTVGQALAQDEKYTEHKRNKRDSYTNSFARADFIHELEEIIKSQRKYALNNVSDEALHSLIYGVDSDGLLTNSSAIMYQRPFMTEELIKKMVGECTFEKGEKRAPRASYSFEIFQFANNLVNLVFVPKNTNSRQAKREHFRLTLSPEQIAAVVTEAKKTASITYKKVRQVAGISEEYAPEYVRGKINKDDPYGEKNEFGKLKAYHDIKKALKSTPGDWMKVDNESTLNEIAYILTTEREDVEILKKLSGLALSDEATYAILKINPKNFRSFGHLSIKALQKITPHILSGLTYDKACEKAGYDFRRKSANLEQITNPVVKRAISQTNKIVQAVIRKYGKPYFIKVETARDLAKNFKDRKAIENENKDNQAFNSEIKEIIEHGYNIKPKTKRGKNLLEFLRENNVPLSQNIDANGQMITKVKLYREQNGKCLYSGDPIDFQAMIHDDNAYQIDHIVPFSRSNNDGLTNKVLVKTEENQEKANRTPFEYFGGDETRWKQFAARVNATYQTRDIKTSDKAINSENYKFNGYAMRKKQNLLIEEYKNDSWNTRALNDTRYITRFVQNYLRRTVSFAEGDDKQRVLAPNGTITSYLRKRWGLSKVREEDVLHHAADATIVAAIDQHVIYRANLYAKRGEVIRFLAAAKTMNEKTNKLTGEILDDDEFTKAQHRKDALQVLSDKHFPEPWSGFRDEVDLRTRNINRESLHKKLQGAHLYDENFLSEIEPIFVSRMPRRKATAQAHKETIRSPRVKDDNQRMVRMPLSKIKIKDVENSVLKESDAWLYSKLILLLEANDNNPEKAFAEPVYKNDKKFDKHGKPLMPVSTIKVYSTQPSGFLVNKGRAFVNNGSMIRLDVYQKQNQKGKIEHFFVPVYAHQVGKNQPAPTKILPAPKGFTDVDKTFTKVCSLYPNDYVRCYFKNTIEEGYYLAYDSASGQITVLGHSAANKEGDNRVRISPRSATLIRRYDISILGDNAPRP

SEQ ID NO: 985 - protein, 1143 aa, unidentified
  REGION 1..1143: note = Description of Unknown: Cas Enzyme sequence
MTQKYSYSPKKYSLGLDIGTSSIGWAVLDLDKERIHDLGVRIFERPEDPQNGDSLAKPRRDARSARRRLKRRRQRLNNLKQFFIDQNILTRDRIEEVLSDKSEFNKLDVYALRSKALTEELSPEELLKVMYQIAKRRGFKSNRKVEEESEKEGGRVSKALKTNEKFLAENGYKTVGEALSRDENFASHKRNKRDDYTNSFSRGDFLHELEKIIEVQKRYALKNVSDTAINEMLYGLDDDKNVVNISAIMYQRPFMTEELIKKMVGNCTFEENEKRAPRASYSFEIFRLASDLSHLVFIPRDASKRQAKRENLEIRLSSEQINKVIETAKNQKSLTYKKVRSIAGISEDYVPKYTRGKKKDGDEFGEGNVFGGLKAYHDIKTALKNLPEDWVKIDNESMINQIAYILTTQKSDEGIKAELNALPISDDAKNAIVKIKATNFGSFCHLSIKALQKITPHILNGMTYDKACEAAGYDFKKQSASLEQITNPVVKRAISQTLKVVRAIEHKYGKPYFIKVETARDLAKNFKERNAIKKENEENQGYNEDIKSIIADGYEASPKTKGGKQLLSHLKELNVPLNKNADFNGQQIIKVKLYREQNGICPYSGKPIDFDTMLQDDNAYQIDHIVPFSRSNNDGITNKVLVLTEENQKKSNKTPFEYFGADENRWKEFVARVESIYKTRDIKTDDKVTNAINYKYNGYAMKKKQNLLLQDYKNDSWNVRALNDTRYITRFIQNYLRQNVDFAEGEEKQRVIAPSGTTTAYLRKRWGLAKDRSEDVLHHAKDAAVVAAIDQKIIMQANLHAKRHEIKELLAATKTMEEKTDKLTGEIIDEDEFNKAQRRKNAMLVLSSKHFPQPWDGFGKEVMKRTLNVDIKTLQNELRGLDNYDEEFRLSVKPIFVSRMPRRKATGSAHKETIRSPKVKDGDQRTVRMPLKKIKRKDVENSTLKESDKWLYKKLLERLDACDDNPEKAFAEPIYKNDKKTDKNGNKLSPVSTIKVYSTKPDDSGKYINNQRSFVDNGSMVRVDVYMKNIDGREYPFFVPIYTHSVKHSTRKIRPTLKGLSEIDETFKYICGLYPNDYIKIKFEDEGKNVEGYYIQYGSSNAAIDLLPMHASGKDQRITCSARLAIKIERYDISILGDNYRWL

SEQ ID NO: 986 - protein, 1017 aa, unidentified
  REGION 1..1017: note = Description of Unknown: Cas Enzyme sequence
MRIFGFDLGVASIGWAVVDIDKENDNPEAGRAAIGKIQQSGVRIFSKAESTDGSSLAAPRREKRLVRRALRRKALRMKEIRALLENSGLGSQNIVVNADDIDVWALRAQDAFCRKLSARELSRVLIHMAKHRGYKSMRKSAEENDKETGKVLVSIARNRESMGEYKTMAQMIYKSNCDGARKYRNGDGVYDNSIPREEIERELNYIFDAQQKYGVFTEDLLEQYKKIAFRVRPIQSVGKMVGLCTLEPNCLRAPKESPTAELFVALTKINNMKIVIDGEVRSVDDAERAAILELLSKTQTVKYKTLHNKIWKGKDVVFRGVKEESQDFYSMTGWHKLKKIMDEADMADTRMLDRIMKVVATQKDDSAIEKELRRKKVPEKYIVELKKLCTSKFINLSLQALYKIVPEMMRGLTYDKACDGAGYDFKSKVSGEVKADNGCIAEISEWTHVPVVNRTVAQFRKVYNALVRKYGIPDQVNLEVGRELKNNFDDRKKIERKQNENRDKTEKARAEYEALISRKVTTKEVLKYKLYQDQGGKCMYSGESIDLEHLDNYEVDHILPYSRSLDNSYMNKILVKYTENQIKGNKTPYEYFGNTLRWDDFVVRVSATKTLGARKIYNLLNKDFETTEDDFRKRNANDNAYAARYVRQVLNTAFPDLRVDVRAGALTHYLRGQWGLEKSRTESDRHHAQDAIVIACATPGMVRYLSTISGLFENKRNEKGKPWWNNLKQNIQEPWAGFRADVFRSVDDVFVSRTVRGKATGSVHKDTINSPKSSKGSLILPRGRADKENMFRMDVFKKDGKYVVVPIFVADTVDKKRQDIFYPQPAKAEHSVAIDGTYEFVMTLHKEDYIKIVTVDDKVYEGYIIQCDMPRGKFVFRNSDNSAVFSVKTDTFEPGDFIVIDGNLCKVMDYLAGKLRALSPNGIVEEVEAVKKQTRKGKQIQTIDKYEKRSKQKTINIGTVKNLQKFQIGVLGDMSEVKSGHRAPVCAIKLQSEKRKGRKQPKRNKNGLANPSTNETM

SEQ ID NO: 987 - protein, 1073 aa, unidentified
  REGION 1..1073: note = Description of Unknown: Cas Enzyme sequence
MNKTKYVLGLDVGVGSLGWSVVDLDENNKPRRLHRAGVRIFSLPENPKSGEKLNVNRREKRSQRRVINRRQNRLKELKRLFVDAKIVQNISIFSNKEYIEIDPWKVRSDSLDRILSGQELSKSILHIAKHRGFNSNRKKQSDKEGGLYKPYIEKNELLMSEKGYRSIGEMFYKDEAYATRKRNTNDSYVNMLSRKSLLEEMKNILKKQSELGNKLLDEKLRDKIVEVAFRQKSFSDEALIKKMVGYCTLERTEKRSAKRAFSFELFSSLSKLNNFRMYRSENRYNEIILETEQREKIANLLLSKHEIKFSEIRKTLDIDKTILFKGCDYYSARKKLYTKPEDMLKINEEEIIKKAEEQKFLSMKGFHQLINAIKKFSEPYLDKYANNYELLDEIAYIITLNKDETECVEKLTNLGIEKELAEFLFQEISYEGFGHLSLKAIKKLLPHLKEGKLYSEAVAIEYPDNKQFERFRKLPPINQEEIRNHIVMRALSQTRKVINAIVDKYGSPTYINIELARDLSKDFSERRKITKLIEENRERTEKEIDEIKELFDINYPSGTDIIKYRLWKEQNEQSIYSGNHINPDILFTNATQIDHAIPYSRSMNDSYKNKVLCLVKENQEKKDLTPYEYLGEKDNSEKWNQFEARIESLKMMNPYKKKNLLRKEVPKAGDEIFKTFVERDLNDTRYISKYLKNLLEDHLEFAESEMKRKVFVYTGVFTSIIKRRLGLSDKDREINNRHHAIDATLLAVSNPGYIQQVSAYSQKIEKDGDYFKKIKQNEYKFPEPWTDFHKDIEQRIMSDEPEKILEISALKDLYSDMPNEIEPLLVSKTPNRDVDGSAHDDTLVSPKLLETGTGYLLKRVSIDSLKKENIDSIYGDDLIKEVIRERMNLHDNDSKKAFIEPIYKPSKNGKPNIIRKVTLKEYTSGTVSLNNGKSAAGNGKMVRIDIFTKNDKFYIIPIYVNDTTNASLPDRAIVANKPETGWELIDDTYNFMYSIYPNDFVRIEKNGQVIEGYYNFTDRSTGSIKVSQHDNENGKSIGLKTVDKIEKYQIDPLGNKFLIVKEKRVGFKENRNK

SEQ ID NO: 988 - protein, 1130 aa, unidentified
  REGION 1..1130: note = Description of Unknown: Cas Enzyme sequence
MKYSIGLDIGITSCGWSVINLDKKRIEDLGVRIFNAAEDPQKHISLALPRREKRSSRRRFHRRRARLNYLKEFFVELNLLDESKIIQLLTPHKGQLNPYILREKALKEKLSADELFIALYHIAKRRGYKSNRRAESSSDENENKKTLHAISENQKLLIDYQTVAKVLNQNEKFAAHKRNKPNDYSNSFARADFESEITTILNKQAEFYPELTEEKINDLLYRQNYGLFFQRPFMSPELIAKMRGNCQFEKDAPRAQKASVSFEIFRLASDLVHLTYNNGQKLTPEEVAMCIEKAKEVVTFKYSHIAKILNQTHPEEIIFDYVRGLKKKDLNSDTDEAKKKALNQKFSELKFYHAIKKALIDLPEEWQKLEKNLELFNEIGFILTANKEDESVIKHLEELNLSKQAIENIASIKQNFTGFCHLSLLALNKITPYILEGNTYDKAVVLAGYNFNNKLSGDKNRLPALTEEESQQITNPVTKRAVSQTIKVVNAIIRKYGAPTRIHIECASELAKSYDKRRQIEDNQKDNQATNQKIVDILKNEYHIVTPNYLQITKYKLYLEQDGKCLYSNQPIDLDRLFTDEHYCEIDHIIPKSRCGNDSLINKALVFNRENQEKRNQTPFEAWGGDTERWQQFKTNVQANLKIHPRKKLRLLAEVPPKEDWNSRALNDTRYITRFLSNYFKRHLKFSDDSHSKKKVFTPTGGITSYLRRIWHVGSKDRSGNLHHAVDATIIALVTEDIIKQCALMNKYIELGANYTTKGINLSKFHHDIHSVIDPVTGEVIDLAGYEKIKEEVLPWPNFDTELRFRATPLAIFVNELPKDKKEPKPELAESAKLQQKNKSINTLAEWRDQFREIYKDQDELFKNSIHPIFVSRMPKRKGTGSLHQDTVRSPKGIIVDPKTQKITVNPNRSSYIRTNLENIKLADLENSIIKTDDESLYQQLKQLLEENDNNPKKAFKEPVYKNNIKVDKNGKPLSPVRTIKLIDDKNVKSGILLSRGTQFVNNGSMVRVDIYQKKVKGKNQLFYVPIYAHQVKKGSTRILPTTCGYDYVDETFKKLFSLYPNDYIIMKKDNNTIQGYYIKYNTSNSVITHISNLMPGSTNFKETTGRSLTEIYRLDISILGDNYPWEKLY

SEQ ID NO: 989 - protein, 1098 aa, unidentified
  REGION 1..1098: note = Description of Unknown: Cas Enzyme sequence
MKYSLGLDIGTTSVGWAVVNLDENRIEDLGVRIFEKPENPKDGKSLAEPRRTARSTRRRLRRRRQRLNYLKEFFIDNKLLSAEQIEEILTPHKGAKNPYELREKGLSKKLDNEELFIALYHIAKRRGYKSNRKSVEENDKETGEVLKSISENKVLLEKYSTVVVTLNKDSKFKAHKRNKAGDYSNSFIRENFEAEIKAILTAQQKFYPELTDEKIDELLFKNYILEYDVKKKNGKELSEDKIKHLKVKMAVGLFAQRPFVDKELIEKMRGKCPFEPSEPRAQKASITFEMFRLASDLAHLTYNGGQKLTEEEIKKCIEKCKTTGKVTYKAIRETLGYKGDDTFEFDYIRGKDPSKEDLEKDKFVKEKNTFAELKFYHGVKKALKDLPDDWAKVESGADLFDEIGYILTANKDDEAIKNELGKLGKLSDKAITELMKLSFSGFGHLSIKALRKITPFILQGKTYDQAVAEAGYVFNAKLSGEKSKLPPLNEDEAHQITNPVVKRAISQTIKVVNAVIRKYGAPTRIGLECAGDLAKNFKERDKIKKAQDENAAENEKIVERLQNEFGVANPTGLQITKFRFYNEQNGKCPYCVESLDINQLFSDEHYGEIDHIIPFSRCGNDGRGNKVLCHNECNQNKRNQTPYETWSADTERWAKIENFARATYFGKTHGKQKRLLTEKLPKEDWSQRAINDTRYISKFMSNFIKKNLKFIDNEKQQKVIMPAGGITSHMRRMWRIGVKNREENNLHHAVDAVIVALVDQGKIQETSTYSRWTGLGAGSFKYQSALAKVTDPLTGEIINKTAYDALRESILPWENFDKEVRLRTSQPKTGDKLEIWQDQFRDLYKDQDDKFREKVHPIFVSRMPKRNGTGTANQETIRSPRGVLDKEKISYIRTRLDKVTLEILENSSVKQDDKVLYEQLKTLLEQNGNDPKKAFAEPVYKGGKTHDKNGKPLSPVSTIKVDDSKNVRSGFLINNDKQFVNNGDIIRADVYKFVGDCRPKSNIRYKYIPIYMSQLHKPKTLDDTNFEFVFSLYKNDYFVAVFDNKVIEGYFNNYPGKSRIVYTDHTSSQPGNKYIDTGKALAIRRHDITVLGDNYKWS

SEQ ID NO: 990 - protein, 1074 aa, unidentified
  REGION 1..1074: note = Description of Unknown: Cas Enzyme sequence
MRYSLGLDIGTTSVGWAVINEDRNRIEDLGVRIFERPENPKNGESLAKPRRDSRSTRRRLKRRRQRLNNLKHFFINQQLLTNEEIQDLLNPSKTAEQKAQFDPYQLREKAINSQVSPTELFVALYHIAKRRGYKSNRKKVEENSKEESGRVLMAIKQNKALLDNYRSVAIALLRDDKFKLHKRNKLDSCTNSFIREDFEKEMLAILNAQQWPDSWIEELLYSKPNGLFFQRPFMTSELIEKMRGKCPLEGTPRAQKASFSFELFRLAQDLAHLTYNDGNKLSEDQINRVVEKAKTTAKVTYKAVKEAIGFKSDPNFRFDYIRGKQTEYTEMEKREFCNLRFYHAIKKACTEIDWDRISQDLDTFDQIGYILTAYKDDESVEAELLKLNLQPETINQLESLSFSGFCGHSLTALQKLTPHLLSSKTYNQAVELEYPGQFNEKLSGENNELPSLTEAQLCQLTNPVVKRAISQTRKVINAVIHKYGAPTQIKIECANDLAKNFKERHDIKKAQDENANYNEKIIEKLKELGITTPTGTQITKYKLREQQLAKCAYCGANLTEDTLLDDRLTEIDHIIPFSRSGNDSNNNKVLVCPTCNQEKLNRTPFEKWGNDTERWLKIQALAESFNIPFAKKKRLLTEKLPKEEWGSHALNDTRYAMRFISQYIKSNLKFSDESSGKQKVLLPTGFITSYLRKMYHLGEKDRDLNNCHHAVDACIIATVSQAQIKKFAEYNKWKELGASYQTVIWYDEDGESHQKTKVEYAEMKAELLPWPRFDEEVKKRSGSTYDSSKIEKLSDFRDKFRDFDTYDETFLEKIHPLFVSRMPKRSTKGQAHKETIRSPKAEAGGRRLTRKRLSDCDLEDIKNSILPESDQALYQQLCNLYSENGKDAFKEPIYKNNQRIDKNGKAISPVKSIKVYSTEPSGILINHGTQFVNNGDTVCLNIYQRQDKFFAAPVYVHTLNRAAEILPTPNGKSKLEKADFNQLRTKDGKIFATKENGFELVMSVFPNDYIRLVYENKTVEGYYVKYGISAGTLSLISHNSTSKNDLDMIHCSVGQAVAIYKLNISVLGDNYIER

SEQ ID NO: 991 - protein, 1040 aa, unidentified
  REGION 1..1040: note = Description of Unknown: Cas Enzyme sequence
VHGCIIQTVEQPIIQKLPYILGLDLGIGSVGWSIVETESLTSVKPKRLYDAGVRIFHTAEVPKNGESLNVQRRAARSLRRRLRRKKQRQKALLRILCAQFSVQRVDILHITKPDPWSLRVKGLDYLLSDLEFSRAIYHIIKHRGFKSNRKDSVKDKKSEDGRMLSAVAANENADGDYRSFAERIVTESKRIDSPHYGRKRNTTDIYVNTPSRKSIEDELSLFCKLQKSYGNEKITEQFTSELLSILRTQNAFGTRDGILEKVGFCTLSIEEKRAPKHSIAFQEFQTWQALNNTRLLDTTANSERVLTQEEKNTLFSELEDKMTFIKARKVLSIPASTLFKGLRYSKNSIQEKQENPESKTFIQKKMYSNLKDAISSIDAHYWEQLSDNQELLEKVILELTLCTTNTELETYLAKLDIPTNVVKALTLIPSPSGFAHLSLKALRKLLPFLKSGDSYFDACIKSNFKESNEKKDVALPVVDDVMDIRNPVVLRAVTQCRKVLRALYGKYGAPLRIHLEMSRDLSRSHEERKRIEKEQENNGELKAREIKFLSEELGIENPSGTTRLKYRLWKEQGDICAYSGKQITKEMLFDDNQTQIDHALPFSRTLDDTYLNKVLVLTAENQKKRDKTPYEYLGGKQDSEQWQFFVKRVESWVMPEKKKLVLLRQNVPHSLKTSGDTLHFRERDMNDTRYISRLMREYLEMYMPFAGKERRRIIIFSGPITSYFRNHWGLSKDRSNHRHHAVDAVVLACIDSYMLEQVVSWAKNREMNNLYRLDFPTPWISFNQDVRYRLLEDRLADFWERPELAKHYSDVKEIDVIRPLFVSHAPSRNIGGRIHEDTFYSTRLLTEGKLSIKKRITDEKLLQLKNGLLSKQTKQIQTESANSYLLLKRSNAFVAAKNPPGSMIRIDVFFKEDKYYVIPVYRSDAYSNKLPMEIINTNKPKKLWTTIDSSYNFSLSVYPGDYLELINKNGEVISGYFVKAHSKSAAITLVNSTGENIQSGIGIQKMKSIKKYDIDPIGRKSLIKKEKRLQLNMRTNKSKK

SEQ ID NO: 992 - protein, 1147 aa, unidentified
  REGION 1..1147: note = Description of Unknown: Cas Enzyme sequence
MEKVVLGLDVGTASIGWGLVKLREEEYPSTNKNGQPDTKPKIVGGEILKTGVRTFKEPEDDKGKSLAITRGLARRGRWRIKRNVQRLKNLIKLAKEFNLVSNDLVRGEILEMLKTDKGVNKKEKWDIWGIRKEALERKLSDTELFRVLYHIAKHRGSYFHMKAEFLPDEEAPKNKKQKKEGADEKEKVKKGLRQIQKMLKDSPYKTIGALFYATFKQTNPKGSNKKRNAPGEYTHSIRRELLRDEIEIIFQEQQRLGNTKAKPELLEKYIDDILMYEKEADEDKLRNMMGRCEFEFDEDGKGKVLAPKESYTSEKFTLFNRLNSLTFGGGKDDIQRDQIIALAHKNAKVTFSQIRNELKLQEKLHLTFNLCSYAEKNPEYKTKLECEIRNNQLQFEDKHKLSIVNINTGETSSIENEIKEIFIKKFNPEYKKIYVYYSDIRKQLNLSGDLRFTNLKDYTKSIAEFEREYNEKNKKNPKPFNGQAEYIKQFEDKDVFVKLDGYHKIKNTLETIDSKWQQIKDNADKLDIIAEAVTYCKSDKTRTEYLRQHGITDKSIIDAVLTIDMSGLANFSKQAMNNLLKYMDGNGDGHLLFHEAKEKCGYGKKDYEKQAVLQPYKGFFEKNPVVARVISQTRKLVNAIVRDCKDEYAIDQIHIEVATELANSKDRKIDIITGQRRYKEEKVAAEERCMKWDIDPDKGDNLLKFRLAEQQGNECPYTGKKIMFASTTGNDAVYILDCEIDHVIPMSRSFNDSLNNKVLCSPEANQNKRDRIPYEWFEERYGKESEQWHIFENRVKKMYGVPYPKKKNLLRKSWTDEDKERFLSRNLNDTRYAARHIADYLRKYFDFSKSRIEIKDESRIQLRSGGITAFLRHIWGLNKDREANDLHHAIDAIVVACSTYGHVFLVSNLSKEMERKGKSWFKHFNFLREKFKPWKNIREDILSNVNQIFVSRMPRHKVTSAAHEDTVSRLDNKNPPKNRHIKINKGYAKIGEMVRADVFVDKDGMNYVVPIYAVDMFSKNLLPDKYVPDDSKVPYDEWPSADIFDFKFSLFKDDLIGINNKMYYVSFFEAATTNVNVKNIDGSMFPDKMDAQDPYTKKICYRPKSKTRKCILKKYSIDTLGNHKEIEQETRLGNDRVKRGKKPKKNG

SEQ ID NO: 993 - protein, 1119 aa, unidentified
  REGION 1..1119: note = Description of Unknown: Cas Enzyme sequence
MSNEKVVLGLDIGTGSVGWGLVKLTEEKYTDEKPDGTIKEKYKISDGKIIDVGIRAFQLPQDRQKKSLALQRGSARRNRRTTRRKAQRLKRLITLAREFNLITDNFDRDHILKPKKGDNEDKWDIWVIRKQALERKLTDTELFRVLYHIAKHRGFYFHTKAEEMQEDDAKSETGEAKKGLKKIRKEFEDGKKNGEWETIGQMFYEKFKQTNPDSKRKRNTPDKYEHSIHRLLLKDEIETIFKEQQKLGNPKAKDQLKQRYVDDILMKEEGIDDEKLQKTMSRCEFTGQLCAPRESYTAERFTLFNRLNTLELVDTRNKDNHLLLVDKQRDKIIVLAYKNPGAVTFDHIRRQLGLQDKLHITFNLCSYREKNPEYNKKLECEIKNSQLQFDDKHKVPIVDIHTGKVKVLDEEIKKIFNSKKLWPNSKKIYIYYSDMRKQLNISENFRFGNLKGYTKSAAELGSDTEYIKQFEKDDTFIELKGYHKIKKAVEENGGTEKWEQLSKDTSKLDAIAEALTYCKSDETRTDYLQKNGISDKDIIEAVLTINMKQLANFSKEALTNILKYMDSENRMRFNEAKKECGYGKIDHKKQVILDPYKGFFEKNPVVARVISQTRKLINAIVRKYDHKYPIDQIHIEVATELASSKQRKNQIAQGQKRYKEDKEAAEDRCREFNLDPEEGQNLLMFRLAEQQNYFCPYTGTKITLGPTGAVNEVYIKDCEIDHIIPMSRSFNDSLNNKVLCTQKANQDKRDRIPFEWFEETYGRDSQQWADFENTVKKTYGMPYPKRKNLLIKSWTEKDKERFLSRNLNDTRYAARHIADYLRKYFDFSISERDDIKDVSRVKLRSGGVTAFLRYIWGLNKDRQASDLHHALDALVVACSTDGHVYLVSNLAKEIERKGKNWYKHFDFIRAKFKPWNSIREDIQKAVANMFISRMPRHTATARAHKETIFSFKNTPSKNRVIEINRGYAEMDEMVRADVFTDDKGKNYVVPIYAVDIFRNEPLPDKYLHKNDAPYDDRPSAAADNLKFKFSLFKDDLISIDGKMYYVDYVRATRTKISVKEPDGSFIDKTKEEKTKEIGYRNVELKKYSVDMLGNYKEVKQEKRQGNRFEKNQKRISHEG

SEQ ID NO: 994 - protein, 1110 aa, unidentified
  REGION 1..1110: note = Description of Unknown: Cas Enzyme sequence
MKYKLGLDLGSTSLGWAVVELDENDNIVRLVDMGVRIFPDGRDFQSHKPINVKRRIARGMRRRLDRIKLRKKHTLRLLHKYGLDFDISADIARLENPYNLRARAVTEKLKVDELGRVFFHFAQRRGFKSNRKETRGEAGGKLKAATDVLRENMGDDKTLGQFLAESGKYRFSDQFDGVIIKEGAMYPTRDMYLEEFRTICAAQNVSDDMRQELEKVIFDQRPLKAPQIGHCIFEPGELRAYRYTPAFQKWRALQQLNQLGIENCGNLEPLSDEQHAKLRNILLVGFDGVKREKNGHVKLTFAEIKRQLGLSRTTRFNLESESRKEMDVDTTAFAFSEIGMADFWQALPVDSQLDILSKINDDNIEDVDLIKYLVDKYDLSEKQAEDIIKISLEDDVCNVSSKAIEKMLPFLEQGMLYHDAAKAAGYNHSDPDIPVLELLPYYGELAALRPSLMEDKNGMYRTMNATVHIAMNQIRAVVNDLILQYGDRPYAINIEMGRDIHAGAEERKEIEVQQAKNKKENDRIAAELLAAGVDVNRENIQKYKLWELLGSNPLERRCVYTDEVISFEKLYSPNFEIEHILPFSRTLDDSLANKTISRVDANRFKGNRTPDEAFNDPTSKWKYEDVWARAQKLPTATKWRFNRGALDLFLKDKDCIARALNDTRHMTRLAVKYLQHVCKDKYKDKYRVTGMPGKMTALFRDMWHLNWWKDKSAEEKYRGSHIHHAIDAFVVACVGPKTYRVLSKNTEKPENYVGKSVKDKHKYWFDGIMTPYAGFDYYDFQMKCEKTIISYRKSIKNPKSTGTIGCLHEDTAYNLEGFDKRGNAIMSRRETLPVLADKKFAKDFRRVNKTTKQTFLTETGCSNDTDDIAGKFLEWAQARGLRKVRMLKEGVDISSWVPVFRSRGDRDAFHKAYIRWYALDGISDGMMDKKAKKTQKDEELRLREQYHSAALKAYKWYIGGNNFCAEVFEIRADDRRYPKLAGKWQIEVISNYTAQQTGGVPMWRKKYATARRVMSLRINDMVMAEFSKNDKNLPRGLVETVMHQCAVVQKDTVEIVFRVKKISSDGSIYLRPHHIAKESADTKSWCASKSSLQEHKAHKVFVSPTGQILK

SEQ ID NO: 995 - protein, 1108 aa, unidentified
  REGION 1..1108: note = Description of Unknown: Cas Enzyme sequence
MKYKLGLDLGSTSLGWAAVKLNDAGAVEQLLDFGVRIFPDGRDAKTHAPINVVRRAARTMRRRGDRVKLRKKRVLQLIRKYGLDFDIRSNPILENPYELRVRALEHRLSPSELGRVLFHLALRRGFKSNRKETKGENGGKLKAATDALASAVGDGTLAQFQVQTKKFRFSNQFDGNVIKDGALYPTRDMYLDEFHRICDAQGLDKEMRAAFENAIFFQRPLIPPVVGTCIFAAGQPRAHKFEPVFQRWRALQQLNQLAILDNGQNVALTDQQRQCLVDILLYNFNGVKRDRGGRVKITFAEIKKQLGLSRTVKFNLESEQRKELNVDSTGFSFAEIGELDFWRSLTDEQQSDVLNKINDDQTEDAELIEYLVAHYGLSASRARAIIDIPLEDDVANVSVVAMKKMLPFLEGGQLYHLAVHSAGYHYGEQDVPLMDKLPYYGDLDVLKPSLMPARDGAYRTMNATVHIAMNQIRVVVNDLIERYGRPCAINIELGRDVRAGAKERAELDKQQSANKRKNDAIRAELAEIGILNPSREDFQKYKLWENLAPQPQNRRCVYTGEPITSLAALFKSGRFEIEHILPFAQTLDDSLANKTISAVAANRFKGNRSPAEAFDDPASPWAYADVWARAQNLPDGSRWRFDRDAMEKFTRHGDCIARALNDTRFMSVMAVNYLKHICSDKNKVRGLPGRLTAIFRDMWHLDWWKNHDDADTYRASHIHHAIDAFVIACMGAGNLQKLAENATHLEDFHGKTLKEKHRQLFADMYLPFPEFDYYDFRMRCEACVISYRPSVKEPAASDTVGCLHEDTAYKLEKFETGTRATMSRRIALPTTADARAKFKKDFDSLNPKTLEMFLAETGVANDANDIADQFLNWCQMRGIKKVRMFKTRVDTTTYVPVFRNRGDKNAFNRAWTEWYAAAGIARGMTEPKAKKAQQEKERRLLALYQNAAARAYKWFVSGNNFCADIFEIRSDDRRYPALAGQWQSEIISNYCATLNNGTPMWRCKYATARRVMRLRINDMVMAEFSRDNVPLLKGLEDAVRHQLAVQDTDTVNIIFRVKKISSNGAIFLRPHYIAKEDADTKTWQANATSLQKYKARKIRVSPTGKVLE

SEQ ID NO: 996 - protein, 1176 aa, unidentified
  REGION 1..1176: note = Description of Unknown: Cas Enzyme sequence
MEEIKQLNRKTDVPKPTDLNYRIGLDIGIASVGWAVLENDSHDEPFRIIDLGVRIFDAPDNSGELLSAKRREARSTRRRTRRRGHRLERIKKLFETEGLIDIEEFETRYKKAGLPDVYRLRYEGLDRVLTDDELAQVLLHIAKHRGFKSNSKAEETENDSDATKKKEIGAIKESISANKRIMEEKGYRTVGEMLYLDEKFKIDCDLNTNGYIFCPRNKRGEYKVIILRDVLVDEVHKIFESQRKYGNESASDKLEKKYLDIFLSQRSFDQGPGYPSKYALDGFDFGKCPFEEKNGERRAPKAAYTSELFVALQTMNHTKIVDTDGNKRAFTELERKKIIQLFHIQNDVKYSEVRKELALTENEKFYNLTYSKGKKKDSEQSIFIKMTNYHNMAKALKEKCTGEILDDNRADLYDKIAYNFARYKNDDSRLKELRALGIGEAECNDLLKLSCNKAQGLSLVAMNKIIPFLLEGRVYSEACKLAGYGDFVGDNCTGKSILLRDDEGQKIKETLNEITNPVVRRAVSQTIKVINAIIIEYGSPQAVSIELSREMAKNKKERDKIDKDMEKRCAENAKILDEIREFKAIPTGKDIVKYRLWKEQREICLYTGKKISAYELFSGDGGYDIDHILPYSKTFDDSYRNKVLVRSEANRLKGNRTPYEYLISHGGEKDWEEFTIRVEHCINDYKKRQKLLKKTITDEDTNEFKRRNLQDTQYATTFIYNLIRKNLYLKPYQNSTKKKTQQVMALNGSITSFLSRGWGLEKKDRRTHIHHAQDAVVIACTTQGMINSISEYFKYRESKLERINRHVKDESKEKFEDIVVTREQYDKQSGKKFPLPWQNFKEELDIRMARYNGAVGAIDFKTSPLEYLMAYTDVSNRINYPEWMFVKGRPGRRGVLDGIFVSRMPNHKVSGQAHKETIRSAKYYKEGGGVLDKGYVVYKVPIQDIKYINGEIIYDKNAVYFNPDSDRLLYNALISRLEQFNGNAKEAFLEPFYKPKADGTSGPVVKKIKVCEKQTSGVPVGENGIASNGDMVRIDVFCEENKGKKKYYFVPIYVSDVVKKRMPNRAATQAKIQSEWREMREENFIFSLYSKDLIYIESDKGVPLHDINKNVYSENSVFAYYTGANISKASIDGECHDKKAYFDSLGIQGLRKLEKCQVDVLGNISFVHKEKRMLFN

SEQ ID NO: 997 - protein, 1150 aa, unidentified
  REGION 1..1150: note = Description of Unknown: Cas Enzyme sequence
MNFRIGLDIGIASVGWAVLENDERDEPRRIVDLGVRVFDAAEVPKTGEALAAARRGARTTRRRLRRRKHRLERIWNLLEQEGMISREEFLRRYEQKDLPNVYQLRYEALDRLLTEEEFAQILIHIAKHRGFKSTRKAGTKENEKEEGKVLEAIKQNEELMKEKGYRTVGEMIYKDEAFRIDAPWTAEGYLLAPRNKEGNYKHTILRDLLVKEVQLIFSIQRTFQNPHATESFEKVFLTILTGQRSFDKGPGNQPNGLPSPYAGDLIEKMVGKCTFEKEERRAPKASYTAERFVLLQKVNHCKIVDKEGNVRGLTKEERESLIDLAYSKRDVKYTAIRDKLKLNETDSFKDLNYSDIKVKDNETDNNSEINAFKIKEEKEIMEKRKEIMKKVETAKWISLQYYHDFKKRLPQIHWKQLSAEEIELLDTMAEILTLYKSDESRIERLQKFTLTDEQIDSLLELNPSKFQHLSFKAIKKILPYLEEGFIYKEACDKAGYDFSGTEAKEKSVYLKGEVISGIWDDIPNPVVKRSISQTIKVINAIIQKYGSPQAVHIELAREMAKNFQERQQLEKQMKKNQEQNETVIKEIREYGVANPTGQDILKYRLWKEQQGICVYSGNKIPIGHLFERGEYDIDHIVPYSISYDDSYKNKVLVEARCNREKGNRLPYGYLGDKESFWNKYEALVNSIIRDARKRQLLLKKEFTEEEQKAFKERNLTDTKYITRVVYNLIRNNLYLAPYSDTTKDNKVKKVFAVNGSITAYLRKRWGLGEKSRDTDKHHAKDAVVVACCTDRMIQRISKNIQGRELAYQGNFQFIDVETGEIRNRFNFTREQWDEEYGVKVPMPWNWFRTELEMRMADDPMYFMEDLRKLGYPYNEKVEPIFVSRMPNHKVTGAVHADTIRSPRHFKEGGIVLTKTDLCSLKLDKDGEIQDYYDQGNSDRRLYEALKKQMQLFGGDAKKAFAEPFYKPRRDGKGRGPLVRKVKLEKKITSGVMLNHCTGIAENAGGSMIRIDIFKENGKYFFVPIYIKDTLEKELPNRAATGGKRKEEWRVMKEENFLFSLYPKDLIYIEKSSGIKLCESVAGEKKKEKLWAYFTGADISTVSIKGIAHDRSFKFRELGIQSLNIFKKYHVGILGERNEIKSEKRQKFHRN

SEQ ID NO: 998 - protein, 1075 aa, unidentified
  REGION 1..1075: note = Description of Unknown: Cas Enzyme sequence
NMKYTIGLDIGIASIGWAVINNDKSRIEDLGVRIFKKAEEPDGKALNLARREARGSRRRIRRRAARMRKVKEMLVKYNLVSKEELEQLYVITEENKDVWELRAIGLDELLDRKQWARVLTSIAKRRGYQSNRKIDEEDIEVGKLRKGTIENKRILEEKGYRTIGEMFYQDEKFERNKRNKAGEYHNTVLRSMLIDEIHTLFEMQRKYKNKFASKELEKEYIDIVTYQKPYITPELLEKMLGKCTFEKEEHRAPKNSYTFERFMLIQKVNNLKIDINGEKIQIPQEQKEGIMNLAYEQAEIKYSQLRKKLELPKEARFVDLNYNGTKKKEGLSEEKTIKEVEDKKFIKLEGWHKIRLALKANKQEEKFNLIKQNPELQDIIADALVRNKTDKTIKKYLENKKVDNQIINAVLNINFTKFGHLSYKAMKKIIPELEKGLTYDKACENAGYEFRGSKNTLQYKLPPVSKLDDCILNPVVLRAVSQTRKVINSIIDKYGSPTAIYIETARELSKSFDERRIIEIRQKENMENNEKLKDYIRETFKFEPKPFDIVKMKLWREQGGKCAYSGKSIPAERLYEENFVQVDHIIPFSRCFNDSYNNKVLVLTDENQKKKERTPFEYLGENKEKWHAFEEFVNLTYKFNNRKKENLLIKNLSEEKSKEWIERNINDTRYIAKFMYNYITNNLQFAESELKRKVYNINGQATAILRHYWGLKKDREESDKHHAQDAVIIACATNKNIKKVSDYSRKKILHINNETVDEETGEIIDLKYNTDITIKEPWPKFREEVEARMEDLDNNGELYALKHGNFRNYDDIDISTIKPIFVSRMPERKITGRAHKDTMRSQKFIKQGKNFTVVKKNLKNITKQEIESIIQKPEFSMLYLSDKDMYDDIYKKMKEVNFKAEKAFAEEYRKPSKKNNGAIVRSIKVPSMGSAGVRLKNQSIAENASMVRADVFEKNNKYYLVPIYVSDFAKKNLPNKAIVANKDEKEWIEMTEEYNFKFSLYPNDLVKIKKKKEKEFYAYYTSTHRGTGAINLLAVNGDKKIEGIGVKGLETFEKYQVDILGNISKVKKERREGVN

SEQ ID NO: 999 - protein, 1136 aa, unidentified
  REGION 1..1136: note = Description of Unknown: Cas Enzyme sequence
MGYRVGLDIGITSVGWSVIEDDTKGNPIRIIDLGSRIFDAAEKPKDGSPLAKERRDARGLRRRLRRKKHRVERTKRLLERYDIISKKEIEEMYENSAHVKYLFNVYELRVLGLDKKLTSKELARVLISLVKKRGYKSNSKAEETDGETGKLLTATRENEQIMKEKGYRSISEMYLKDDKFKVKDKDGDILLDKNGEPLIKIKNSIGDYKNTTLRKLLVEEIKMILNKQKELNEKITDEFINEYLKIFEGQRNFDDGPGFPSQYGGNLIENMLGKCTFEKEEKRAPKAAYTFEYFKFLQTLNHIKIEKNILKEDGSRIKEKRPLTQEEREKIKELIFSKVTVTYSDIRKILKLSENERFNMFTYKDILNYTDETNKEIEKDKKVKEFESYKKIKTALNHIEKDYISKLNTEELDEIGYGLTIYKNDDKRREYLKENTTNLSEEAIEELLKLSFSKVGNLSIKAMKKIIPELEKGLTYDKAVDNVYEDFRGKINTEKKRKLRLKDFEEEISNPVVRRGLSQAIKVLNAITLRYNTKYGKPDVVVVELARELGKNFGDRRDIEKRQNNNMQLNERVKSEIIGLGKNNPTGQDIVKYKLWQEQDCKCVYSGKTIPVEELFTDLVDVDHIIPYSQCFDDSYNNKVLVLASENRQKGNRVPYKYIKESNRNIEEYEIRVNTLIKNNKKKQNLLKQDFTREDANEWKERNLNDTKYICKYMYNLIRNHLEFSDNPNFVRKVWTVNGAITSHIRKRLGIEKVRDGDTHHAVDATVIAVTTQNMINKLTKYYQYTDGRYMNNKGEYIDLYTGEILNAKEYEQQNGIYFPEPWNKFRKELNIRTNCKTRERMIECLEAEKIYTYEDYDDVEPIFVSRMPRRKVTGTAHLETIRGIKEQDGELKTITKTELTKLKLKNGEIEGYPENCKRDDRLLYEALKNKLIEFNGDAEKAFSEPFYKPKADGSKGPIVNKVKIEAVTTLGVKLNNDKSFAANGDCIRIDVFYVENEGYYFIPIYVSDTVKKELPNKACVAAKTYYDWKEMNDKDFIFSLYPKDLIYIQGKNKIKLNPVIKNKEVIEVEEIFAYYVKSGISCAQITIQTNDNKYIQPSLGIKSLKKIEKYEVDILGNYHKVKLPEKRLPFNINKK

SEQ ID NO: 1000 - protein, 1135 aa, unidentified
  REGION 1..1135: note = Description of Unknown: Cas Enzyme sequence
MGYRIGLDIGITSVGWSAIENDSNGNPIRIIDLGSRIFDAAEKPKDGSPLAKERRDARGLRRRIRRKKHRVERTKRLLERYDIISKKEIDKMYENSEHIKHLFNVYELRVLGIDQKLTPKELARVLISLVKKRGYKSNSKAEESDGESGKLLTATRDNEKLMKEKGYRTVAEMYLKDEKFKVRDKDGEILKDKEGNQLIKIKNTTGEYRNTTLRKLLVEEIKLILDKQKELNPKITDEFIREYLNIFEGQRNFDEGPGYPSQYGGDLIENMLGTCTFEKGQKRAPKATYTFEYFKFLQTLNHIKIEKIVIQDGKKVKEKRELTPDERNKVKELIFSKVTVTYSDIRKALKLTEKERFNMFVYKDMLNFTEETNKEIEKDKKLKEFESYKKIKTALNHIEKDYISKLDKEEIDSIGYALTVYKNDEKRIKYLKENTHNLTDEAIEELLKLSFSKVGNLSITAMKKIIPELEKGLTYDKAVDNIYEDFRGQINTEKKRKLRLKDFEEDITNPVVRRGLSQAIKVLNAITLKYNEKYGKPDVVVVELARELGKNFRDRKDIEKRQNSNMQTNEKAKAEIIGLGKSNPTGKDIVKYKLWQEQDCKCIYSGQSIPVEELFTDLVDVDHIIPYSQCFDDSYNNKVLVLAKENRQKGNRVPYKYIKESGRNIDEYEIRVNTLIKNNRKKQNLLKEDFTKEDSKDWKERNLNDTKYICKYMYNLIRNHLDFSDNPSFVRKVWTVNGALTAHIRKRLGIDKVRDGDTHHAIDATVIAITTQNMINRLTQYYQYIDGRYMNNKGEYIDIYTGELLSAKEYEKQNGIYFPEPWNKFRKELDIRANCKTRERMIECLEAEKIYTYENYDDVEPIFVSRMPRRKVTGTAHLETIRGIKEENGELKTITKTELTKLKLKDGEIEGYPENCKKDDRLLYEALKNRLIEFNGDAAKAFNEPFYKPKSDGSRGPIVNKVKIESNTTIGVKLNNNKAFAANGDCVRIDIFYVENDGYYFIPIYVSDTVKKELPNKACMAGKPYSDWKEMDDKDFIFSIYPKDLIYIKGKNKLKLNPVIKDKEVIEVEDILAYYVKCGIGSASIAIQTNDNKYVQESLGIKKLEKLEKYEVDILGNYHKVKLPEKRLPFNINKK

SEQ ID NO: 1001 - protein, 1071 aa, unidentified
  REGION 1..1071: note = Description of Unknown: Cas Enzyme sequence
MRYTMGLDIGIASVGWAVINEDKSRIEDLGVRVFKKAEEPDGKSLNLARREARGSRRRIRRRATRMQKVKELLIKYNLVSEKELETLYVITETTPDVYELRAKGLDKLLSRQEFARVLTNIAKRRGYKSNRKIDEEEKEVGKLSKGTIENKKILQEKCYRTIGEMFYKDEKFEYNKRNKGGEYNNTVLRSMLIDEVHILFDIQRNLKSEYADEKFEKEYVEVITYQKPYITPELLEKMLGKCTFEKGEPRAPKNSYTFERFMLLQKVNNLNIYINGEKIEIPQKKKKEIIQLAYNQTEIKYTQLRKKLELPIEARFADLNYQIKRTEEDSEEELVKKIENKKFVKLEGWHKIRLALKENKDKFEKIEKNPELQNIIADALVRNKTDETIKSYLEKSNVDVEIINAVLNINFTKFGHLSYKAINKIIPELEKGLTYDKACESVGYEFKGRRNELQYKLPPVTELEDEILNSVVLRSVSQTRKVVNAIIDKYGSPTAVYIETARELSKPYDERMKIEKRQKENEANNDKIKEYIKETFGFDPKPFDIVKMKLWREQSGKCAYSSKPIPAERLYEENFVQVDHIIPFSRCFDDSYQNKVLVLTDENQKKKERTPFEYFGEDKEKWHKFEEFVNLTYKFNTRKKENLLIKNFNEDKSKEWIQRNINDTKYISKFMYNYITNNLKFAESELKKKVYNINGQATSILRHYWGLKKDREKSDKHHAQDAVIIACATNKNIKKVSEYSRRKLLYKNNEIIDKETGEIIDSKYNIDISIKEPWPKFREEVEARMEDVDNNGQLYALVNGKFTNYDDIDVTQVRPIFTSRMPERKITGRAHKDTMRSQKFIQQGQNFTVVKKPLKAISKQEIEGIINNPDFKNLYLSDKKLYDDIYQKMKETNFKAEKAFINEYRKYSKKGNSPIVRSIKVPSAGATGVQLKNGSIAENANMVRVDVFEKDNKNYLVPIYVSDFVKDELPNKAIFANKDEKKWIEMTEEYKFKFSLYPNDLVKIKRKNEKEFYAYYCSTHRGTGAINLLAVNGERKIEGIGAKSLEIFEKYQVDVLGNISKINKEKREGVK

SEQ ID NO: 1002 - protein, 1101 aa, unidentified
  REGION 1..1101: note = Description of Unknown: Cas Enzyme sequence
MKYSIGLDIGTTSIGWAIIDEDNKRIEKVGVRIFEKPENPKDGKSLSETRRTARSTRRRLRRRRQRLNFIKKFFKDNNLLTKEQIEELLKPENKLDPYKIREKALSEKISNEELFISLYHIAKRRGYKSNRKSAEEKDKESSKVLSAISKNKKLLKEYKTVASALNSNEKFIAHKRNKAEDYSNSFVRANFEDEAKLILKTQKEFGLNLSDEKINFLLFGNEEKGNFNGIFSQRPFMTSELIMKMRGKCSLEKSEFRAPKASYSFEMFRLAENLAHLRVVINNEERSLAEEEISKIIEKAKDIKVLKYQHIREVLGYKKDENFSFPANMIRGEIKKDSKNNGEENKFGELSFYHKVKTALSNTPEDWQKVCDNNYRMLDELGEILSCNKDDESLQKEISKLGLSEKAVEILMTINVSGFGHLSFKALRKILPFLLKGDIYFDALKNAGYDVKQQLSGDKNKLPPLSKEDSAQITNPVVKRAVSQTIKVVNAIIREYGAPYQIKIEAAGDLAKNFKERKKIKKAQDENASYNESIKERLQNEFNIPSPTGLQITKFKLYEQQNGKCAYSGKRLVLENLFSNEHYAEIDHIIPFSRCGNDSLINKVLVLTEENRQKGNLTPFEAWGADENRWAEYEARVNSMNLPFRKKGRLLAKVPPKEDWNSRALNDTRYISKFLSQYLRKNLKFAKFDNENPAQRVIVPNGSITSYLRRIWRVGSKDREENNLHHATDACIIAAIDQNVIQKISRLNKYFELFKYSAEDEVIDKITGEISSRADFEQTFEDIEPWKDFGKEVRKRTAHYESPMELRNELIGLENYDEDFRNKTMPIFVSRMPKRSGKGNINKETIRSPKIVEGYVDSKEKPVIARKQRIRLTSIDLKTLYDSPVRETDPALYEILKARLNEFGDKPEKAFGDPSNPVYKPTKNGSQGNIVRSIKVYDTLNSKSGFLINKGKAFVNNGDTIRLDVFKRKNYKGEFEYYFSPIYVHLLNAKKVEILPTPNGRSATEKADFNKNRDENGKIFATEENGFVKQFSLYPNDYVRIYAKNKIIEGYYVGYDINGGKISLIGHDKADKKNIDRVSGGTITSIEHYDISVLGDNYRWI

SEQ ID NO: 1003 - protein, 1067 aa, unidentified
  REGION 1..1067: note = Description of Unknown: Cas Enzyme sequence
MITLGLDLGHTSIGWTLIDTEKGEILDGGVQIFEAPEDEKHRTLASIRREARSTRVNNKHHKKRILNIKRLCSSYGLVDKKLLITPKNGIAPLFRKGIKKDSSLKLRTKGLDELLNGKELTRVILHIANRRGFKYDIDEESDEDAGKIKEAQGALKEEFLATNYRTYGEFLYKEYELKGKKTRNRVKKDGSSDYKFSIHRDDLEYELRAIFAKQQELKSPYVTDEFRDKVLIELLFVHEPKSLKRMIGKCSLIKGEKRASKALYSSELFVARNILINLRVKEPEEEEYRALSSNEIEALLKAGHQKKIGKKDAKTILNISQKSKFKGDEDDNLSHIVHFPSLLRMKNSIGDEVLFEKLFNDLDLYENIVDILTYEKSSLRRKTKIEELLNRSSLSLDEQRLIYEKIKTISFSGYLSISTKAVKRILPYLENGLFYSDAIEEENLKIEVEPQPYLPPLIDTDLMIPNPIVIRAITKSRHLINAILKKYRDIYNDEEWTFDRLNIELAREINTQKEKKEITTAQLKDRNNKQKAVDFIIENCGEQYVTSKNIEKVRLWQQQDEICLYSFKRISAEQMVSEITNNGDAFERDHILPISRSSDDSISNKVLVLSTENQKKSNRTPYEYFGSDKARWEKFENYIRSKEVYNKLTKAKIGKLLMKDFVNKEQEFLARHLNDTRIISKTVKNYVEKYLKFKNSTNERRVYVVSGKLTNTLRHQWGLENKNRDNHYHHFEDAVLIAFSNNSIINRLSKYYHDLETYKREGKDKPKFTKPYKNFIDDINAMIEKINVVRQPKIKNRGKVFHDNPKKGGIFKNAEGSMVRVDVFKDLKKEKYYLIPLYLKDLNKPLPTKFITAGKKEWEEFNPSKQRFVFSLYPNDLIEVETKTDTIRGYYVSTDASTANITIQSMDNIANTVFTKEIIKYTLRISIENILDSDSRKKEIENIAKLNTIKKKKPNGTLTLSMDIKINDIKASKSKKSNLSLILDELQQKYSIDKIKNNTKELDLPINIKNDNEIKLTLEFNTDYDNRALRGTGVKTKTLGFKKLQIDLLGNITELPFETERKPFIKR

SEQ ID NO: 1004 - protein, 1056 aa, unidentified
  REGION 1..1056: note = Description of Unknown: Cas Enzyme sequence
MKKITVLGLDLGVSSLGWALLEKNEHDEFCGIVAAGARIFEPGIEIDDYTGKAVSRAAERRGKRQLRRQTKRRRRRLARVRHLLQGGGMLPPEENFGENIRSFDMSLLDDFRREQPAELPNILDLPQLLPYYLRARALDRPLNKMEMGRALYHLAQRRGFLSNRKSSKSDEDAGVVKTEISEIRQKMAEYGARTLGEYFSRLSAAKDKIRRCYTARDMYEDEFDQICRNQPHLIDEELKQKLFKAIFFQRPLRSVKHLVGPCILEPTQRRCKWNNQDAQKFRILQDINNLVIIMPDHNQRILNREEREMLRSILDCRDIGKLDKNGRLSFAAARKLLSLPKGAVFSLENSGEKGLKADPIEFKLGNIMGEKWKFGSPEFRRNTITELRSFTSPEGLFKRLRDDYGIEEETARRLSEYTLPEGYCNLSLRAIKRLLPELEAGLTYGEAVKKLYPETFKPSAASIALLPPIEELKDIRNPGVTKTLSETRRVVNAIIKKFGKPDFIRIELARDLKNPEKRRREIRDRNREQEKIRDRIREEIQSFGIANPTQDDILKVMLMKECRGICPYTGRSISMHSLLVESQFDIEHIIPYSRSMDNSYLNKTLCYHDENRHVKKNDTPAEAYAGDPEKYERILAEVKKFTGPKEIVAEKLRRFQIRDCSELGDFCSRQLNDTRYASKLAKEYLGSLYGGVVDADGVLKVQAGSGGVSALLRNILNLNRLLGDGGKNRGDHRHHAVDAVVIALSEPHLINRISSFFADKDAGFKAARFYDNLREALRLPDWSGYWHDIGDVLAGMLISHHIRRRVRGALHEDTFYGKPAADSPSERTITKPLDALGPKDVACIVDHAVRKAVIAKLAELNTNEPVKVFKNHQNLPVIRGKNNTVIPIKRVKIRRNQETVRIGSGDAGREVKLGNNHHMELYSVLDANGNELRVEGYVVSIFEARERLRQGLPIFIRKQPPIQEKGQLLWQSYKFSLFNGDVIHTREEKDDSSAYRIIRSIPQSKQITYVNLNDARLLKDIKSAGDMYSAMPNTLCNKMTGKFIVNELGELRRDHA

SEQ ID NO: 1005 - protein, 1118 aa, unidentified
  REGION 1..1118: note = Description of Unknown: Cas Enzyme sequence
MNHGETVWAFDLGTGSIGEAVRQGTRFLHRASLLIPPDFAGTKIAATRRRMWRTRTAHRERERWLQQIWAAAGLPVLYGRNRDARTGEWKAGEKADRRLEQEFAEPGDDTCYTSCLLRIKLLGGEKLEGWQIFKALHSAIQRRGYERIPWAEKEARRAGKSPEDLEKEEQKKDPDYVAALNRWREFKTQVPPQFHFPCYYDASKMGLWNPAQPEKLASRITHRAESTRNVRFDRADVQAEVMRLANSAVKSLPALATTFARIASEGWEQADAKSGRKKRFPVRAQTFGDFLCHGPAGVAYASFFPKSRKEVRLHTGSADDWMGSLGQKIPRFDNRILDDCVLIPRFHVCKAEIRKCPQTGCPLPDTLLPAEVTFLMKLKNTMVADGRSQRKLRVDEVRKIFEAVSSNAHKAKPDAKEWSKKVAACFALTKAAWFRRKGIKELSLRPLPGHEEIKPPKDSGRSGFSRPALRLLRELVLSGKDPHAFHAEQLAKLIGNTDPMKGLVPKDLKFLLDMRGSWADIHIPAQKLEALAARHTEDGKLDAAAAITDLLGSVNDPVVRHRLNVFAARLREFRQRFGMPEEVVLEFVRKDFMGPKRKAELEQFQRDREKARKEAREKAKEAGAEEKSAALKYELCKAQGCLCLYCGQPFAATRLEEYEVEHIVPRSQGGPDAMVNQVLAHRQCNEAKSELTPFQWKHGKEGWDGYKRLVESHAVTLRNKKVQLLLREDAPELVNRYTALAETAWISKLAQTIVSLYFGWNNGNDAQGRKRVAIVSGGLTARVRRKYQLNSVLNPCPKDEDPFLWEEKCEKKRSDDRHHALDAMVISFIPGWMRDARKEHFFRFPEPVHGNAKAFFEREVDEVRPRFIARLKPAMEETFYGSRRILGDEYIVKRRALVDLATREVGGKLELKPLKDIKPQKIVDRAIRRLVVAFLESHPRLTLSEWLEWCEGTRLGNRGPRIKQVLMTETEPNALKEYGNFSKLGEESRRQYRRAASHAGYFIVSRPAPTKREPAHRKLEVRPVFAFQSRNAVERELRAEAGVEIVDYFWSNCQVLISRPWSFKGATYPAGEYTLKTLWAQGNAVLKHARYGLLGAKPKHNAPVGLRILVDAGIRCVS

SEQ ID NO: 1006 - protein, 1171 aa, unidentified
  REGION 1..1171: note = Description of Unknown: Cas Enzyme sequence
MKKQTNIFDFISMDKKTKNISSNIAQSKSIITLGLDLGKTSIGWALVDTYNNYKIIDCGVRLFDAPETPKDQISLNKIRSENIRARNSNINYNFRRKKISQLLINYGLVKKELLNKYNKFVPKSKKRNALSIKMANYLCYKKNTDVLSLRAKSLNTKISPFELAKILYSLNNHRGINFDTFRDINENANSTQKEYQESLNKYNDEYLNNKDKYRSYGEFLYFNYSKKFRNTNLKDKNGKKTKKKDLVILPSIEAHIEEIKTIFEMQRNFGNEVASKKLEKEYLNWFEYEKGSPSYLELVSQCSILETEKCVSKNSLEGLLYVSLEKLYNLRYKKSNDKEYSKLTIEEMKLLISSVKTKEGMKYLDIEKILKKEDLEFKGIVDKSSVCFSIESFISLGKIIPLKDTLISEYLNADSIFNKVLEILIYQTSDESKIELLKEFNLDNETIENLLKHKFRGHLSYSSDVTKTIVDNMFNGKNPHDSKEYAKNFYGIKTIKKSHYLPPVLDTDFPLKNNHTVVRALSQLRLVINDILKKYRKEFNNSNWSFDKVVIELARDMNSDKSIKEINKKIKENTKQNELAKDFCEKHGLVNPNKSQILKAKLYLIQNGFELYPTLDSNSNIEYRIIEAEKVFTEGYCEIDHTLPFSRSLDDSISNKTLVLSDTNQNKGDKTPYEFLGENLFKNMNNSLFKKAKQLGFDRVKKLLTKSYQGVDGFKQRDIVDTQIISKYAGLYIEKHLMFFRNPLFSKIRRVYANNGKITNLLRKSWAIGSKNRNNHLHHCEDAILIACSEQSLIQNISTFINLQHKLNNDFIDEEKFEKIFYKHKSLKEYILKSLKDKDISIEDLQDKDKYDDLISKIYKIIAFKNLPYKTFIDDFKTAINNAKVTHFEKEKVNGEIHEETIKSAKNVNTNKKFLTRQGFAKDGAFIRYDVFREDKSIKKEKKYKYHFVKITAKYYGLEAKKLPTIENAEFMFSIYKNSTLRIKNKDNIEFDSLFRKKPSSLVLDDIFGKEDFLFKNKIINFNFNILGSDNISKSVLNDIFNNKPNLKDFKEDNNLNTTYKNTEDYIMLLKKYLQSNLNNYNVVFISRLQGCFETKTILKKLIEKNIISEYEKIGEQFYKENTVFVYIDENKVLPSRVIIGATAIKDIKKLKITPTGSINIIEKEKRKDMK

SEQ ID NO: 1007 - protein, 1267 aa, unidentified
  REGION 1..1267: note = Description of Unknown: Cas Enzyme sequence
MQTLGLDIGTNSIGWGIVDETEKKIKKCGVYIFPEGVKKEKGNESSKASERTAYRSARRLKIRRKLRKYETLKVLINNGMCPLTLDELEKWREEKTYPVSKDFINWYRTDEEKNWEPYYLRKKCVEQKCEPYEIGRALYHLAQRRGFLSNRKDYSEESENAETKGIKGKINELTDLKGNKTLGQYFYELKQSGEKVRGTYTSRKEHYEKEFNRICEVQNISESLKTDLHKAIFFQRKLKSQKFLVGKCTFETDKPRCPVSHFEFEEFRMLSFVNSIRIKNRPKNFMPLFADENEPEGPELTDEELKVITPLFYRSKTSFSFQDISKELKKFRHNDELSFNYIDDTNVSGCPVSAAFKNIFGEDWKNVKIDQYDINDIWHVLYDFDDDEKLHEFALNKLHLDSEKTEAFCKIHLQQGYANLSLKAIRKILPFLRKGYVYSHAVFLANIPTMIGENVYNEHAEEIEKAVVNITETLKDKNNILTLANRCIDAIFNDKAHDFHAEEWDKSIVDEQIADLFGKRKFAEKSLTEQNEIRRDAILKIEDVLKIAVTKNPNDYKYKALRTDDLIVDYLINQGFEIKKNAKLYHPSETEYNLERPIESEDGKTYLASPRTPSVKNPVAMRALFQLRKLVNYLIKTGEIDSDTRIHVELANEVNDKNWRKAIADYQKESGKKNEEYKSRLKELCKEYGFEIEPTESDIKKFRLWKEQNEMCPYTGKKISICDLFGPQPKFDFEHTIPRSLSYDDSLENLTLCDSDFNRNVKKQHIPSELADFEEIAKRFSRMYEKKFEECLSTIGKNKIRGGYIDPDHKNRMIVARHKAQLELDYYKGKLRRFNAKEVTSGFKHSQLNDTRIITKFALQYLKSVFPHSFPVKGSMTDTFKRQWGLLERTENKDRSNYRHHAVDALTIACIDRTKFNLLSEAIRNSADGTHLKFSKPWDTFDEDVLASVKFIVPKHFVDDNSLRQSKKVLRDRYGKPLLDKNGKKIYIQGNTARGSLHKDTFYGCIMTPPEKDSKAQQIFVQRVSVETLTKDSADKIVDKGISDAFSNNLESGKQTLDEIKEKGILLPYQINGRDVYVKRVRIKAKPTSPIVLKTHNNVIEHNPKDYKQNYYVVNDENYLIALYRGRDEKGKIQSDYIVLNLLDAVHKKQNKEELYPAVLEKKRVKLNLYKVLKIGKIVILKQTEDEDVFALPNELLWKRIYSVIGINADGRIKMTHISISSAWTFKANCPITEYSDFRLSSVNQMSILAEGTDFTISPTGEILIKN

SEQ ID NO: 1008 - protein, 1377 aa, unidentified
  REGION 1..1377: note = Description of Unknown: Cas Enzyme sequence
MNHTMKRILGLDLGTNSIGWALVDEAENKEEQSSIIRLGVRVNPLTVDEQKNFEQGKSITTNAYRRLKRCMRRNLQRYKLRRKNLINCLLSNGIIQETTFLCESGNRTTFETYRLRAKAVTDEISLEEFARVLLMINKKRGYKSSRKAKSADEGQLIDGMTIAKQLYDENITPGQFVLSLLNEGKNYIPDFYRSDLQSELDRIWKYQRQFYADILTDDFKEQLKGKGKQNSSKIFLGKYQIYTADNKGKDKRLQAYRWRVEALSKQLTIEEVAFVICEINGLINNSSGYLGSISDRSKDLVFNKQTVGQALMNGLIKDPHYSLKNQVYYRQDYMDEFEAIWETQAKYHSELTPELKKEVRDIIIFYQRPLKSQKGLIGYCELENSQIEIEVDGKMKMKTIGSRVCPKSSPLFQEFKIWQILNNIKVTEKSTGACRYLEQEEKDILFFELSVKDKLSKLDVLKYLFKNYKELDLNFKEIEGNRTQSLLFKAYQDIIAMTGHKEYDFSKMSAHDVIKTVTDIFTGLGYRTDMLNFDSSIKGHDFDKQPMYLLWHLLYSYEGDKSNTGIDSLLAKIEELTGLEREYAKRLANITFQPDYGNLSAKAIRKILPLIKKGTEFSSACKNVGYNHSKRSQTREELEDKVYKDHLDILPRNSLRNPVVEKILNQMINLVNSVIDTYGKPDEIRIELARELKKSAKEREEMMNSINKARAEHEKYREILQKEFGISNVSRNDIIRYKLYLELKDNGYKTLYSNTYIPQERLFSKEFDIEHIIPQARLFNDSFSNKTLESRSVNIEKSNQTAYDYVLNKYGVKDIEDYKIRIENLYKTNAISKTKRNNLLMRSTDIPDDFIKRDLRTTQYIARKACEILEDVVKCVLPTTGLITDRLREDWQLVDVMQELNWDKYDKLGLTEVLEDKDGRKLYRIKEWTKRNDHRHHAMDALTIAFTKESFIQYLNNLNAKSDKSSSIYGIEQKELYRDKHGKLRFVPPMPLDIFRMEAKYHLENTLVSIKAKNKVVTQNTNKIKLKNGFKKKVQLTPRGQLHNETIYGSMKRYVTKEEKIGAGFTVERIAKVANQKYREALLKRLFEWNGDPKRAFTGKNSLEKNPIYLDELRTWRVPVKVKTVEQETIYTVRKAIGPDLKIDKIVDGRIRQILQERLKEFGGDAKKAFGNLDENPVWLNKEKGIVIKRVTITGASSVTPLHDKKDHRGQYMLESTGRKQPVDFVNTGNNHHVAIYRDGKGNLQEKVVSFYEATSRIALGLPIIDKAYKSSEGWNFLFSMKQNEYFVFPNEEIGFNPSEIDLTDAENYALISPNLFRVQKLTSKDYVFRHHLETIVDDKKELHGITWKRLSSLNNLDKIVKVRVNHIGQIVFVGEY

SEQ ID NO: 1009 - protein, 1221 aa, unidentified
  REGION 1..1221: note = Description of Unknown: Cas Enzyme sequence
MGTKTIQDLELAFDVGHSSIGWAVLQNGAGVSPAANNPRVNILGCGVVTFGADDCLASKRRDYRRQRRHARATRQRIAQMEKLLVHLKVLSADELKKKHNQAGGHSAPWLLAARVLASDGDEKYLLGWPELWDVLRWYAHNRGYDGNQRWSNREVIRAFNSEGLHKTNKPTDDDEKSLVAAAEKADAEAGVQNEADSDVKKVKEAFKQMRDYGTLTMAETMTNHIAKFETQAAEHRLGKRAEKPTRFKGLGAAFPRRIIRIVNDEQTLAGGVEWEVRYILRAHFGHLPNCDINFEQAVCGGLPESKFDWRAYEKSHPALYLTSKEEKLKLRELRIPRKADKQTKTQKKKLRAEFLRNKLVLSSHFEGGVLFGQAVPRFDNRIISICPISGEKVPSRNCPEFLKFRWAILLANIKIARSGERELTVLTASERKKIDAAMRERGAMTESELKKLVRETTSSTRDKLDQMFMEEVNAKNALILDPIQKLVHNDKLQTLWSTFSPRVQKRVRDLWQRGKSVTLEKICDVAKKLDEPLNNFETELNRLADSSNVKRGKKDGSFNRDAFSKAPLQIKKLDGRAAYARPLLVRAYEEVMAGKHPKEKGGCLEVTDEMRQAQLQKQIDQQTNNHLVRHRLLILERLLQDLIAEPAFANGDKSRIAKATIEVNRDLREMSGKSAKEIQQDLGRRLANHQGVAEKLEQDLEGRTYNGKPIQITAGLIRKARIAEDLGWTCPYTGKGFDAMDLVSRQVDKDHIIPRSLRPSDSLESLVITFAEVNKMKGQRLSWQFINHEQGKVVEGLPQLSIVSMKRFEDAVKTLDTRRGHDDDQKRKKKRKELLLLQTYEEKGFVPRDLTVTSQLVRLGAQAIKKIFVGQERQPIVVSLPGAVTGTVRKGWNLLGCLELAAPQIKEADGSIKTKTDIRELTHLHHALDACVLGLASHYLPNKGSNSGSLWEIMIKRNPNDAEKELLRSTGYFDFDSQGRFGLTELPDTLKEQIRQRLAEKRVVQHIPADMTGMRVEENTRGIMKTENGRVFLRQQSRDAKTGKLSIKPTDEAIIKVIGLKPGKLTPQKGVRVITDNFGVAILDHAKNDGEKSVIIPWHKVWPRIQELKKRNGGEMPRVLRNGQLIRVTKGTYIGVWKITSIKNQKSGIKLNLAQPDTVNTEEEVFVEAKKKTTRKVRPDCRHEASLSSIVSGGLEILDSPLTGIRIQRPETKEPKQQSAV

SEQ ID NO: 1010 - protein, 1264 aa, unidentified
  REGION 1..1264: note = Description of Unknown: Cas Enzyme sequence
MKTLGLDIGTNSIGWGIVDEAAGKIEDCGVYIFPEGVKKEKGNESSKAAERTSFRLARRLKFRRKLRKYETLKVLIKNKMCPLTIEELEKWRRQKIYPTSKDFLNWYRTDELKNWEPYFLRKKCVEQKAEPYEIGRSLYHIAQRRGFLSNRKETTKASEGEVSKSIDELSSLMGDKTLGQYFYELKQSGEKVRGKYTSRKEHYEKEFNKICEVQGFSSELKSDLYRAIFFQRKLKSQKFLVGKCTFEPNKSRSPISHFEFEEFRMLSFINSIKLAKNSREDENSDFEFLTDEEKEMIKPLFFRISKPTFQFADIEKKLKGKNEFWKFNYRKETNVSGCPVCAGLKNIFGDDSSDESWKGKKIGQYDMNDIWHVLFDFDDEEKLLEFAKEKLFLSDETARRFCTIRIQQGYANLSLKAIRKINPFLRKGYIYSTAVFLANIPTMIGQDAFLQNEKEIEDSVKNIIGTLRDKNNIIVLANRCIESVFKDKSNDFRFEEWDKSVVENSAQDLFGKKKWNEYDEEKRKNIISQVSEKVEDNLKIAVGKNPNDYKYPLLRTDDLILDYLNQKGFTVKGKLYHPSDTDYNFESPVQADDGKIYLASPRSQSVKNPVVMRALHQLRKLVNYLIKTGKIDSSTKINVELANDVNDKNRRKALAEFAKDSEKNNADARKKIEELCNEAGFKVVPTESDVKKFRLWKEQNETCPYTGKHISFTDLFGPFPKFDFEHTIPRSLSYDDSLENLTLCDSEFNRNIKKQKLPSELPNFEEINKRFKKFYEDKIDNCLKIIERSTKLGGSYEEPTAKDSRIVKKHKAEYELDYYKGKLRRFSATEVTSGFKHSQLNDTRIITKFSLSYLKSIFSYVQPVKGSMTDTFKRQWGLMERNEVKDRSNHMHHTVDALTIACVNRGKFNLLSEAIKNSPDGKHLKFPKPWATFDADVLNAVQYIIPKYFSDENSLRQSKRIMRNRDGKPVLKNGKPVFVQGATARGSLHKDTFYGRIKTVPEKGGKSEMIFVQRVLVSTLDEKSAEKIIDKGIRETFEKNLLNGIQTLQEIQTNGILLPFKKDGRNVFVKRIRIKAQPTSPITLKEHHNVISKNPKDYKQNYYVVNDENYLLAIYRGKDEKGKDVSDYKICNLLDAVNSRQNKTELYPDFKEKKGIYLKLYKILKPGKIVILQNDIQEDVFALSKEKLWKRLYRIAGLATSGNNIQIKLVHIISARPWKYMKGENDKKDLNAGTECLMYLTSNFKGLVEGQDFAVSPIGEIIRK

SEQ ID NO: 1011 - protein, 1261 aa, unidentified
  REGION 1..1261: note = Description of Unknown: Cas Enzyme sequence
MKTLGLDIGTNSIGWGIVDEAAGKIEDCGVYIFPEGVKKEKGNESSKAAERTGFRLARRLKFRRKLRKYKTLKVLIKNKMCPLTTEELEKWRRQKIYPTLRDFLNWYRTDELKNWEPYFLRKKCVEQKAEAYEIGRALYHLAQRRGFLSNRKETTKASEGEVSKSIGKLSEDMKDRTLGQYFYKLKQSGEKVRGKYTSRKEHYEKEFNKICEVQGFSEELKNDLYRAIFFQRKLKSQKFLVGKCTFERNKPRAPISHFEFEEFRMLSFINSIKLAKNSCEDEKNDFEFLTEEEKELIKPLFFRISKPSFQFADIEKKLKGKNEFWKFNYRKETNVSGCPVCTGLKNIFGDNSSNESWKVKKIGQYDMCDIWHVLFDFDDDEKLLEFAKEKLFLSDEMAKKFCAIKIQQGYANLSLKAIRKITPFLRQGYIYSTAVFLANIPTMIGQNAFLQNEEEIENSVKNIIGTLKDKNNIIVLANRCIESAFKDKDNDFRFEEWDKSLVESSAWDLFGKKKWNEYDEEKRKDIILQVSKKVEDNLKIAVGKNPNDYKYQLLRTDDLILDYLNQKGFTIKGKLYHPSDTDYNFETPVQADDGKTYLASPRSPSVKNPVVMRALYQLRKLVNYLIKTGKIDCSTKINVELANEVNDKNQRKALEEFVRANEKNNADAKKKIEELCVEAGFNIVPTDSDIKKFRLWQEQNETCPYTGKHISFTDLFGPLPKFDFEHTIPRSLSYDDSLENLTLCDSEFNRNIKKQKLPSELPNFEEINKRFQKFYEDKIDNCLRIIELNTKRGGSYEDPAAKDLRIVKKHKAEYELDYYKGKLRRFSATEVTSGFKHSQLNDTRIITKFSLSYLKGVFDYVQPVKGSMTDTFKRQWGLMGRDEVKDRSNHIHHTVDALTIACINRGKFNLLSEAIKNSSDGKHLKFPKPWETFDTDVLSAVRYITPKYFSDENSLRQSKKIMRNRDGKPVLKNGKPVFIQGATARGSLHKDTFYGCIKTVPEKGGKSKPIYVQRVSVSTLDEKSAEKIIDKGIRETFKKNLSDGIQTLQEIQTNGILLPFKKDGRDVFVKRVRIKAQPTSPIILKEHHNVISKNPKDYKQNYYVVNDENYLLAIYRGKDEKGKDVSAHELCNLLNAVKSRQNKTELYPDFKEKKGINLKLYKVLKVGKIVILQNDIQEDVFALPKEKLWKRLYRIAGLATSGKDVYIKLVHIISARPWEYMKGERDLNAGIECLRYVTANFNGLVEGQDFTVSPAGEIIRN

SEQ ID NO: 1012 - protein, 1265 aa, unidentified
  REGION 1..1265: note = Description of Unknown: Cas Enzyme sequence
MKNLGLDIGTNSIGWGIVDETANKIEDCGVYIFPEGVKKEKGNESSKAAERTSFRLARRLKFRRKLRKYETLKVLIKNEMCPLTMEELEKWRRQKVYPASQDFLHWYRTDELKNWEPYFLRKKCAEQKAEPYEIGRALYHLAQRRGFLSNRKESTKASDGKVSKSIDELSSLMDGRTLGQYFYELKQSGEKVRGKYTSRKEHYEKEFNKICEVQEISQELKDDLYRAIFFQRKLKSQKFLVGKCTFERNKPRAPISHFEFEEFRMLSFINSIKIAKNSGEDENCGFEFLTEEEKELIKPLFFRISKPSFQFADIEKKLKGKNDFWKFNYRKDTNVSGCPVSAGLKNIFGDETSAESWKDKKIGQYDMCDIWHVLFDFDDEEKLLEFAKEKLFLSDEAAKKFCAIRIQQGYANLSLKAIRKIAPFLRKGYIYSTAVFLANIPFMIGRDIFLQNEKEIEDSVKNIIGTLKDKNNIIVLANRCIESAFKDKDNDFRFEEWDKSLVESSAWDLFGKKKWNEYDEEKRKNIISQVSEKVEDNLKIAVGRNPNDYKYQLLRTDDLIMDYLNQKGFAVKGELYHPSDTDYNFEIPVPAEDGKIYLASPRSPSVKNPVVMRALHQLRKLVNYLIKTGKIDSSTKINVELANEVNDKNQRKAIEELAKTNEKNNADARKKIEELCNEAGFKVVPTESDVKKFRLWKEQNETCPYTGKHISFTDLFGPLPKFDFEHTIPRSLSYDDSLENLTLCDSEFNRNIKKQKLPSELPNFEEINKRFQKFYEDKIDNCLRIIELNTKRGGSYEDPAAKDSRIVKKHKAEYELDYYKGKLRRFSATEVTSGFKHSQLNDTRIITKFSLSYLKGVFDYVQPVKGSMTDTFKRQWGLMERNEIKDRSNHTHHTVDALTIACINRGKFNLLSEAIKNSSDGKHLKFPKPWETFDTDVLTAVQYIIPKYFSDENSLRQSKKILRGRDGKPVLKNGKTVFIQGATARGSLHKDTFYGCIKTVPEKGGKSEMIFVQRIPVSTLDEKVAEKIIDKGIRETFEKNLSNGIQTLQEIQTDGILLPFKKGGRDIFVKRVRIKAQPTSPITLKKHHNVINKNPKDYKQNYYVVNDENYLLAIYRGKDAKGKDVSDHKICNLLDAVKSRQNKMELYPDFKEKKGINLQLYKVLKIGKIVILQDDIQEEVFSLPEEKLWKRMYRVAGLATSGNEVYIKLVHIISARPWEYMKGERDLNAGIECLRYVTANFNGLVEGKDFIVSPAGEIIQKARVC

SEQ ID NO: 1013 - protein, 1064 aa, unidentified
  REGION 1..1064: note = Description of Unknown: Cas Enzyme sequence
MNKVLGLDIGVSSVGWGIIDTDKMEIIDAGVRLFEEATRNANEERRGFRGARRLKRRRNHRLERVKNLFEEYGIPTDSIGTGNPYEIRCKALKEKVSLEELAIGLYHIVKRRGTVLDAPLEEEITGGELSTKEQLKRNSKELETKYVCEIQIERLQKGLVRSHENRFRTEDYVKEARAILNRQAQFHPEITNEFIEKYIELVQKRRAYYEGPGSKKSPTIYGRFFIKNGKLQEMSMIEKMRGKCSYFPEESRIAKMSFTAELFDLLNGDLNKLRVNGEYLTEEDKVYIVEEIVKKGQKVTIDRILKYKGLPKDTYVVGYRVDLKKNQPTFTEFKGFKRILKAVKENGLPKEILDNIELLDEISEILTAEKSYERRENNLKEALGKYTTFDENTKNKIINALKEITEFKGYHSLSKRAIQLILPDLWKTNKNQMELFSELGLEGKRYKNISNGKNIKFDDSAILSTVAKRAHREAIKIVNKVREVYGELDSIVIETAKEKNSEEAQQRYKDFQKKQGKFEKKMAEYLGVSSLKELKLSPKQYLALKLWDAQDGQCLYSGDPITLDDIIQDFSMFEIDHIIPISISFDDSQENKVLCYYNENQNKGQQTPFYYLTSSPKAKRTFDEFKADVMKLYNSGKISNKKMEYLLEQRDIMNNEELQKQFINRNLVDTRYAVRSFSMNLRSYFKHHNIPTTVLSIRGGFTNAIRRRANMNKDRDSSYAHHAIDALIVAAIGKLPIFRFFQNFGVNETGVFYDRRTGEILTEKEFFSEEMYKFVRNLMNYEPKIKYSHKVDRKGNRTISNQTIYSTRVLDDEEYVVGKSGNIYNLNKKEAANLIEKMRTKRDSFFIAKHNPELFDLLLKIAKEYDYADNPFKEYYEQHGYIMKDGKVPVKFLRYYDEKLGVHLDISKKYPGTQKRVVLRSIKSVRIDVYKNSKGKYKYLGVPYYWFKDEGNKLVLDMEKYNQAKLEPHKEIDDSYEFLFSLYRNDLFSVERKGITSEYIFIGDNNPRNNVIEVDYVYKKRNSKEERIRFTIGRTISNITKYNVDVLGNRYKVEKEEFKTTLQK

SEQ ID NO: 1014 - protein, 1095 aa, unidentified
  REGION 1..1095: note = Description of Unknown: Cas Enzyme sequence
MKWRLGLDMGTGSIGWAAVRLANKTPTELMDMGVRVFPDGREPAGDGRTGDPLNERRRTARQMRRQRDRRIRRKKTMLRYLIASGYLPAEKASRKTIERLDPYSLRNEAVSRLLRKEELARILMQLTGRRGFKSNRKEQVASQNKETAGMLAGIARLSATLGGKTLGQWMYKELKEKGVLRFRPETIKSKINYSFYPSREMYEKEFEAIRRIQESGHSKLDWDKLYRIIYFQRPLKRPARGTCLFYTDEERGYRALPSAHRFRILQEINNLKYFDEDNRLVDIAEHFKETLYNLLEKQKSLKFDQIRKEFSHIIGEPFTFLFNLEDIKRKELKGNTTSCDFRNEKYFGQQWDFLNWQTQDELVERLIIEDDETKIIELLEKYNLSADQKNNILKWTYPIGTTMLSARFMRECSDIMLNLFIPYHDAVAKMGMHHSDFEKKPIRSSLPYYGEILTSLTTKASGNQQDTEEIRYGRISNPTVHIALNQLRKLVNALIRRYGKPSEIIVEVGRNLKTNAKKKLEDFQAQALNQEKNEQVKEELKKLGFIQPSSKLIKKYRLWEELVPEGTGFARRCPYCGKPISASQLLSEEVEIEHILPYSRTLLDSKDNLTVAHKACNQIKKEHTPYEAFGHSPLGFDWETIKELSEKWPSNKRAKFSPQAMDLFDEKNSGFIQRQLTDNAYIAKATKNYLSIICDQDAIWTTSGRMTAKFRGEWGINTLLNANHDTWFKNRSDHRHHALDAIVIALCDRSIVAETSRINRMLGYGAITVPPCPLRREDIEKKLQSVIVSIKPDRGPEGKLYDETAMGAIRVLTRISPNELTEKDIPNINALKVREYLLRLMQEKKSELGDEAFIEVKKYLQQRYKFFDVLRTKWATTTALQNLSDRDIISIVDSHLREDVLRHVKEKSNGRKLTIVLQEYADKHQIRSVRYFPKGQVPVPISSNHNKAYLPYDFYRVDIWLLPGKTKKYEGVFISRTEYFQQKRINQKAPIRKPHPAAKLMMSLHKNDVVEILSPQINELARIAGYATTKNLIDIRPIAAADSIADWTRNTKPELTTSFWPRDCDGQNFKSINMLFTTYTIKQVNITVEGRLSTR

SEQ ID NO: 1015 - protein, 1090 aa, unidentified
  REGION 1..1090: note = Description of Unknown: Cas Enzyme sequence
LKYRLSLNLLNNAIGFALVELEGSNNPTKINRLGVHCFSDGREDKSKASLCKARRLARSARKNRDRRIQRKHSIVYKFIKYGLVSSDEPTTHTLKKMGHPLGYRTKALDEPLTKKELARAIYGLSQKRGFSLLEREDDTDTEAGIRKKSHEIMISDMVGFRTVGEYLLHRLNNNKNIKTILDNNICPSRDMLEFEFDAIKENQIKHHADIDTHFWDDIKQTIFYQRPLKEPELGSCIVLKEEKRTFIATPSFKRVTCLEILADLNIRKGSRILPISIETKLSLYEELKRKGSIDKKELTARLCKGTEKLTLRNKKELIGDTTSSELAQPKYFGEAWFDFALEKQDEIAIYLVTKDPKTIYNMAKDAWGLKEENAKNLAIRPLSKREASTQPFSRKFLGMLLADMEQNFQNVQVTRKNLGYPEIKYNGGFENLKYYGEVIPHTVTNFRSGKPIEERNDEELYGTNNNPTLHIVFNRLRKLVNQLITTYGKPEQIIIRVQSSLKHSMAIQKKRELNKNARKGDTTEIRKKLVTVFNIPNPTWEHVLKYRLWVELNPSEPEMRFCPYTGIKITKYNLFTLEFVIDHIIPFSITYDDTIHNKTLMSATIKDRKFDKCPYDAFGVSEQYYKHILARVEKLPKEKIKLFNENAAAIARKRVIQQFIDANYISKSIAEYFTTICKDVCITNEKLMTLLKNSWNVQHILQRDFSDVEKLKNEETKKRTKNKKQKDDGDEDNSTDKDLRIIAADAAILGTVDSSLSILTKYALLKKSEREDFKVDAPWQGFMGDVVEKLNSIVVSQRSSHSKTGSFLKDTIYGTVHPITAEGANLCIRKSIFEAHPDKITDIKTKEKLMHHLSMVPSEKEKIRERLSFLLNHKLERIKDDKLKKSLVKFLETMDKGTKKETELAKRLLKEEIVLFSEITGIKTVNTYLKIGKPITIYHYDGTGQKHTKVQLSEENYSVTIWVLPQQTLLRNEETYKVYCPKGFDAKFVVTHQTLFEANQKEESRPHPAAQKLMVLHKNDMLLLSGQIYKVAGLDPCNARIIIRAHYKDKEKIVKSYQQLIETKIQKLAINEVGVIQKGQNLFEKFLKIV

SEQ ID NO: 1016 - protein, 1015 aa, unidentified
  REGION 1..1015: note = Description of Unknown: Cas Enzyme sequence
MARRTCTPTYRLALDLGSTSLGWAVFRLNGQHAPTAIIKAGVRIFSDGRDPKDGSSLAVTRRLARGMRRRRDRLLKRKTLMMNKLVEYGFFPVDKAARKELERLNPYEIRARGLSEALQPGEFARALFHINQRRGFKSNRKTDKKDNESGALKTAIGHLRQELKNTGSQTVGAWLWQRMNNGDGVRARYHETPAVTGEGKKRIDKYYDLYIDRSMIEQEFNKLWAKQSELNPRLFNEQACKDLKKTLLHQRPLRPVKPGRCTLLPEEERAPLALPSQQHFRIYQEVNNLRLLDESLRETPLTLVQRNLIVAQLEEKRELTFKSILKLLKLPGHTSFNLEDEKRNHLKGNATSAILSKPEHFGHAWMTFGEAQQDEIVWQLVNEEDEEKLIKWLQENTQIDEIRAEKIASVSLPEGYGSLSRKALARILPVLEKDVVTYDKAVVAAGFKHHSDLGFDFDHTADELPYYGKALQRHVSFGSGNPEDDDDKCYGKIANPTVHIGLNQVRKVVNTLIHRYGRPTEVVIEVARDLKQSREQKQEAQKRQADNQKRNTRIRKNIAELLNIGEDSVKRQDIQKWILWEELSRNAVDRLCPYSGVQISAAMLLSAEVEIEHILPFSKTLDDSLNNKTVSMRRANRIKGNRTPWEARTDFEAQGWTYDSILRRAEMMPKRKSYRFAEDGYERWLGKDKDFLARALNDTRYLSRIAAEYLKLICPTTRVIPGTMTALLRGKFGLNNVLGLNGEKNRNDHRHHAVDACVIGVTDQGLMHKFATASADPRKQQLDRLVENMPLPWETYREHVQRAVHNILVSHKPDHGFEGAMMEETSYGIRKDGSIKQKSEGRKISNLISIAEPKQPERHGVNAKGEPLPYKGYVGGSNYCIEIVENDKGKWEGEVISRFRACKIALAEGKDRLRHPKLAQNGKSLVMRLMIDDTVRLEVNGQLQAMRVVKIVSSGQIFMAPIHEANVDARNRDKQDSFCYVSRYAGSLQRDKARPITISPTGEIHDRGLPLDKTP

SEQ ID NO: 1017 - protein, 1025 aa, unidentified
  REGION 1..1025: note = Description of Unknown: Cas Enzyme sequence
MDRKMKYRLAVDLGSTSIGWAMVRIKQNDAGKFEPNGIITSGVRIFSDGRDAKGNPLAVTRRKARAMRRRRDRLLKRKARMLQQLTHFGFFPTDLAERKALETLNPYELRAKGLDEALSPYEFGRALFHINQRRGFKSNRKTDKKENDSGALKAAIKFVHSQIDGNTHRTVGELLYKRMLNGDPVRARLRITRIESENGKPKILKKYDLYIDRDMVKAEFEALWSKQASLNPEIYHEEARANLIDVLFFQRKLRPGLPGRCTLIPTEERAPLALPSSQRFRMYQEVYNLRTLCDGLEKDDGLTQLQRNQLIEVLEKKPKLTFNEIKSMFGLGKNTKFNLEELKDREALKGNSTSVILSRAEFFGERWFQFDEAQQEEIVLKILNEENESYLIAWLVDNAGVDSLQAEAISYASLPEGYGSLSRTALAKILPALRTCNRSYSDAVKAAGFEHHSNIGPGAAGEILPELPYYGEALQRHVGFGTGNPDDTAEKRYGKIANPTVHVALNQFRIVVNELIEKYGHPSEVVIEVARELKKSKKQRLEESRLQSNNEKNNDRIRNEISGLLGISKDRVSRKDIQKWILWEELSANPADRKCPYSGVQISPRMLLSNEVEIEHILPFSITMENSINNKTVSIRRANQIKGNQTPWEAFGKPNALGVDYSDILMRVKNMPEYKQFRFADNSMERWNKEGEDYLARHLNDTRYISRIAAEYVTLICPGKTRVIPGRMTALLRVKLGLNSLLGLSGEKNRHDHRHHAIDACVIGITDQAMLQRFAEASASARKKGLSDLVENMPEPWPNYIHHVKRAIENLYISHKPDHNYQGAFCNDTAYAIYDDGYVGSHKIIDGKRVYVKEKLAVIPIASNYAIERHGRLPNGDPRAYKGYKGDSNYCIEIVRNETGKWRGEVISTYEAYQAIRNKKRQCDDMAILRNPNRSLSEKSLVMRLMRNDTVCLIEKNQKRIMRVCNIRSNGSIKFADIKECNVDARVRKNEFSYLSKTAGELQKLQARQVTVSPIGRLRDPGFKP

SEQ ID NO: 1018 - protein, 1158 aa, unidentified
  REGION 1..1158: note = Description of Unknown: Cas Enzyme sequence
MKSIWSFDLGIASIGEAVRNLSDDSFPHKASFLLPEEFGETKTASLRRRMKRTRDAHKARESWLNAVWEAAGLEILTGRQVTFLNGKWSPASESQKQKDYRSLLQREFPRKGESICYNSALLRIKLLRGEKLEPWQIYKALWSSIQKRGYGLVPWANRELGKKELTLEEAEKLQKKQDDELAKKDPAYRHTLEAWPMFKREVPKDFHFPCYYNAFKMGLWHPSMPDSFGERITCHATSTRNVRFDRIDVEREAELLARNAAAQLPQLASLLTKIKNDGWLASDSKAGKEKNFRVFAEDFGEFFVHGPAGAKSLAARNDFSAYLAFLKNRGIHPGAKDEWMGATAQKTPRFDNRIINDCALLDGLQVCNVAVRYDSKNNRPATDSLLATEVTFLMKLKNILVHGAGGQRKLTAAEIGTIFSTISAKAVAKDSSLKDYSTSVINCFALTASAWGKAEGIKKLTLFPLPGHEVVRSPKTEGRSRFSRPALRLLRALILGGAKPSVFHQRLLDRDPALLDEIGMDVLDAEPVRITNGAKNFTKQPRPWVLAGQLKFLSDLSRTNDTWEGIYIPEQRLDSLEARHSDEDGNVARDAAIRELIGSVNDPVVRHRLGVFSSRLATLQKEFGQPEEIVMEFIRTDFMGDKAKRDLATFQKKREEARSAAIQQVGKTDAIKYELAAAQGCSCIYCGAGTGMTGLDSFEREHIVPRSQGGPDAMVNYALACRSCNEKKGERTPFQWLRHEDSWDAFESRVNSRATELRNKKVQLLLREDAPDLVQRYTALAETAWISRLAQKIVWLHFGWRNGIDGEGKKRVTIISGGLTGRIRRKYRLNSLLSPCPEGEDPMAWEAKADIPKNRKDDRHHALDAMLINFLPQWSRDARKQHFFRFPDAIQANPQAFFRREIDSVTPCNIAFEKPALADTIYGARQDAGGKVIVQRVLLFALGMQSVGQSKVAFNAKYLAAQSKTVRDPRIVAEINRYLAEEDHSEASWKKFCDTLHLPQKDGSKGPRVIKVNVTAGTPSEYIDMSKDLSGAYRKGKKGHRGQIVFLLRKKNKKGAIKETTCVRPVYAFESRHQAEKSLREEYGDAITIYGFFQSGCLVAVDSEVEHDTLKLPAGVYVLNTIILPGTVKLTNQQGKTYPDIPKYSLTKLIAAGLKRLK

SEQ ID NO: 1019 - protein, 1655 aa, unidentified
  REGION 1..1655: note = Description of Unknown: Cas Enzyme sequence
MPSPTTIWAFDLGKGSVGEAVRDIETNQFLHVAALLLPPDLARRGRADQTGTPASRYRAWKVRLAHRERERWLDTVWLAAGLTPLQKREVWRNPATGRWELKHPADYRLEREFAPALGEKTKDGAPSDVAGANLCYTSCLLRIKLLRWKRGDPPLEEWQVYKALRSAMQKRGYGRVPWAVKEARAQGKTPEELEAEEQKQLEQADPRYREAAGKWPEFKRAVPAEFHFPCYYDAFHMGLWSPDQPDQLRLRPDHRAASTRNVRFDRANVRKELIALGNNAAAMLPQLQQAFERWQRDGWTFRHPVTGKALTKPVHARTFGEFLCDGPAGQPDETSFEAFLNQRREAGIRIGTFEEWMAALGQKTPRFDNRIVENCALIPRLHVCKVAPRWRRNQNGDKELDPRSLLAAEVTFLLQLKNLQVDDATAGTVRYLNTDELNEWWKHACEKAANVPLSDTWERDVLDCFKITRAEWRRWCVSKNPLPVARERSEAAALAGEIATQSAEAASGDSGAEERSRGKSQDVVQAPKPTGRSRFCRPALAILRHLLLHREKPQDFAARLRNREPALLDALDFDVLDTAPAEERPTGNGKALKGYRKQQRTWLLTGDLDFLDHVWKATDRDGNPRDFEPHQLRIPDMTLRDLRKRHDLTETPYSELLRQNSAELERRDKAILELIGQQKNPVVRDRLTRFWQRLKHFQNPVVPSDPKKQKPGLGLADPACLVLEFVRDDKDNSLEGRKRTEAIQQALRENEQRRDKARKALEQCGLPTTDDMVVRWLLREAQGGVCIYTSNEIRPADLPNLQIEHIVPRSLGGPDAFWNWVLCDENANAEKGDRVPYVWFKEEKTDEEWADYKRRVLARAAQLGRRKADLLLRPDAAELAGEKYTALAESAWIARLAQTIARLHFGWPLDDEPGEERVITISGGLTARIRRKYLLDSLLGVGNDAETLRREIDSALDELEALRTDTSLSENARKQKRAELRQRLANLAAEAEKNRDDQRHHALDAMLLTFLPNWARDRTKEDFFRFPTAIGDNDFYSKEDQPEMAAIKSELAKLYVENKPVFREIKQARLAGDFGRLQQLKASVFPARKRIAELYRALDKLKQPRNVRAVREWFRSQLEGASPAAKRPVLPRTMAWQRTPTEATLYRRVYLIYKDCPERSLLALTDLAFAPNPRNPQQPVFDLKWLRTRIQSIAEHPGYDRKKLQSVLSAKLEATLSAKRFASCQFGPEDWQQICAQPEVAACFQPVGRGKSKRPPEPDQRLVKVCKVEVLPATRYELSELGYTSGNNYVWNPDHLAETARNILRKDDAQARTRGRRRTPAPASSPSADASPWPGFLWDREMQAKLASPQFREALEQQLVPHLLPPKPARMSDAERTDWATREKRWKQAFEQFRKSHNLPKSFFVFTSDSDRPPRRPNVSLLRVLFEPKDKVFSRDALAKQAQSVVDAQLRRCLECFADSLTQVRDPRLQEKAWRDYCNVVRVVPKETLEQFTREHPTPTADQWISFFEAQTGPRIFQVMQTVGTSLEEYFDLSKDACGAFARGGNKGYWLCKRGDAIEARPIRFFENPEQVRERLLGQGWELLDPKPWRTGDLLNLPEAAQSGARSVPAGYYFLGSFSNDTGVNLKPCFGGEVPQNVSLKALWNRGLRRCSPTA

SEQ ID NO: 1020 - protein, 1056 aa, unidentified
  REGION 1..1056: note = Description of Unknown: Cas Enzyme sequence
MQLNLQETVWAFDLGKGSIGEAVRQGTRFLHKESLLIPAEFAETRTAANRRRMCRTRQAHKAREQWLDEVWTGFGLEPLRKREVWNNPSTGKWELKQPADYRLEREFAPKIGQETRDGAPSDEAGTNVCYTSCLLRIRLLRGEKLEPWQIYKALYSAIQRRGYDPEIPWKTRQQRRSEKPEDEEGATLTRMQEFEKHLAGMAPHHPQYRWPCYFDAWKMGLWDPARPEILKRRQDCHAQTTRNQIVPRRIVEDEVRALVEAAAKQISALTSKADHLLFGPPARAYASFFVEERKRHGLREGSASDWQGVLSQKIPRFDNRIIGKCVLIPRLNVCKIRTGPDGGLLPQSRVAAEVVFLMKLKNMRLHRDGGARGLTAAEIGKILGDPKRSKLGLTPTQWKKWCVRFGGLPLPGQYEEVEEPRFSGRSRFCRPALEILRRLILSGDAPPLAHEKEVARLNGNPDPLKGLVPDDLRFLKQMGSTWEGIYVPNQKLDALARLTDDPQEAIRRLIGSQNDPIVRHRLALFAKRLDYLAVTKKFGPPDYVVLEFVREDFMGQKAKLEYLKFQRERARARAEAREEAAKAGATENSAGLKMELHKAQGGICLYTGDGLAVTSLDDYDIDHIVPESQGGPDALLNKVLTTRLANREKANRTPYEWLASSDRWDAYVERVKKRLTTLRNKKVQLLTSPEATALVEKYTALAETAWISKLAQTIVGLRFGWPGGIVDGKRKVIVVSGGLTGRIRRKYKLNRLLNPNASSEEEAETKNRDDDRHHALDAMVISFIPNWTRNAKLAGFFRFPEGVHGEFFANEIADVVPKNVALEKAAFEETFYGRRTLQGEQFAVGREDLSGLAVRLVGAKRVLKKRADIETHRIVDARIRSDVEAFLDANVGLTLEAWGAWCSTYKQGGNGPRVAKVMVTKSKADSLEEYKDVSKDGTGQLRRGAKHRGYFVYEHLAATKKDPDRKQLEVRPVYVHESKKAVAAGITGRIYAYFESGCLVRLAKPWVFQGKPYPPGQYICTSIWANRNAKLRHPEYGDIGPVGLRLLLDAGFERVE

SEQ ID NO: 1021 - protein, 1062 aa, unidentified
  REGION 1..1062: note = Description of Unknown: Cas Enzyme sequence
MATPSPTYRLGIDLGTTSLGWCALKLESGKPSEILAVGVRIFSDGRNAKDKQPLAVTRRDARSHRRRIQRFKRRRRKLLNALIRHGLMPENELSSKSLQSLNPYEIRAKALDEKIHIHHLGRALFHINQRRGFLSNRKTGKKEKNELGAIRTGINRLKDELAKAKARTLGELLYLKQKIVTPLKEGHSLNPPIRTKAQVRGNSVAYAIYPERAMYRHEVEMLFESQKKYYPDLANAHSEIEDIIFFQRPLKKPIVGKCSLEPAEERIPKADPLFQSFRIHQTVNHLELRNAELAEQFGLEQKKILKHKLRDQKSISFGGIRSAIWGRKARSENIFNFEGSKKDKIEGDITVTTLSDQKLFGPKWATLSSAEQAEVIKILVSESDEREVLRFLTDRFGFDEETASRISEADIEEGYCRLSRKAIEKLLPYLEKGLSYAEARQAAGYFDPETSREETLPYYGKVLESAVLPPRLEPDREPENDEERYGKINNPTVHIGLNQLRKLVNALIERYGKPAEIVIELARDLKLSEEERRKIDKEQRENQKKNELINDELDRLQIAKNYENRMIYKVWESLATGQEKRCCPYTGKTIGLHDLFNGEFEVDHIIPFAQSYNDGIRNKVVVHKSANRYKGNRTPSEAFGHNPENYDWQDIISRIEGHTPSKQWAFRADCLQKLQGAEKDLIARQLHDTQYLSRMAKKYLSAICSSNNVWAIPGRFTAMLRNRWGLDAVLGNEGKNRSDHRHHAIDAFIVACTSRGMLQAIAGASNHKHWQEWRMTRMPDPMPQFDFMQFKKRILNIVVSHKPDHRISAKTLSRARTAGALHEETAMGRAGPVVDGEIPLVQRVPLTSLEKLKHIEEIRDKTLRERLLKAVEGLAEKSNDWKSAVSKFGETYNIRSVRLLFLKTSGAVVGFSHPNQPNDPYKYYALGNNYCAEIFCPNKGDSADKWQCEIIPMFWIHQKNYQPGWKKQYPTAKLVCRLFIHDMVCMETDGACEYYRVKLLSASDRKVEFIKHFAAQEDKKMPDLKPLRTTASNLQLKNLRKISVDILGTVKDPRKSTWPKHS

SEQ ID NO: 1022 - protein, 988 aa, unidentified
  REGION 1..988: note = Description of Unknown: Cas Enzyme sequence
RRAARSMRRRRDRLLKRKARMMKTLIHHRFFPADEAARKVLEQLDPYALRAKGLDQALTPEEFARALFHISQRRGFRSNRKTDKKDNDSGALKAAIKQLHAAIDPQGRDGKPRTVGEWLHQRNQSGATVRARYRQERVMTDEGKGKSRIDKSYDLYIDRAAIEAEFDALWAKQSELNPAQFNETACKELKDCLLYQRPLKPVKPGRCTLMPEEERAPLALPSQQRFRIYQEINNLRILGEHLQEQSLTLDQRDKLAAELERKNKLSFAQICKLLRLPGTTKFNLEDAKRQDIKGNTTGAILSKKEYFGPAWAQFDESMQDAIVMQLLTEENEARLVQWLQDETGVDEARAEALANASLPDGYGSLSARALARILPELLRDVITYDKAVLAAGFAHHSDLGFAFEHDSDDVERVGERVIQSTGEIKPVYAFRQLPYYGRALQRYVGFGSGKPEDTEEKRYGKIANPTVHIGLNQVRAVVNALIRRYGRPGEVIIEVARKLKQNREQREETQKNQAANQKRNERLRKEAAAVLQCSEEHVRRSDIEKLILWEELSTNIAERRCPYSGAQISKEMVLSDRVEIEHILPFSQTLDDSLNNKTVAMREANRIKGNRTPWEARADFAAQGWDYDGILRRAEQMPKKAKRYRFGEEGMQKWLGDKDHDFLARALNDTKYLSRVAREYLSLICPQGTRVIPGQMTAMLRGKFGLNTILGLNGEKNRNDHCHHAVDACVIGITDQGMLKNFADASASARKNRLGRLVETMPLPWPTYREHVQRAINAIWVSHKPDHGYEGAMMEETSYGIRRDGSIKQRRKADGSTGREIHDLVRIVEPGQPQRHGVDAEGRPRPYKGYVSGNNYCIEITSNDKGKWEGNVISTFEAYRIVRQGGLSQLRHPTLGQNGRPLVMRLMIDDCVRLELDGVLQTMRIVKMGASGQVWMAPVHEANVDARNNDTSDAFSYASKYAGSLQKARGRRVTISPIGELRDPGFRE

SEQ ID NO: 1023 - protein, 1677 aa, unidentified
  REGION 1..1677: note = Description of Unknown: Cas Enzyme sequence
MLTKKPDTTTIWAFDLGLASIGEAVRDTSTNEIIHAASLIMPAELGSITESRESRRAKRTRDAHKAREQWLDEIWSAAGLTPLQKRKPFRDPQTKKWVPEKCQKADYRLEREFAPAKQKRDKDGNLVDIVYPNGKAKDGAPAGKPEDFEICYNSAQLRIKLLCGKPLADWQIYKALHASLQKRGYGRVAWANKEALREIKKDANEEKEVQALADKWNAFEKEVKEKLPASNGEHAPFLLPCYYDAWNMRLWDPSTPDTPTGKTDFHALSTQQVRFPRENVEKEIILLANLAAEKLDPLSSFFARVKNDGLIITDTISGQKANDEKYHDGERKRKVKVLAENFGLLLCHGPAGRAFATYAERQEGEELLSFEVISHPDPSKIGKIKNAIAGTPLDWCAATGQKIPRFDNRILAPCALIPRLNVCRVMPKFKHEQNAGKPKQIESKTLLAAEVIFLLQAKNLRLDDHSVRFLDKDELNELIGEARTRVEEALKQDKSEHHILEAYKLTSSQWKKWCVKKNCRALLDGKGAGDEDTAEDENQPDKEIKGKSTDAIKAPHASGRSRFSRPALAILRHLLLESSQGRLPSSILDQVVNGEKTVLDALDMDVLDALPLKDGKKGQFEKRGRPWILKAEVENLRLLWKSAKLDNGTERPYSPSQIHIPDLKLRYIKQKHGLTDKPFSEIFNKKDPEVGNRSDAIYELIREQNNPIVRDRLERFWKRLIAFRAEKELPDPECLVLEFVREDDNSLDSKKRKEAYSDSIKKNEARRDDARKALKTMNIENPTDSQILRFMLWKDQGCKCPYSDAGMGCTQVPDWDIEHIIPRSMGGPDAYWNWVLANPDANAEKGNRTPYQWFHEEKTESEWTAYKNRILNLRKELGSRKTDLLLREDAVSLIGEKYTALAVTSWISRLAQSIARLHFGWPLDDDAGKERVLTISGGLTGRIRRKYLLDSLLGPALPQGSHTEEDPDPATVRRGIDETLEALSKLKKQEGESDAEARLRQETRAGLRQKLIDLARLSEKLRSDKRHHALDAILLTFLPNWARDKKKEDFFRLTEMGDNPIYSDAGRQEKIQCENEIARLYSKNQEVFQKIKEARNGEDEAEFKKLKASVLEVRKRMAQLFETVEKRKQPRNIKAVRDWFRRQLWKEDNTTPNILPRHIAKRKAAIEKTSYSEGYCIQSENQRGDIKLSCLGLRSDFYDESVTVYDRRYLLTQIQAITAIPQDKTAAAHKQLKAYLRNEFTKNGIPDTAEAWQRICQRDEVRDFFPLKSKSPTHEDCLVRLKKIEILMASRPLGSGSIVDIAYGSGSSLVFDLEHLKQNAEKICVRMEKTNPTKGKKGEAEKKTPAPCGSADICPNWTNFRFESRLQEKFRTEKFQEELKQLAEKLPGPKPKDEIKEWKEKCDEWKKHQKEFASKHDISPNIFVYHESADEPKPREKSFWPQVLFRRVERQFSLDTLNKQADKIMHPDLIADLKSFASALKNLSDDKKRDHLWREFCKVWKAVKKGAKDQFIKQHPEPTAEQWVEFFAKQKGAVIRKINQRSGSDLTEYADLSKDGTGQYFKGNNQGYWLAKRKNGGDGKDECRAHPVRFFEAFESVKNRLKDQGWELIDELPWHWGILLNLSEKAGTPKKPVLRGYYCLGSFSNKGATVNLKSCFGEDVPQAISLSSLLEAGLKRA

SEQ ID NO: 1024 - protein, 1662 aa, unidentified
  REGION 1..1662: note = Description of Unknown: Cas Enzyme sequence
MSKASTIWAFDLGKGSIGEAVREISQEGTKFLHKASLLIPADFAETKTAASRRRMWRTRQAHKARERWLDEVMRAANIEILKGRQVGKVDEYGKPIPQAEWKKKKGKWDVVAKGDYRLEREFPPAKFDRNGKRKLYPNGKAKDGAPAKTDDDFSISYNSALLRIKLLRGKKLEQWQIYKALHSAIQKRGYGRVPWAAKEAARQGMTPEELAKKEQADLEKKDLSYKAAVEAWPKFKAEVRDTNFHFPCYYDAAKMGLWDSATLNLVGEPVPHKARSTRKVRFSKDDVEREIYNLASQAAEQLPQIKSAFAEIKATGWRQDGKEPFPVAAATFAEFLVHGPAGEPTAEAKADFGKYLKFRKQCGIHPGSNADWMGATAQKTPRFDNRIVQACALIPRLQVCRIAPRWRATANGQKQIDPRSLLAAEVVFLLQLKNVQVDDPNESLLRFLKPSELTELLEFVRNETNAVPIADGWERKVLDCFKITKARWNKWCREKNLQPINTESSDNQSEQEPASETSHDVAAATAPENTATKQARSKSNDVVKAPKPTGRSRFCRPALAILRHLLTHDEKPTGFTERLRKQDKELLNELGFELLNSEPRRTPMKHRQQKRRERPWLLLDDLDFLDLAWKAKDEQGKPRQYSPHDLRIPDMALRHLRKKHSLTQTPFSELVHRADPELKRREQAISDLIGEQNNPIVRERLTRYWKRLQHFQNPTISPDAKKQKAGFGLTEPECLVLEFVRDDKDNSFDGQKRLETYQEVLRRNEDRRERARKALEASKLPTSDEMIVRWMLLEDQGPFCIYTSNAISCCDLANQTIQIEHIVPRALGGPDAYWNWALCTEEANAQKSNRIPYNWFREEKTDGEWAEYKRRVLDRASKLGRRKVDLLLRADACELVGEKYTSLAATAWIARLAQSVARLHFGWPLDDEREKERVIAISGGLTARIRRKYLLDSLLGSDEDAVKLRKDIDDTLAELDGLKADTSLGEMARKQKRADLRQKLQALASESGKNRDDQRHHALDAMVLSFLPNWARDRNKQDFFRFDEVGDNALYSEEGLKEVTLARKRIQQLAAETAPIRERIKAAKETGKWDEMQRLKDGIFPQRKEMAQCFQFLDKRKQPRNIRAVRDWFRQQLEVESPVLPRSVAFKKTPVEDTLYRRAYLIDRNHVELSRIPLIELGLRPDFHDVTRCLFDLKWLHTRIQSITDHADYDRNKLKAALDDKLKVACVSCCAKGRAFGDGDWRAIATQPDVQGLFRNGNSKRTATDPAECKVKVFQVALLPAKRYPLSDLAYGTGNVYVWNPDYFDDTTGKIVRKLDSSPRGRGRRQIRQAIASQPHPDALPWDNWKNFAWDRETQANVKTLRQQLEQELAPLLPGPKPKGMTASETEIWDEKQQAFKDALDKFRQEHKLPKALFLFTWQTDRPPKKPLALLRVLFERKDRVFSAHILQKRADKIVDQTLGNYFGWFADSLFQIPGGIQQESLWKEFCAVARTVDKQRVAEFVGSNSNLSARQWIDFLKRQSGPGVTQIQRTVGENLEEYCDLSKDGTGQFVRGGNRGYLICTKADRIQAFPIRFFQSKTLVREWLTGNKWELADSQIWRSGDLLRLSKPAGTTKKTVQPNYYFLGSFSNNGKTVNLNVCFGGDVPQGISLKSLWEAGLRREE

SEQ ID NO: 1025 - protein, 1042 aa, unidentified
  REGION 1..1042: note = Description of Unknown: Cas Enzyme sequence
MVRSFQTNNFINGLVFGFDVGTGSIGWAVRRGTEFLDVGVLICDSEGGDLSKRRELRRQRRTLRSRKYRRKWFATELERLGLLRPQNPLHDPVTLRFRALNGESLAPEELHSALTHLFKRRGYTEVPWANKPANEKENDPGKKEGLVKESVLEIQKKMAEANCQFPCQFLMKSREQAGKNPTEKWGRKIYWPRELLKNEFRAILTAQAGRFPKLAEKSDWLLYGDSQTKNSDGRIYHVFFKNTEARNPGVLGLRWPRFDNRGPALDTLQPVDEQGRPMHVVRKNKKSFINAQWELALMNFRVTERATGKLVVPDSKSLVRLREIWETRKRGKKEIAVTPEDPKSIKISERILKKWVKEFNEQYTLIENQPPLTPQTSAGRARYSSPTLNRIAGGERFDPPQPILRRQGENTEQALNRYLADIKHPLVRHRLILFRRLLAQLISRHGKPDMLILEAVRSLALGPKAKNEMNKRNEEFRKQREIARADLAANRESASRQAILRYRLWYEAKGRCPLCLETIARTDLGHGADIAHLVPRSRVDCNEMYNLTVTHIKCNRDIQGDRTPYAAFSHTEIWENIKTNAELCFSKIRVNKDHTKAELFISPNAEELIEQKADLQHTAYIARVIRHVSLIQLGWLSEDGHDPTMEQGNKPSSCFQVTNGSLTSRLRQAWGLNRILHPLPAGKRWEDLTEEEQRVFQEKNRGDLRHHALDAMVIACTLPWLAHRTHGATDELGNHGWWTQDEKRRSKAANHLFPLGGQMYEVCKGWIDKVVVRQHASRSNHRKAYNTTLYSKKADNTYVARKPFTSLTPKNLHSIWPKEFAAYCDAAWKRYVTESSGIDGELKKTRGCLPDAFTRKLCFSHFQKWHAVGAQELAWPQQVKIPIRSVKLISVKDDTAVTPFSSGTHAFVERHGFKEVRIHIAEDGKSFVPVFIPYWKGDRPLCEKPIKAGSSPVAVIRLGQPVEIKYSPGQNAPKGKYRVASTMQANIKLLPVYLADNKEALKAAGYLENGVNIGWNSFIKAVGYELPHCSSDQAESAGAAPA

SEQ ID NO: 1026 - protein, 1018 aa, unidentified
  REGION 1..1018: note = Description of Unknown: Cas Enzyme sequence
MRYRLALDVGSTSIGWCLIRLNADDEPIAIIRMGVRIFSDGRNPKDGSSLAVTRRNARQMRRRRDRLLKRKERMLSALTRLGFFPLDEAKRRELVSLDPYALRKKGLYEALSGPEFARALFHINQRRGFLSNRKTDRKDSESGALKKAIKGLRGKLAEEGCRTLGEWLARRHEQRLSVRARLRGKTQKEKAYDFYADRAMIEHEFDALWDRQEALNPVLFNPAARDELKDILLHQRRLRPVRPGRCTLLPEEERAPLALPSTQRFRIYQEVNNLRVLSPADMCEKPLTLDQRNRVVELLERQGEVRFTRILKELNLSGATKFNLEDIKRDRLKGNSTSAVLAKENCFGERWYGFDGAVQDEIVDRLLNDASKSALVNWLQERTGVDEACAETIANVSLPEGYGNLSRKALSRILPELAADVTVYSDAVVRAGFDSHSALSSAEQTGEILGELPYYGIPLRRHVAFAKDHPRNDEERYGKIANPTVHIGLNELRKVVNALIRRYGHPSEVIVEVARELKLGRERKLEIQREQKERQDLNDKQVAEACAVLGWTPANLDRAKRRELSQKMQLWVELNPKNVADRQCPYTGEQIGIERLLSSEVEIEHILPYSATLDDSMNNKTVSLRRANRDKGNRTPYEAFGVQPIPGYDYQAILLRASNMPREKAKRFAPDGYQRWLKEDKDFLARALNDTAYLSRIAKEYLSLICPPNKVRVIPGRMTALLRGKFGLNQLLSGSEVKNRDDHRHHALDAAVIGVTDQGLLQRFAKASASARERQLDRLVEEMPLPWPSYREHAERALGGIVISHKPDHGYQGAMHEETAWGLCGDGVASRRVRLEDGGPRQREFRNKNLVEIDSTRDPNRHGMDEHGRPRHYKGYVGGSNYCIEIWRGEKGKWDGDVVSTFQAYQLIRQWGEIEGARRLRDLSFSQSGRPLVMRLMIDDLVRLQVDGKERTMRVAVISGNGQIFMCDHHEANVDARNRDKQNPFAYISKLPGSLQKAKGRRVTVSEIGELRDPGFKG

SEQ ID NO: 1027 - protein, 998 aa, unidentified
  REGION 1..998: note = Description of Unknown: Cas Enzyme sequence
EPVAIIKAGVRIFSDGRNPKDGSSLAVTRRAARAMRRRRDRLLKRKHRMMALLLKHGFFPADTIERKALELLNPYELRAKGLDTALTPAEFARALFHINQRRGFKSNRKTDKKDNDSGALKAAISALRQQLDPNGANGKARTVGELLWRRIKPDVEGKPPRAGLVRARYRERRIEKEDGKTRIDKSYDLYIDRAMIDAEFDTLWAKQTALTPSVFNEAARAELKDCLLHQRPLKPVKPGRCTLDPDEERAPLALPSQQRFRIYQEVNNLRILKKDLHDETLTRAQRDELVNALEHHSKRSFTQIRTLLKLAGTTQFNLEDVKRQELKGSSTSAILSKKEHFGPDWFTFPLDQQDAIVMRLLTEESEAALIVWLQEELGFDETRAEIVANTGLAEGYGSLSTKALSRILPALQAEVITYDKAVQAAGYEHHSHISHAATGEILPALPYYGEYLQRHVGFGSGKRDDPPEKRFGKIANPTVHIGLNQARVVVNALIKRYGHPSEVIVEVARDLKQSWEQRNEDKEQQAKNQKRNERLRTDAAKLLQISPERVKHADIQKLILWEELSFDIADRRCPYSGVQIGARMVLSDEVEIEHILPFSQTLDDSLNNKTLATRRANRVKGDRSPAQAREDFEREGWTYDAILQRAEHMPRNKRYRFGPDGHEKWLREDKDFLARALNDTRHLSRVAREYLSLICPHGTRVIPGRMTAMLRAKFGLNDILGLQGEKNRNDHRHHAVDACVIAVTDQGLLQRFAQASASAREKQLDKLVDSMPLPWPTYREHVGRAVRNIWVSHKPDHGYEGALMEATAYGIRKDGTIKQKSKADGSEGREIKNLIRISEPKQPSRHGVDTEGNPLPYIGYVGGSNYCIEITRGDKGKWDGKVVSTFEAYQLVQQHGAMRLRHPSLSVSGKPLAMRLTIHDIVRMEIDGQEQTLRMVTVAGSGQIWFAPVNEANVDARNRDKADPFNYTSKRAGSLQTAKARRVTISPIGELRDPGFKE

SEQ ID NO: 1028 - protein, 1025 aa, unidentified
  REGION 1..1025: note = Description of Unknown: Cas Enzyme sequence
MRTIRYRLALDLGSTSLGWAMVRLKDDEPVALVKAGVRIFSDGRNPKDGSSLAVTRRAARAMRRRRDRLLKRKHRMMALLLKHGFFPADTAERKALELLNPYELRAKGLNEAITPAEFARALFHINQRRGFRSNRKTDKKDNDSGALKTAISVLRQQLDPDGADGKARTVGELLWWRLKPDEEGQPLRAGLVRARYRERRIEKEDGKTRIDKSYDLYIDRAMIETEFDALWSNQATLNPTVFTEPARAELKDCLLHQRPLKPVKPGRCTLEPSEERAPLALPSQQRFRIYQEVNNLRVLNKDLRDETLTRAKRDELVDALEGHNKRSFTQIKTLLKLPGTTQFNLEDVKRQELKGNSTSAILSRKEHFGPDWFGWPLERQDSIVMRLLTEESEAALVTWLQEEFGFDETRAESIANTGLAEGYGSLSAKALSRILPALQAEVITYDKAVQAAGYEHHSHISHAATGEILPALPYYGEYLQRHVGFGSGDLDDPPEKRYGKIANPTVHIGLNQIRVVVNALVKRYGHPSEVIVEVARDLKQNWEQRKEDQEQQAKNQKRNEQLRADAATILQIAPERVKHADIQKLILWEELSFDIAERRCPYSGVQIGARMALSDEVEIEHILPFSQTLDDSLNNKTLATRPANRVKGNRSPAQAREDFEREGWAYDAILQRAERMPRNKRYRFGPDGYEKWLREDKDFLARALNDTRHLSRVAREYLSLICPQGTRVIPGRMTAMLRAKFGLNDILGLRGEKNRNDHRHHAVDACVIAVTDQGLLQRFAQASASAREAQLDRLVETMPLPWATYREHVERAVHNIWVSHKPDHGYEGSMFKETAFGIRRDGSIVQKTSAEGSKERIIEYVVPITAPGQLARHGLDDKGQPRSYKGYIPDGNHCIEIIANDKGKWEGEVTATFEAYAIARSRGKAALSDAAKSLSGKPLLMRFMIDDFIRLEIDGCQRVMRVASINAAGRLSLADHNEANVDARNRDKESSWRYTYKQAGSLQAAKARHVTVSPIGELRDPGFKE

SEQ ID NO: 1029 - protein, 997 aa, unidentified
  REGION 1..997: note = Description of Unknown: Cas Enzyme sequence
MNYRLGLDLGTNSIGWAVIQIDESGLPNKIIDANSRIFTDGREPKTGTSNAVGRRTARGARRNRDRKLQRMKKMIHHLQRNKVFPHKQESKEQLKLLDPYLLRDKAVKEKLQPFQLGRVLLTLTKKRGFKSNRLEESANNSKFNEALTELEKKVEESEFKTFGSFLYHNDHKKNNDSESLHGTRKLYLKEFEEIRKTQQEFYPNLDQEFWNNCHEIIFYQRPLKSCEELIGKCSLLKETDGYSEKEIKRCPKYKPSFQIFRIAQTISNLHIVKNGVPRSLSTEEKKKIFDKLTSTSKQEFSKLHKLLGLQHEESFNLETGASNSLKGDEVGSTFKGKRYFGKEWGKLSIEKKDQIVEQIAQNVDREELEEYLKETVPSLSSEQVENIIDFDQNKLPKSYANFCLIAIRKLNKVIVDNNFISLTDALEQTGLKQDQGVIKESDFLEYYGKTMPEAVIKRVDGNTPQDKYGKISNPTVHIGLGQLQKVVNQIIKRYGRPNEITLELSRELKQNKHQKELQNKRNKKNKAINDEAKEFIQSMGVNISRNNIIKYKLWKELGEPHLCPYSGKVIPASKLFSREIQIEHIIPFSSSLDDSYMNKTVCYDKMNEAKGDQTPYEAFGENQEMYQRLKNLPGAKRKKFFKGAREEFAAEDRWIARQLNDTRYLSKIAKKYLSSICLSKSISVSTGKMTSSLRHILGLNKLFEEQENKRDDHRHHAVDAITIGLMSPALLLTLRKGKAHCWETIKEKAPFLHSVREEAKKILDSKIVSHRMRHKYQGAFFGDTAYGVLEEPVHLDKKVFNIIVRKNIEEISVKKIDQVVSEFYKMKLQKIHQIIDQKEKDIEFEKLRKKYGVKKLRFYDSISNIEIIKHPKEKNFYKGYAPSALSYLTVWQEPGKNEWTFKGVYVFEHQKYKKDLNKLKPHPAAKLIMKLFKGDYIQTNEDDILIIKSIRPSEGNRNIECFHPNETEAKSKFLGFGKFKKVNLKKVFVGPLGIIKQ

SEQ ID NO: 1030 - protein, 1068 aa, unidentified
  REGION 1..1068: note = Description of Unknown: Cas Enzyme sequence
LPVLRLGLDLGTNSIGWALLELDDQHRPARLVDAGVRIFSSSRDPESDDPLGQARRLARQARRMRDRRIRRLQRVMAELVRLGLMPTDPAERKKLEAHDPYELRARALDEPLEPFELGRALFHLAQRRGYKSNRIVDRGKEEGVVRESITALRAELEANGCRTLGEYWWKRRKRGERVRGAFWTDRTMLEDEFRQIVRAQARFHPEFAPKLESSLQRENGLFNRIFRQRPLKPQQPGVCTIDGESARTPWAHPLAQRFRILQNLTNLRVQIPPDPAFRPLSREEFDKLYAKLKTTRRVECRKIRKILGLPEEARFNLDHELRSELIGDETAAKLAGKKLFGKAWHDLPAERQEEIVERLIAEPDEEAIVAFGKRLGLDEKGVRELAAVRLPQGHCHLGLPVLRAIVPIMERQGLGYAEALREAGFHHSDPFVHAGHDRLPYYGEVLKRWCQPVEAESASEDERRFGRIANPTVHVGLNQLRKLVNAIIDAYGKPREIHVELARELKLGRQDLDRLKRRQRENQHRNRQADEVMRQAGIDPEALSPTSRAENRLRYRLWLELSEERPQWRLCPYSGRPIGMHTLFSDAVEIEHILPFSRTLDDSPANKTIAFREANRDKGDRTPYEAFGHSPTIQGRRYDWAKIAERATRMPKNKAWRFAPDAMERFQCQGDFIDRQLNDTSYLARLTRLYLRCLYRKEEGDRVLALPGRLTALLRAKWSLNELLAEDSRKNRDDHRHHAIDAAVIACTDRGALQTISRRDERGRQRIVVPLPYEAFRRELRERLATMIVSHKPEHGIAGRLHEETAYGPTAIVNDKGTPCYATRWPLSKFESRKHLEQVRDLRLRGALVEHVERETKAGKTFKEALQSFRDPQGNPLRHIRVLVPYDRESMVEIHDPNGHPYKYYHTGKNAYMDVLELPNGKWVGYTVSVFDANRLAATPNAQPPWKASYPAARRVMRLFKGDLVTIGDESSSSTVYKIYQTKQGGRTFLAPHNAGGQLQKRHDAKEDPFRWLMLSASKFPKVRLRKARVDILGRVRTEERRRARADRGDRERRAPPLGRSRPHARPR

SEQ ID NO: 1031 - protein, 1026 aa, unidentified
  REGION 1..1026: note = Description of Unknown: Cas Enzyme sequence
MAAYEDPCDCGFDPELVKTALMSREQFGSTPRKLVLGINMGIAGIGVCLMDELNQEIVLMATHLFDCPWNPKNKTSLASARRQARSQRRNIARRAARKKHISKILMAHGVIPEGASSEWFSVRKGEQDNIQLRVKGLSEILSSRELARVLYGFASRRGYIDHGKADNDKDAGKVKKALKENAEIMDANGYETFAQYLVTQPRIRNRQNDYSHTIDIDMVVDEVHAIFRHQRELGNELATESLEGEYLAALRWLTDTTKRDRIIYSKVGYCTYLGEPIKRGPKSSISSEMVRAYQTLANVKIEHIGSVATQISPLTRNQIVHDLFKVSKNPKPLKWSKLRKKLALADTDTFTGVRQSDEAKDVCVKVPAWNVLCSTLHDLNPALLNRLHDDTDLADAVCAAATFASSSEAFAKRIAELTDGLSKEDMDALLELPYGSKLFTGYGSTSLKALQMLRNAFEDTNINHLYDAEVATGLYDARKALAAKRNVTDDGLLKPYSSYSPICTNPVVLRSCAQLRRIINSIIRHYGLPDTIRVEVANDLKRTEHEKKLITSGNIYNRRTNEKAKDDIVEFFGLKSSDHVKGRDLEKVRLYNEQGGKDPYTGQGIDFGRMLTEKGYVEIDHILPFSRSCDNARTNKALVLTKSNRDKSNRTPYEWMTSGEPTAPNWDEFCIRMDIWASGKEPKHYYSSKLAKLKEDNFTNNIDSFINRNLNDTRYMSKDVAKWLAGCLPFPEDGRKHVFCVSGAATAFMRGIWRIGILDDNGKKNREDDRHYAVDAAVIAACTPSIVKGIALISEEHATNRDADRLLNGSLPYPEYRDQVKAWIPCVVPTYSPTRTATGALFKDNTFSYKGIDGKGKDLIKKKKGALGPCTTAWKDGKGTARAYDEQYGLLAVYNESAARWLFDPLYYIDVQKRKTEEPFIRKFSKDLSLDYWEKIPLTGNEPSLLLKRGVVLIQDGIVGRYYGYDIAHNNVKLSSSGKVSFQKTGPLAAEKFPTPTMWTDELKIMQEDCLGLCWLEFLTNRAVRC

SEQ ID NO: 1032 - protein, 1027 aa, unidentified
  REGION 1..1027: note = Description of Unknown: Cas Enzyme sequence
MAAFEDPRELGFDPELVKTALMSREQFSSKPRKLILGIDMGIADVGVCLMDELNHEIVLMATHLFDCLRNPKDQTSLASTRRQARSQRRNIARRAARKKHIRQILMAHGVIPEGAPSEWFSIRKGEQDNIQLRVKGLTEILSDRELARVLYAFASRRGYIDHGKADNDKDAGKVKKALKANAEIMEANGYETFAQYLITQPKIRNRQNDYSHTIDIDMVVDEVHAIFRHQRELGNELAAESLEGEYLAALRWLTDTTKRDRIIYSKVGYCTYLGEPVKRGPKSSISSEMVRAYQTLANVKIENIGSGATQISPSVRNQIVHDLFKVSKNPKPLKWSQLRKKLDLADTDTFAGIRQSDEAKDVCVKIPAWNVLCSTLHDLNPALLKRLHDDIDLADAVCAAATFASSSESFATRIAERTDGFAKEEMEAILELPYGSKLFTGYGSTSLKALQMLRDAFEDTSINRLYDAEVATGLYDARAARAAKRNAGDDGPLMPYSKYSPICTNPVVLRSCAQLRRIINSIIRHYGLPDTIRVEVANDLKRTEHEKKLITSGNIHNRRTNEKAKDDIVQFFGLTDSDHVKGRDLEKVRLYNEQGGKDPYTGQGIDFGRMLTERDYVEVDHVLPFSRSCDNSKTNKVLVLTKSNRDKANRTPYEWMTSGEPTAPNWDEFCIRMNVWAKGKDPKHYYSSKLTKLKEENFTNNIDTFISRNLNDTRYMSKDVAKWLTDCLPFPDDGRRHVFCVSGAATGLMRRVWRIGILNEDGKKDRGDDRHHAVDAAVIAACTPSIVKSIALISEEHAANRDVDRLLNGSLPYPEYRNQVKKWIPCIVPTYSPTRTATGAFFKENSFSYRGVDEKGKDLVKKNKGKLGPCTTAWKDGKGTARAYDELYGLLAVYDESSSRWLLDPLYYIDVQKRKTEEPFIRKFSKDFSIDYWERIPLTGSERTLFLKPGDVLTQDGLVGRLYFYDISCNRVGMYYTRGKISFQKTGPLAAEKFPTLSKWTSDLKVMQEDCLGLCWLEFLTDRADHC

SEQ ID NO: 1033 - protein, 1058 aa, unidentified
  REGION 1..1058: note = Description of Unknown: Cas Enzyme sequence
MNKILGIDMGIASLGYAVVNIDDENFVNGDILASGVRIFDVAENPDNGSSLAAPRRAARSVRRILRRKVMRIKAIKQLFLDFNLLSPQELDLLSKQDFKTLYQATPEGQPIPSVWEIRARALDNPCSLVDICRALLHIAKRRGFRSMRKSEKLTGEAGKLLKGVEEMQKRLQESHFRTIGELLFHLPATEPKRNKDGSYSHSVARSLLEEEVHLILQAQREKGVNALSQEFETQFCKIAFLQNPLQPSDPGFCTLEPTEPRAPKNAYTAELFAALCKINHIYLEEDGQSHALSAAQRALALEKCFSTQKTNYKQLRELFNLPNNIKFNISYTAPAKKKSKKEETQSPEQAAQAPKEYDAEKNTTLYNMTGFHALKKALKSSPLWAEYQTNPNGILDKIAEVLSRYKSDGEIRQHLTALGLPAEAVEKLQNVNFSGFMNLSLVAMNKIIPFLKEGFRYDVACKKAGYNFQATQQNKGLSKLPPLTEEDNHTITSPVAKRSLAQARKVINALNKKYGPFDAVHIEVAREMGKSFEKRKEMEAKQKANAEERAQLKEVGIDGIIPQTETDLKKLRLWKEQDGLCMYSLQYIEPQKILEEGYCQVDHIIPYSLSFDNSLNNQVLCLTSENQHKKNQIPYEYFHSGKAQITWKDFEGYVNSLQNMRMAKKHRLLKQELTEDELQGFKERNLSDTKLISRFMKNYLLANLRLTGKYKQGVFCVNGKHTSTLRGFWRLQKIREDGDKHHALDAIVIACCTNRLMQYISTKYRQNREIELKRKEVAVPWPFPQFNQAVENSLLSIFVSRPPRKKVTGALHKNTFFSAKHIKKGIKTLRTDIQKLTLDSLKKQRELEVKHFGVERNKPLYDLIETALNNRPDDKTPIQVQMPTKNGGFVPVRHIKLISESTSGIPVLGGTARAENDSMPRVDVFLEDGQYYVVPVYTMDFAKGVLPLVAQPSGRLMKKENFVFSLYKDDYVNLVNKQGETWEGYFKQYDATTSQIHLESHDRSAQYTVSGQLTNKKKIASSTLKLIEKYQIDIFGGKHLVKKEKYIGIIRKNKGFGG

SEQ ID NO: 1034 - protein, 1008 aa, unidentified
  REGION 1..1008: note = Description of Unknown: Cas Enzyme sequence
MFRTRLAHKAREKWLHKVMRGAGIEILRGRNYDLAGNWKAGEVSDKRLEQEFPARGDSTCYTSCLLRIKLLRGEKLEPWQVFKAFHSAIQRRGYDPNIPWKTRKSRNRKERDGDGKSAGTEDRMRKFEEDLRNMAPGKEEFHFPAYFDAYQIGLWDPAKPNELKLRIDCHARTTRNQIVPRKLVEAEIRKMAEGAAEHFPALAGKADYLLYGPAEEAYASFFPKLRKQFDLTEGGENDWQGVVGQKIPRFENRIIAKCALIPRLNVCKLREGEKERPHQKSLAAVEATFLMKLKNLRVQRGGGAGWLTAEEIRGVYEDPKRKDWKFSKPVWKKYCVSIGAIPLPGQEQVDAPRLSGRSRFCRPALEILKRLILSGKKPSEFLRDEIGSLKGNKNPLKGLVETDLKFIADMAARNDTWESIYIPNQQLEAIAASAGNPQKAIAHLIGMQNDPVVRHRLTAFHQRLCELEQSTGMRPDSVVLEFVREDFMGKRAKLEYSNFIKKRAEERTKARNEAAAAGATERSAGLKLELLRAQDGRCLYTDEGLIPSKLDEYEIEHIVPRSAGGPDAVVNCVLTTQITNTAKGQRIPYDWFHQEMPDKWDAYVNRVRARATHLRNKKVQLLIAPNAAELAERYTALAETAWIAKLAQTIVGLQFGWRNGVDEEGKKRVVVVSGGLTGRIRRKYALNQVLNPNAQTEEEAEKKNRDDDRHHALDAMIISFIPGWVRDAKKESFFRFPEPIHKNAKGFFEKEIATVIPRSLCFEKSVLAETIYGARGEGEGKVIVQRVDLLKLALKPIAPSKTKFDLDYLAKQIKAVRDSRIQQLLAEIHAKTPDEGRWKEFCDQFRLPRKDGSPGPRVLSVLMNVGEPKEYKDLSKDGTGAYRRAFQGHKGQIIYVETSADKKGNAKAIVQVRPVYAFDSKARVVKELADRFGTSILVIGFFQSGCLVEVDKAVAHEKLPLPPGKYRLNTILTGSKNVKVTTADGKTYPDIPLYNLANMIAAGFRRAD

SEQ ID NO: 1035 - protein, 1057 aa, unidentified
  REGION 1..1057: note = Description of Unknown: Cas Enzyme sequence
MKTYVLKEKTELPSRDMVWAFDLGKGSIGEAVRQGTKFLHKASLLIPAEFAETKTATTRRRMWRTRQAHKAREKWLNEVMREVGIEVLHGRNYDKAGNWKPGEPADERLEREFAKPGDSTCYTSCLLRIKLLRGEELEPWQVYKAFHSAIQRRGYDPDIPWKNREQRKKSNDADDDEAGTQHRMEQFIKDLEVMVPGKSEYHFPCFFDAWKMGLWNPAKPGELKDRIDCHAESTRNQIVPRTLVEQEIRKLVDGAAKHYPKLQGKAGYILYGPTEKAYASFDPKLRKKHNLKEGGVNDWQGVLGQKIPRFDNRIIGKCVLIPRLNVCKIRTDENGKLHPQSRIAAETVFLMRLKNMRFQTSKGQAWLTSKQIADIYNDPKRNKLGMTETQWKKYCLRFGAKPMLGQYQEVEEPSFSGRSRFCRPALEILKRLILSGDAPAEAYGKEVARLNGNTNPVKGLVTDDLKFLLQMGETWEGIYIPNQKLDALARSTDDPHEAIRQLIGSQNDPIVRHRLTLFAERLDFLATTKKFGTPDFVVLEFVREDFMGKKAKFAYFKFQRDRAHDRAKAREDAAKAGAEERSAGLKMELLKAQVGECLYTNAKLIPEKLDEYVIDHIVPRAKAGPDAAVNYILTTRRANDDKGDRTPYEWLSSQDGWDAYAERVKRRIGTLRNKKVQLLTSPDAEMLVEKYTALAETAWISKLAQTIIGLRFGWVNGNDREGNKRIIVVSGGLTGRIRRKYKLNSLLNPDAKSEEEAETKNRNDDRHHALDAMVISFIPNWARNSKLCGFFRFPDGVRRELFGKEIESVKPRNVAIEKPIFEETIYGQRFITGQKFIVGRESLSGLAIKLVQNRETLKKRGDIDTHRIVDLRIQRDVETFWEANSTASLATWKQWCADYRLGVNGPRVESILVMKSKADSTEEYKNITKEGAAAKRGQFKRGAKHRGYFIYDHPAPTRKEPEKMQVEVRPVFVFESWRAVQGELNRNKDWKIYGFFESGCQVRMQREWNFQGKKYPADEFILGSVWANRNAKLWHPIHQEVGPVGLRILLDAGFERI

SEQ ID NO: 1036 - protein, 1349 aa, unidentified
  REGION 1..1349: note = Description of Unknown: Cas Enzyme sequence
MKKILGLDIGTNSIGWALITEKDSLLHNIDAIGSRIIPEKDEHRDFEKGRTITKNATRRQKRGMRRLNDRFKQRRNNLIKLCFKLGIIPTGLEPLFNKAEFIGNKILLPQGSFQNGDKQYSPYEIYLLRSKALKEKVSLEDLFRIIYHLNQRRGFKSNKKAKNEDLNTVEKKDDIKTEEHDITIENVKIISVEITGNLKGRTKKDEYLIILEDGRKANTDKYIFKKYCGENIILEIKKDFLKTTKETKYTFSFPNNWQKGRKELNDAIANSGGFPGEYFYEEYLKAKNENKLYNFKVRENVVNRELYENEFQAIWEKQKELWLIEGIDIDNLLRKNEAFESIIPKNNFNERKIWSQKGLGEFVRKYIIYYQRDLKSQIKTISDCQFEEKYVEILDKETGESNKIRNGPKTCPKSHPDFQEFRIWQQIHNLIIFNENEESIEIGDDLKVILFDYLNKREEADKKDIDKEIKKHISNFSYSNIAEKTKWTGNRTKSLYRKIFKRFNYDGSSIFDTKELYLRLWHLIYSVGDEKGIRNGILNINSLLRKQFSEENIIPEELVIELIKIDYSETQYASLSLKAINNLLPLMRCGYLYNEDNLTSKVKQRIADFLDDQINDDFDPKTLKAIKTKINISEFKSLSYYEAASLIYGKHSAKQLDKYESPDEIVPVPRHSLRNPVVEQIVNETLMLVKDVWRKYPELKDGEIKIELARELKSSKEEREKIYNSQNSNKEANKRIINEIKEIKGINYNPSLSDIEKIKLWNEQGKRSPYTGDFIQLSDILTESIEIDHIIPRSRFYNDGLINKVVCESHINSDKSNMTAFEYMNTGTMHNKLSYEDFIHSIRLYPQNKRRMLTLKEIPDDFIERQLKETQYIAKRIKEELGKIVGTINVKSTSGHVTNYLKEQWGVSELMRRLIKPRFQRLEDKFSVKLVEESNIIGRNGKPTGKKKTIIKGFSKRYDHRHHALDALIIACTRQGIIQQLNLLNQISTGKRKIIEDTLNESYRKFIPPTGKQDKGAEYFYSLAETAMNKVIVSYKNKKRLVSKGINWYKKFYLEKNRIVKLKQDETDGKQRNWAIKGRLHLETNYGVYDFNNIQRHISKCKLSKLTENKISNIADNKLQNDIQKHINKPEYEGNINNAFNPEGLVDFNKERTIPIYSVRVLEDGIIGKVQGKTPLYNIKRKLEVEKGSNFCVTFYEHPETKERKFDVVSFFDAVLLKTNGENPFQTEKGVEYQKEGYKLLFTLSHNDLVYVPPKNVELSNIDFDYLNVFDKIFRVVKFSDSDFYFQPHNYAKEITIHEGKAKDSKEYKGEFNKGTNGSIYCNENKNKIKDTCIKVFVNRLGDIRPFSL

SEQ ID NO: 1037 - protein, 1031 aa, unidentified
  REGION 1..1031: note = Description of Unknown: Cas Enzyme sequence
MTWAFDLGLGSIGEAVQQKGEFKHAASWLVPSEFASTKAARTRRRMWRTRQAHKARESWLNQCLRSAGMEVLVGRRVERGPQGWTTLPGDPRLEREFPSAGDTTCYNSALLRIRLLRGETLAPWQVYKALHAAIQRRGYDPNIPWKSGASRSTEEKEEGETRARAAEYQSLLEDMAPGRTEFHYPCYLQAWKMRLWNPGQPEVLQERVSHDAESIHGMVAPRTLVEKEVRDLVAAAARYHPQLAGQADFILWGPACKPYASHNGTLRKQHGLRQGSEEDWEGVMGQKIPRFDNRIIEKCALIPRFNVCKMAPEGRAAAQPDAALPREVAFLMKLKNLRFSRGGGIAHLEAAEIATLFEKRREALSLTQKQWETACEKLGGRPLPPDLEVKAPRLGGRSAFCRPALKHVKELILSGKSPRDFHAEALARLHGNTNPQKGLVPADLDFLLRMGDSWEGLYLPNKRLEAISSRARTPDEAIREVIGSVNDPIVRHRLQLFVERLDELETRFGPPDQVALEFVREDFMGEKAKIEYRKFLNRREKERKEAREQAGQLGATSGSSGLKMELFKAQRGQCLYSGQRLHETKIEDYVIEHIVPRAKRGPDAVINYVLTTEELNNDKSDHIPFEWPYLKKQWDAYTQRVESCAGALGVKRVRLLVSPDAVELAQKYTALAETAWISKLAQTILNLKFGWTNGNTPDGRKAVVVVPGGLTARIRRKYSLNSLLAGDGVDEEEAEKKNRKDHRHHALDAMVISFLPGWVANPDKEHFFRFPEPVRANPRGFFQTAIHNVVPRQLCFEKGKLEETIYARRTIAGNSVAAVRQEFRALAFKSVGINKTEFNLDYLYKQTDKILEPRIRQLVQDFASTEPNEAAWERFCDEVRLPRKDGHPGPHVRRVRMRVGPMDEFKNLSKDRAASGAYRKGSTHHGQWVYRDATGRSLVRPVYAFESAGQVRRELIAMHGLDALVGYFQSGCLVELVRPVAHKKTPLAPGQFSLNTLRKDGFAVVTDARGRKSEPISLKTLLESGFHRVTS

SEQ ID NO: 1038 - protein, 1064 aa, unidentified
  REGION 1..1064: note = Description of Unknown: Cas Enzyme sequence
MKDLELAFDVGHSSIGWAILQADPSLEIKGCGAVIFRADDCLASKRRDFRRQRRHIRSTRQRIRRMKALLLHLAILTQKQLDKPGCGWPWKLAARVLVGGEPLTWPELWDVLRWYAHNRGYDGNRRWSGQNDEDAEDAEKVVNAHTLLDKHNVKTMAETFCKVLGVDPLGAKSSSIVRFKGLNAAFPRDIVEAEVRRILQAHFGKLKSVDEKFATALFSNWKSLPCPVIKLPQRYYGGLLFGQLVPRFDNRIIASCPVTYAQEYEKLCTGGMSHDKAAERARIVAKVPSRNTPEFLNFRWGMLLANVRVARLGNTGLQPLTPAERKELDKRMRAVGSMTEKQFKDAVRDVSGAIRGNFDTMFMEVNQKEALILDPVQDCLTSGHAASLYPTLPERIQKRARGQLRRGKTLILGDLGKDVTAFDAAMQQILDKVAGKGRKKDKPLTHGEILGVRLQAKKLSGRAAYARPILVKAFEEVMAGKHPKEENGCLFVTEKIREAQLNRSLTDQTNNHLVQHRLLILGRLLSDMLKEYAGGDKARVGKITIEVNRDLREFSGKTAKEIAKDLGSRLANHHHVTEKLEAALGSHSRITAGLIRKARIAEDLGWTCPYTGQMYEPIDLVTRRVDKDHIVPRADRASDSLDSLVITFSAVNKWKGKRTAVQFIQEEQTKPVPDLPNLSVISLTRYRDFVAGLESFKGHNDDKKRKKRRKELMLLADYNEPEFTPRDLTVTSQLVRLGAQVLRKAFDDCEDKPVIVSLPGAVTGEVRKAWDVLGCLSLACPQVLDETGKVKTKKEVRDLTHLHHALDACVLGLAAHHIPNNGRVWELITKRNLTTAEQAELVKLKVFSVVGERRAELNDLSRERKEQIRQRLAEKRVVQHIPKRVSGLHVEQNTWRVRGINGDDVLLEQRIRQPDGTRPLKQASERAGKLMGLEPGKLHTLQGALVIGDNFGVALDPVPTVIPFHKVWPRLQELKAKNSGKMPRVLRNGQLIQVPSGAFKGTWKVFSAKNNKTGMALDIGHPDVVRLKNKTDGHKINVLLSTLLKNGIIGLNTPLTGVAATDTT

SEQ ID NO: 1039 - protein, 1086 aa, unidentified
  REGION 1..1086: note = Description of Unknown: Cas Enzyme sequence
MSAKIDPLQLAFDVGHSSIGWAVIQPSGPAVDDLQLLGCGVVTFRADDCLASARRGYRRQRRHIRATRSRVDRLKKLLRHLGALTQKELDTPGCAWPWLLAARVLAQRGGPAFTPLSWPEMWDVIRWYAHNRGYNGNIDWAKSGAEPAPRGGDEDAEDDAEKVVNARELMRSMATHSMAATVCAVSGLDPLGKKRSANVPPAERFKARNAAFPREVVTAEVRQILEAHASILPGITPEFIRALMEDWKALPCPEIKLPRRFSGGLLFGQLIPRFDNRVISRCPISGGKVPTRNAPEFLKFRWAMLLANIRVASNAEPTLRPLSIPERHQLDELMRAQGSLTPTDLKKAVREIAGSLRDNLETMFMHPDSKDALVLDPIQKRLAGWDYAEIFQALPEQVRSHARIRLSRRKSFTLQQGLVEAARLGLDTTPFERALAGHLEKRNVNRKKKETPPTRAEILANAIEVKPLAQRAAYSRALLAQAHADVMAGKHPKEPGGCLFVTDEMRDRQLNRPIDDQTNNHLVRHRLLILNRLVEDIVKGYANGDHARVQRATIEVNRDLREMSGKTAKEKAQDLGLRLSNHAHVSKELEKHFTPEQITAGLIRKARVATDLGWRCPFTGKQYDPMQLFHKGVDKDHIIPYSLRPSNSLESLVITFSEVNRLKGKRTALQFVEEFGGKPVPGMPSLSIHTPEQFKRFVEGLESFKGHPDDKRRKKKRKELLLLRDYEEKEFVPRDLTQTSQLVRLGAQSIKRAFQHVDRTPVVVSLPGSVTGLVRKSWRLLGSLAQANPQVLDPDGETKTKTEIRDVTHLHHALDACVLGFAAQLIPNNGRVWELLLKRKHNPAERAEMEHLGLPGAFTQFGFELTDLPSNLKGQIASRLQEKRVVQHIPSRMDGLRVEQNTWRVLETKEDEVILQQSMRGPDQIRVEKRSSEKPLKLLGLNPDTRHPKLKKLKGVLVIPDNFGVALDPEPTIIPYHKVQRRLAALAAKNGGKMPRVIRNGQLIHVNTGRFIGIWRVFSVKNTAVGIMLDLGHPDIVRMQSKGEGIKRQVRLQTLISDGLKGTTADLIGLNSCPTTSSTSTPPSAP

SEQ ID NO: 1040 - protein, 1123 aa, unidentified
  REGION 1..1123: note = Description of Unknown: Cas Enzyme sequence
MKYTLHPSPATEKSAIEKPSSGDLQLAFDVGHSSIGWAVLQSDQSSAPNILGTGVVTFPANDCLASQRRAFRRQRRHIRATRQRISRIERLLSHLTVIPEERLSEKHKQGGGHSAPWLLAARVLRGGPLLTWEELWDVLRWYAHNRGYDGNKAWSAHEIEAEKEDTEKVERARNLLTDFKTKYGRQGSMAEVFCDVSGLDPLGTKISCNLPGDKRPKALNAAFPREDVEREIRAILEKHVGKLPNLDDAFITSLLEDWTVLPCDSIRLPGRYGQILANGKHSPGGLLFGQLIPRFENRIIATCPITFERVYQSVLAEGGDITKAKHEGERLAKVPAKDCPEFLRFRWAMQVANVQVATGEGRKTRPLSIDERNRLDAKMRERGFFTPKQFKEAVREITGGAPDNIDQMLTHPDADKALVLDPSRKAISRAPWDTLFPLFSEQVQNRNIGKLRRGRTISLSSLSADAPTALDSAIENLLSAENTKKSRKENPLTREEMLTATASCDALTGRAPHSRAIMKEVADFVFTTDRHPTEEGGPLYRSDAIRKAQLERAIDDQTNNHLVRHRLLILERLHRDILHEFAGDEPGRIARVTIEVNRDLRELSGKTAKQVAQDIGQRLANFKSVTERLEKAFAGKNIRITPGLIRKARIAEDLGWKCPYTGKDYDEFDLLHRKVDKDHIIPRSERASDSLDSLVITFAEVNRMKGKRTAARFVEECAGQTIEGRPELSIKTFPSFLKDVATLETFKGHDDDKRRKKRRKEMLLLRDYVEKEFTPRDLTQTSQLVRLGAQMLERAYAGQEKKPVITSLPGSVTGAVRKSWNLLGCLATANPLVINKDEFDEQGKPKIHNKTEIRGITHLHHALDACVLALTSRFFPRDGGVWELLVKRRLNSEEQAVLRARIGNHVEFTKDGEMKLTELPNSLKEQIRSRLAERRVVQHIPKERTGLSVEQNAWRVVSIEDGEALLRQSMRQPDGTRAKKETQEKVSKLLGLFPGGGIGKLQRNKSALIIPDNYGVALDPEPTIIPFHKVPVRLRELRDKNGGKWPRVLRNGMLIRVPQGRYVGMWRVFSTKASLTLDLGAADKVTLSSKGDGQKREVQIRTLIRDGLEIPNVPYTGVNSVET

SEQ ID NO: 1041 - protein, 1081 aa, unidentified
  REGION 1..1081: note = Description of Unknown: Cas Enzyme sequence
MNGKGKVLAAKPNFGIAFDVGHSSIGWAVLQTEGRAEIAGCGAVTFRADDCLASARRGYRRQRRHIRSTRQRIARMKVLLKHLGALKPEQLDQPGCAWPWQLAARVLCGGKLLTWPELWDVLRWYAHNRGYDGNRRWSAADAEAIADDTEKEENAKTLMGKHRVGSMAETFCMELGVDPLGQKRASTVRFKGLNAAFPRAIVEGEVRRILQAHSGKLPKVDAALERALLGRDNRDRTAWQSIPCPALRLPKRYEGALLFGQLVPRFDNRIISKCPVSGEKVPSRNCAEFLNFRWAMQLANVRVARFGEKELTPLTAPERRQLDAAMRKQGGMGAEEFKKHVRQAAGAIRDNLDTMLLHPDAKEALLLDPVQKIVQSSDLRPLWQILPERLQKRARGQLRRGKTITPARLRAQLEELGLSVSAFDAEVTRQLDAANTRNRKNDERISRQGLLNRPFAAKRLDGRAAFARPLLKRAAEEVMAGKHPKEEGGCLFVTEEMRQAQLSREIAEQTNNHLVRHRLLILERLVGDIIKEYAGGDKARVAGITVEVNRDLREMSGMTAKQKAQDLGLRIANHHHVVKKLEEDESLMRVLRKQGTRITAGLIRKARVADDLGWACPYTGQRFEPVDLVTKRVDKDHIVPRASRASDSLESLVMTFSAINKWKGKRTAWQFVEQEQGKPVPDLPNLSITSLSRYKQLVESIETFKGHDDDKRRKKRRKDLMLLPVYEEKEFTPRDLTTTSQLVRLGAMALRKAFLGCKRQPVVVSLPGSVTGAVRKAWKVLGCLSLAAPGVLDENGEVKTKQEIREVTHLHHALDACVLALASHFIPNNGRIWELIVKGRWTPAEERELKTLGIFSWDSEGRFQVRDLDKTLKEQIRQRLGERRVVQHIPARMEGLRVEQNTWRVVSVKDGEATLRQRVRAADGSRPGKTTAEKVTKLLGLQPVSGRGKLLVNRGTLVIPDNFGVALVEPEPVIIPFHKVWPRLSELRAANGGRMPMVLRNGQLIRVPGGKSFKGVWRVFATKNNASGMALDIGSPDVVRLKNKTEGHKINVRLATLIRDGMEVLRTPLTGFAACPAPSSP

SEQ ID NO: 1042 - protein, 1131 aa, unidentified
  REGION 1..1131: note = Description of Unknown: Cas Enzyme sequence
MTATDKSLELAFDVGHSSIGWAVLSVSRSNELPELKGCGTVLFPKDDCLASERRAFRRMRRHVRSTRLRIERIKRLLAHLQVLSSENLDTVSSSSPWQLAAFVLAGGGLLTWRQLWDVLRWYAHNRGYDGNRRWSRQSDDTDADTEKVTNAKALYQRYGTQTMAETLCKHLAVDPMGPTAASHIRFKDLNAAFPREDVEAEVRLILTKHLGKLSGVTPELIRALIGNDRDDETAWAAIDCPSLKMRLNYFGSLLFGQLIPRFENRIIATCPISFERCYQAVFAETADSAKASHEAEKQAKVPSKECVEFYRYRWAMQVANIRISTGDKQSRPLSSQERNTLNARIEERGFFTAGEFKSAVQQITGAVTSNLTQMLLHPDAAEALVLDPVRKLIHTKLENIWPTLTSQAQKRAAGKWRRGAAIKLGALGDWCGSERGAFDAAIKRRLEGEGTRRTRNQKPININDLLGESFSADSISGRAPFHRSVLREVVEFVFATDRHPAEEGGPLFRSESLRQTQLQRAIENQTNNHLIRNRLTLLDRLHRDVLKEYAGGDPSKVSRVTIEVNRDIREFSGKTAKDIAMDLGSRLSNFKGVVKKLERDLEGQNIRISPGLIRKARIAEDLGWRCPYTGKDYDSFALVHTRVDKDHIIPRSLKPSDGLDALAITFPEVNKLKGNRTALRFVEEFQGQAVPGRPDLTIVTLRQYQAYVDRLDTSKGHDDDKRRKKRRKEALQLKDYVDKEFTPRDLTQTSHLVRLGAQLLERVYIPQKQKPVITSIPGSVTGAVRKSWRIIGCLAGINQSLPADSVDISKGDLRESTHLHHALDACVQALASSLLPRDGGIWEILVKRRLNGQEQQIAKTRLSGIADVDSEGRLRLRDLPKSLKEQIRDRLFEKRVVQHIPADQGGMACDQTIWRVFDPTDEHPSAKRIEKWLKALKIQVPARDADTVLIVCRKRKDGMGAESGKLLHEGKIWRWVYDLKAKSALIGLSPRDPEKAKLKLIKAVKVLGDNFGLALDPEPTILRPIKVWEQLAELRAKNGGKRPRVLRRGSLFYIPNKTGRADYRGIWVVRSIKLNQKQNGTFGLFLDISTPDRIDCKGTGQKDVFINVNLNTLILDGLTEFKNPPLIGLFK

SEQ ID NO: 1043 - protein, 1059 aa, unidentified
  REGION 1..1059: note = Description of Unknown: Cas Enzyme sequence
MKQTKQKYRLGIDMGSTSIGWCMLKLDEDNNPCGVINMGVRIFPDGRDDKSKEPLSVSRRTYRGMRRNLDRYLDRQTRIRDFFDLHSWLPQDDNERKRIYTMDPVALRKEALERKLTLAELARAYIHLSKRRGFKSNRKTDKEAKTQYTEAIANLNAKLQDSGALSLGEYLWKRNCLVPLNQRHLQKPAKFRYDKGLSDEERIFPTRAMVEDEFELIWSVQAAYHSNLTDELKNDLKNIIFYQRPLRAQEVGKCTLEPEEKRCPKAYPLFQEARLRQDINHLKLVNAFDYTTRELTQEERDTIYAMLDKKEKVTFKTIRRELLGKATHDDYRFNSETENKDKLHGNLTNHAFAKDRDTGIWWEALTPQRQKEVIDIMLNDELSDETVCLLIRDMEADAELAEKILNLRTPEGYGNLSEKALNNILPYLRQGHIYSQACELAGYNHSGKYNGEVFDHGDLPYYGALLKTSTLPLARTSHDKNADEFGKINNPTVHIALNQLRLIVNTLTSKFGGPAEVSLELARELKLGQKQNEEINATIRRNTKANEKIADELAKLSLQNNAENRLRYKLWEELSDDPLKRCCVYCGRQISVSDAYSPQVHIEHILPKSRTFDDNISNKTLAHLSCNNEKGERSPWEAFGTNKGKYDWQAICERTASLPANKRWRFREDAMQQFENEEKLIDRMLNDTRYMSRVAAEYMQYVTGRTAVPVTGKLTEVLRRKWGLNQLIGEDNTKDRTDHRHHAIDAFVIAMTDRSLVKQYADSIKRSRERFVENLHTPYPDFKHEELQLLIDKMTVSYKPDQPNPSILKKRNQTAGGLLEETAYHYLGQDKENPKYGIFCTRKNIADITPDKIDDIRDESGHLKKRLYALLERCDRDEKAFTAKLSNWSKTHNVKKVKLLLKANPATMIPVRDKKGRIYKYYASGENLFADIYNPVKPGSPPKWEMEIVSSYRAHQDGFLPDWKRQYPWAKLIMRLYKNDIVAFTDSEGNRELRRVRKMSSGVLFLRELKIAKKPKGKEGIGEQFTASQLQDKNACKAGVDAIGRYFDPKGKTYAGDRA

SEQ ID NO: 1044 - protein, 1129 aa, unidentified
  REGION 1..1129: note = Description of Unknown: Cas Enzyme sequence
MKTYTLEKSPATTNFLTASEGIHLAFDVGHSSIGWAVLDVHGSSSPQLLGTGVVTFSADDCLASQRRGFRRQRRHIRATRQRIFRIERLLAHLGVITTDALEAKHKQGGGHSAPWFLAARVLRGGDLLTWPELWDVIRWYAHNRGYDGNKAWSAHETEADKEDTEKVERAKNLLTDFSKKYSRSGSMAEVFCDVSGLDPLGTKMSCHLAGDKRPKALNAAFPREDVENEVRTILQKHIGTLPRLDADFIRALMEDWTTVPCESIRLPGRYGQILSSGKRTPGGLLFGQLVPRFDNRIIATCPITFEHVYQRVLAETGDAAKAKHEAEKLAKVPAKDCPEFLRYRWAMQVANIQVATGERRKTRALSVDERNRLDAKMRERGFLGKAEFAKVVREITGESADNIEQMLTHPDADKALILEPARKALAKSPWNIFFPLLSQAIQKRAVGKLRLGKTVKLGTLIADTPFALDAGIEALLSAANSKKGKGQKSTTREEIFYATARCDSLPGRAPYSRVVMREAADFVFATDRHPTEGSPDAHDNGPLYRSEAIRNAQLQRAIADQTNNHLVRHRLLILERLHRDILKEYAAAEPARINRVTIEVNRDLREFSGKTAKQVAQDFGQRLANFKNVAARLEKAFDGKNIRLTPGLIRKARIAEDLGWKCPYTGQSYDEFDLLHRRVDKDHIIPRSERASDSLDALVITFSEVNRMKGKRTAVRFIEECGGQTVEGRPQTSIKPLANFHKDVAALEVFKGHDDDKRRKKNRKRLLELRDYVEKEFTPGDLTQTSQLVRLGAQMLERAYTDQTKIPTIVSLPGSVTGTIRKSWGLLGCLATANPLVVNNDDLDEHGKPRIHSKTDIRGITHLHHALDACVIALSSLLFPRDGGVWELLIKRKLNQQEQATLKSRIGNAVEFAQDGSLHLTDLPAELKDQIRTRLAERRVVQHIPKEMTGLSVEQNSWRVVSIKDGEALLRQRMRQPDGTRPVKETKEKIGKLLGLFPGGGIGKLQRNKAALVIPDNYGLALDPEPQIIPFHKVPVRLRELRDKNGGKWPRVLRNGMLIRIPAGLYAGTWRVFSTKASLTLDLGATDKVTLGSKGDGQKREVRVKTLIRDGLEIVDFSLTGVSTPPKEL

SEQ ID NO: 1045 - protein, 1079 aa, unidentified
  REGION 1..1079: note = Description of Unknown: Cas Enzyme sequence
MDATSFPKGKSSLGEKSSNKIQLSFDVGHSSIGWAVTTHRIKTGDPEIRGCGVVTFQADDCMASARRGYRRQRRHIRSTRQRIERMKVLLEHLGVLTRKQLDTAGCAWPWQLAASVLKAGKLLNWRDLWDVLRWYAHNRGYDGNRRWSAAEAEAAREDTEKEENARSLMQKHGLSTMAETFCAAVGVDPLGRKRASMVRFKGLNVAFPRAVVEGELRRILQTHIGKLLRVDETLIRALVGNDQNDADAWRSIPCEKLKLPKRYQGALLFGQLVPRFDNRIISTCPISGEKAPSRNCVEFLRFRWALILANVQVTRFGERNSTPLKAAERLELDKRMREAGAMTVEEFKKYVRDVASAISDNMDAMFMDPNAKEALTLDPVQKLIKSELPTIWPLLPESLQKRARGQLRRGKRISLKALRAAMTDMDVSAFDLSVRQVCVGQKRGKSGGLSLEDLMGRELSVKRFDGRAAFSRPLLQKAYEEVLQGRHPKEADGCLFLSEEIRKAQEQRAITEQTNNHLVRHRLLILGRLVDDIIKDYAGGEKGRISRAVIEVNRDLREMSGLTAKEKAQELGLRLANHKHVSARLEEDAAVAKVLDARKARITAGLIRKARVADDLGWTCPYTGQKFEPVDLLTCRVDKDHVVPRADRASDSLDSLVITFSAINKWKGKRTALQFVTEEQGKPVPGLPQLSIMSLTRYRDSISKLDCRKGHDDDQRRKKKRRDLLLVEKYAEKQFVPRDLTVTSQLVRLGAGVIRKRFADMPQPPTVISLPGALTGAVRKAWGVLGCLSMAAPRVVDEDGRVRTKQEIRDITHLHHALDACVLGLAAFYIPNDGRTWELMVKRWGPSEVKELDRLGLLRHSSEGPRLIDLPASVKEELRRRLAEKRVVQHVPRKMEGLRVEQNAWRMVTVDNGIATLQQRVRQPDGARKLNVAREKLSKLLGSQPGKLARLKGALVIPDNFGVAILEPEPVVIPFHKVWVRLNDLRNAHGGKPVKVLRNGQLIRVTGGKNFKGVWRVFSAKNNATGLALDLGEPDVVRLQNKTPGHKINVRLATLIKDGMEVLNCSLTGVAACPTTSSV

SEQ ID NO: 1046 - protein, 1363 aa, unidentified
  REGION 1..1363: note = Description of Unknown: Cas Enzyme sequence
MTKLNQPYGIGLDIGSNSIGFAVVDANSHLLRLKGETAIGARLFREGQSAADRRGSRTTRRRLSRTRWRLSFLRDFFAPHITKIDPDFFLRQKYSEISPKDKDRFKYEKRLFNDRTDAEFYEDYPSMYHLRLHLMTHTHKADPREIFLAIHHILKSRGHFLTPGAAKDFNTDKVDLEDIFPALTEAYAQVYPDLELTFDLAKADDFKAKLLDEQATPSDTQKALVNLLLSSDGEKEIVKKRKQVLTEFAKAITGLKTKFNLALGTEVDEADASNWQFSMGQLDDKWSNIETSMTDQGTEIFEQIQELYRARLLNGIVPAGMSLSQAKVADYGQHKEDLELFKTYLKKLNDHELAKTIRGLYDRYINGDDAKPFLREDFVKALTKEVTAHPNEVSEQLLNRMGQANFMLKQRTKANGAIPIQLQQRELDQIIANQSKYYDWLAAPNPVEAHRWKMPYQLDELLNFHIPYYVGPLITPKQQAESGENVFAWMVRKDPSGNITPYNFDEKVDREASANTFIQRMKTTDTYLIGEDVLPKQSLLYQKYEVLNELNNVRINNECLGTDQKQRLIREVFERHSSVTIKQVADNLVAHGDFARRPEIRGLADEKRFLSSLSTYHQLKEILHEAIDDPTKLLDIENIITWSTVFEDHTIFETKLAEIEWLDPKKINELSGIRYRGWGQFSRKLLDGLKLGNGHTVIQELMLSNHNLMQILADETLKETMTELNQDKLKTDDIEDVINDAYTSPSNKKALRQVLRVVEDIKHAANGQDPSWLFIETADGTGTAGKRTQSRQKQIQTVYANAAQELIDSAVRGELEDKIADKASFTDRLVLYFMQGGRDIYTGAPLNIDQLSHYDIDHILPQSLIKDDSLDNRVLVNATINREKNNVFASTLFAGKMKATWRKWHEAGLISGRKLRNLMLRPDEIDKFAKGFVARQLVETRQIIKLTEQIAAAQYPNTKIIAVKAGLSHQLREELDFPKNRDVNHYHHAFDAFLAARIGTYLLKRYPKLAPFFTYGEFAKVDVKKFREFNFIGALTHAKKNIIAKDTGEIVWDKERDIRELDRIYNFKRMLITHEVYFETADLFKQTIYAAKDSKERGGSKQLIPKKQGYPTQVYGGYTQESGSYNALVRVAEADTTAYQVIKISAQNASKIASANLKSREKGKQLLNEIVVKQLAKRRKNWKPSANSFKIVIPRFGMGTLFQNAKYGLFMVNSDTYYRNYQELWLSRENQKLLKKLFSIKYEKTQMNHDALQVYKAIIDQVEKFFKLYDINQFRAKLSDAIERFEKLPINTDGNKIGKTETLRQILIGLQANGTRSNVKNLGIKTDLGLLQVGSGIKLDKDTQIVYQSPSGLFKRRIPLADL

SEQ ID NO: 1047 - protein, 1083 aa, unidentified
  REGION 1..1083: note = Description of Unknown: Cas Enzyme sequence
MLEHLFQRYEKIKNARYVLGLDLGVASIGWAIVDTSQQRIVKLGVVKFREGSASDNQDRRQKRGARRNRTRFLNRREKLRNLCQKYLTNGEPVLTIGSKNIWELRVKGLFEKLDNQEFAHILLHFNRHRGFKSNRKTDKGADTSAMKKTIAETRQKLEEKKQTLSQYYLDLIKDGQKIRANFTENDLCPDRAMYQEELDKIWEKQKEFEPYNQILTDELYQKIIEETIFYQRDFHQKKDKRNVGKCPFFPQNLRAPIYSMEYQEFRVRQIINNLRITDDRQEVTDEFLPEKVKNYIYDRMTFQTKSKIKASEIISLIRKNKDCYRGSLLNYDKKEAFYGNRIGYELTQIFGETQAKKLIAEYDQKGENSALHKLIHTLRSCPFSENDKAEEWLRNYALNLKNEEGKSWITPEEAEKFALLNPDSGYGNLSTKALRLILPYLRQGFIYSEACEKAGLNHTDPNDEKDRKLIEKLEPIPAQERLNATVKKALNQMISLVNTIKKDKELPEIDAVVLETVRELKMPEEKRNGLKRRNDAKARRREEYAQILKQEGVRESGRNIRKYELWLELGLQDSEALNAIDIKNFSDFTRKVSARGHEKYQLWKEANRRCPYTGEIIRLSDLFNTQLVDIEHIYPRSKTLDDSFMNKTIALRTANAQKENRLPLEYLKATGGNIEAFRTRVQHFQKGKRERFLATEIPEGFIARNYTDTAQITKVALDKLQEIFPDVIATNGSVTAVLRNAWKLQKSRDTLVHHAMDAVVISWTSRNIIQALSTISGQGGNIYNPQNERKQGWRKLPFSGFTEYVERELDKITVYHYNRKRLVQDKLDLKDKNPKKKPVVRGALHKETLYGKATVIHTDKKGKTKEVEVSTKRIKVKDDKGKPLPKSTLAKILSSDVRESVHQWLESPDSEYPKHPKTGHPIRKVRIDARLNPDKLLEIRSHNLEKGQNAHFVANDQIYIAGIYQNAKGKRKLAYFSLYESLQNHKNKYPLLPETHPENPSFHLWLPVKAGDMFRFEEQEINGIYRVLSFSENSIVFAHHTKPIAEKDFKRSVDKFEYVTPVKVDILGNVTPKITPLTSTILD

SEQ ID NO: 1048 - protein, 1620 aa, unidentified
  REGION 1..1620: note = Description of Unknown: Cas Enzyme sequence
MKKKILGLDLGTNSIGWALVEQDFDNETGKILGMGSRIIPMGADIIGDFGKGNSVSQTAERTFYRSVRRLRERNLLRRERLHRVLNVLGFLPIHYANDIDFEKHFGQFKQGKEPKLAWIKNKNNKFEFIFPELFNEMLAEFKKAQPDLFNRINLKGENVKIPYDWTIYYLRKKALEEKITKEQLAWLILNFNQKRGYYQLRGEDEEDTNDNKKEYVISLKIINVVKGEPDKKNNNKIWYSITFDNGWQHSFPFTSEPNWLNTEREFIVTEEYENGKIKILKDKKKDSVGREKRSLSILPSFEEINLLSKKEQDKIYKKIKARTELTISESKKTVGSYIYKTLLRTPNQKIRGKLIRTIERKYYRDELKAILEKQITLQPELFTADLYNACVRELYRSNKAHQIQLSKRDFVHLFLDDIIFYQRPLRSQKSSIGNCTLEFRSYKQKDDHGNEIKIKEYLKVIPKSNPYYQEFRVWQWLFNLKIYTRNDDIDVTETFLKTIEEKEKLFEFLMSKKEVNHSDILTFLLAPIIKDKYPAAKPKAFKDALIKEISKYRWNYVFDESQEKEDEKSKKYPMNETGYEIRKRLFKVENAPDDFLDIVDVKEIVDKKTTKKTTIELGTREYQLWHLIYSVNDPKEFEKALKAFAHKYQLNVTSFVEQFIKFPPFKSDFGTYSEKAIKKLLPLMRLGKYWNENKIIKDSSIYFKNIHQLIDKLQKKSDAITSNQKENWGKSINEKLYNELYRFLDADIANFQGLQLYLAQYLIYGRHSEAAETKQWSSVKDLEMFLKSFKQHSLRNPIVEQVITESLRVIKDIWTSYGNNSDNFFNEIHVELGREMKNTADDRATITKQISENENTNQRIKLLLTELRNDLTTENVREFSPSQMEILKIYEEGVLNLMKNKEYSEGEMAQKEEDEKMLKISTTAQPSKSDLTRYKLWLEQKYRSPYTGEIIPLSKLFTPDYEIEHIIPQSRYFDDSLSNKVICESVVNKNPYKDNQLGLEFIKAQGGRIVNELSSNGKIVKIFTESEYRDYVNEYYAKNNTKRNKLLMDEIPDKMIARQMNDTRYISKYISHILSNIVRDENNDDGINSKNVIPGNGRITDSLKQDWGLNNVWNQLILPRFERMNQLTNSKSFTTTNKEGHTIPTIPLEYSKGFQKKRIDHRHHAMDALVVACMTRDHVNLINNQFAKSENTRYDLQNKLRIKEKWVDNTGKARDKFTSFKKPWDNFAKDAKTELEKIIVSFKQNLRVINKATNSYEKIDNGKKVEVKQKGTNWAIRKPLHKETVSGKVELPRIKTPKGKILTATRKAINTSFDLRTIESITDLGIQEILKNYLASKNNNPEVAFSPEGIEEMNKNIAKYNNGKFHQPINKVRIFEVGSKFPLGQTGNKAKKFVEAAKGTNLFFGVYTDESGKRSYSSIPLNEVIERQKQGLNPVPEFNEEGHSLLFHLSPNDLVYVPEEGESASQVNFGENEIKNFNNLFKIVSFTGSRLSAIPVNVASTIVNKIEYTQLNKIELTKEKESMIKIYCDRLGYISLIQKGNYLNTKQGEKVSEPNSVYEKKKWTLKIFNSFEEVENDQLTYFASLTPEELLNNLKKLTKSAFGISDEQSLNNPDRKIKFR

SEQ ID NO: 1049 - protein, 1134 aa, unidentified
  REGION 1..1134: note = Description of Unknown: Cas Enzyme sequence
MSTDMKNYRIGVDVGDRSVGLAAIEFDDAGLPIKKLALVTFRHDGGLDPTKNKTPMSRKETRGIARRTMRMTRRRKQRLRDLDKVLEKLGYTVPEGPEPETYEAWTSRALLASIKLASADELNEHLVRAVRHMARHRGWANPWWSLDQLEKASQEPSETFEIILARARELFGEKVPANPTLGMLGALAANNEVLLRPRAEKKRKTGYVRGTPLMDAQVRQGDQLAELRRICEVQGIEDQYEVLRMAVFYHKPPYVPKDRVGKDPLNPDEIRASRASLEFQEFRILDSVANLRVRTGSRTKRELSESEYDTAVDFLMSYTGKEQPSWADVAEEIGVPGNRLIAPVLEDVQQKTAPFDRSSAAFEKAMKAKTEARKWWESNDDDQLRSLFIMFLADATDDTTAAAEQAGLYDLFASWPEEERETLSNIAFESGRAGYSATTLSKLSEYMHEYRVGLHEARKAVFGVDDTWRPPLDKLEEPTGQPAVDRVLTILRRFVLDCERQWGRPHAITVEHARTGLMGPTQRQKILNEQKKNRADNERIRGELRESGVDNPSRAEVRRHSIVQEQECQCLYCGTMITTTTSELDHIVSRAGGGSSRRENLAAVCRRCNGKKNRELFYRWAGPVRLQETIDRVRQLKAFKDPKKAKMFKNQIRRLKQTEADEPIDERSLASTSYAAVAVRERLEQHFNEGLAPDDKSRVVLDVYAGSVTRESRRAGDIDERILLRGERDKNRFDVRHHAIDAAVMTLLNRSVALTLEQRSQLRRAFYEQGLDKLDRDQLKPEEDWRDFIGLYPASQEKFLEWRKAATVLGDLLAEAIEDDSIAVVSPLRLRPQNGAVHKDTIAAVKKQTLGSAWSADAVKRIVDPEIYLAMKDALGKLKKLPEDSARTLELPDGRCIEADDEVLFFPENAASILTPRGVAEIGGSIHHARLYGWLTKKGELKVGMLRVYGAEFPWLMRESGSRDVLSMPIHPGSQSFRGMQDAVRKVVESGEAVEFAWITQNDELEFDPDDYIAHGGKDELRQFLEFMPECRWRVDGFYDARRLRIRPALLSREQLPSEIQARLDAKNLSTEESVLIKALDNGLFISTSGLLPLGSLKVIRRNNLGFPRWRGNGSLPTSFEVRSSALRALGAEG

SEQ ID NO: 1050 - protein, 1062 aa, unidentified
  REGION 1..1062: note = Description of Unknown: Cas Enzyme sequence
MKLGNWRLGLDLGTNSIGWSVFSLDDENEILKLEDMGVRIFSDGRDPKTKEPLAVARRTARSQRKLIYRRKLRRKQAFRLLQAQGLFPATKEGCIKLKSLNPYVLRIKALDEELEPFELGRALFNLAVRRGFKSNRKDGSREEISEKKTSDEIKTQSDMQTHLEEAIKESGCRTITEFLYKNQETNGGLRFAPGRMTYYPTRKMYEEEFILIRYVQEKYYPQVDWEEIYKAIFYQRPLKPQARGYCLYENNKERTFKAMPCSQKLRILQDISNLAYYDGVSKTKIEVNDDQDKILYELLNSKDKITFDQMRKALNLSASNSFNLEENRDFLIGNPTAVKMRSKNRFGKLWDEIPLEEQDVIVETIITAGEDEAVYAVINKYDLSQEQKDFIVKNTILQSGTTMLCKEVSEKLVKQMEAIADLKYDKAVESLGYKFSDQTIEKCDLLPYYGKILKGSTMGVDLSAPESNPEKRYGKISNPTVHVALNQTRVVVNALIKEYGKPTQIAIELSRDLKNSLEKKAEIARKQNQRAKENIKINDTIGELYKTVFPGKSFYPNRNDRLKYRLWEELGFGNKCLYCGKGISGSELFTKEIEIEHILPFSRTLLDAESNLTVAHSSCNAYKAERSPYEAFGANPKGYNWQEIVQRANLLHNISKKNKFSPTAMETFEKDSSFIARQLSDNQYIARASLHYLGCLVENSKKDIWATNGSMTKILRDKWEMDSILCRKFTEKEVASLGLKSEQIGNYKKNRFDHRHHAVDAVVIGLTDRSMVQRIATKNSHKGNRIEIPELPISRSELIEKVKNIVVSFKPDHGVEGKLSKETLLGKIKVHGKEVFVCRENINSLSEKNLDDIVDEKIKTQVKEYVAKHKDEKIDLVLTEFSKETGIKKVRCINRVQTPIEITSGAIPRYLAPEDYFAAVIWEIPGEKKTFKAQYIRRNEVEKNTNEPKKNVLDEWKRINHPAAKKICTLHKDDYLEFTDNGKLYLCRIAGYSATRNNIDIRPIQAVTNSADWIYSTNEEMITGFWKPVSGQYFVSVNTIFSQLSARPVTVSPIGRVFRKNI

SEQ ID NO: 1051 - protein, 1177 aa, unidentified
  REGION 1..1177: note = Description of Unknown: Cas Enzyme sequence
MAKKLSKRYHQQAEEIRARLKGRPYSMGLDLGVGSIGLAIAAMEESKDYGYEPTDLVFVTSRIFTPSIGASERREKRGQRNALRHRRNRLIFLWKLLAEKGLMLPYSTKSVDDPARLRFEDAMIQADPYKLRLKGLTEALTLSELGYALYHIANHRGASSIRTFLDDVKDPKEKKLDGQRSITRKIMKEHNVSTFIEVLTIFNRDAFVGYRNVDKLKGKSVPVPTRDIIITELDRLLSTQARFHPDMLNDDYIQRIKDAVLYENEKIVPEPGNCPYFPDEKKLPRCHFLNEERRLWEAINNARLDQPDESGSFRRYNRISFSDKERKELFTYLRSGKSVTAATVKTLFPHYENHEITLQGRDRKTSRIKGFRFKHLEEKPFWARFTEEQQDEFFAIWTNFADEKRVEEHLVVHLGLSNEEAADAIKTVKLIGDYGPFGKTATLLLMKYIEDGDTYTEAVMKAVEADEFQETATREVQEFLPYYGRILSKTTQALMGKYWHSSFEDRIDKPGFVKPNTDSEEEMYGRIANPVVHQTLNEMRKLVNEVIEILGSKPSEIVVELARDLKIGAKKREEISKAQQSNEKRAQDIYDTYCKEKGLSKRYIQAFRLFEDQQFICPYCLKAISAAEIAGNQTDIDHIFPIKDTSDNSYANKVLAHSSCNKEKGKRTPYAAFGHTDKWNKIMHYLDATPTMKAKRWRFEKTDDEYEEYLNSKRFMSRFAPDNSYIAKAAFEYLACLFDYSNRDSVRTTKGWATSILRKAWNLQGIDEYFGNMHWDKKDSPDSVKGKNRGDHRHHGLDAMVTLYTSLSLEKRINTLSSRGLRAEEIENRIPIPNYYRDDSLPREDQRNLFRKYVQSFFERNAFISVKTNHAINGPLVNDTIYSILGANPNGDELVFVVNKKLKDIEVKKGTVGEVESAIKGRFDEDKTWYDEELRMRVKAIRQTNEEIIDRYKSNLILAEQILANENRELEEEGNKQHEIDKRLISKKALELSGETYQLLSNNSRVKTFVVKEPTATSRGYGFDTGSSLCIDLYHNEEGKLQGEIIRKIYAMDPNYIPTYKQHGYKLFERIYGGDTLEITATSPVVDKKENAIKKVARVRVPNAMDGRTYVRVMTFTEEDSGIRLHISNIAKANGAQDANFRITTMQQYDVRKVQLSPAGLVEYVSPVLKDLKKMEG

SEQ ID NO: 1052 - protein, 1143 aa, unidentified
  REGION 1..1143: note = Description of Unknown: Cas Enzyme sequence
MFSLHSFLGIPREDPHPGSADPVINTSPFSVSYSSVLGLPFIMRQQDQGNAMSRTLGLDLGTNSIGWAIIEDGKQIVKSGVRIFPVGVKEEDFLKNGSEVSKNIGRRITRGSRRRKFRYKLRRKRLEAILKEYGMLPTGEDFFSTRELYELRVVGLDSQLTLPEFGRILLMLNKRRGFKSNRKTLSTEEAKKEEGKVKADISKLQNMMDEKQCRTVGEYFALLFRQTDSIPDWHSKDTPIEHIRRRFVGREMYIKEFEELWNKQATFYSSILTPALRTKIRDEIIYYQRNLKSQKGLVGRCRFEPNKRCTQRSSLLFQEFRIWQQLSSLRFASGQHAGKELTNEQKRAVFNFLMKQAFGQSTLVQERLQKKLKKELGLAKEDTFNDVPLIGNTTQARFIEAFGEEMFDSLTQEQRFEFWHILTYTDNSEKLKTIVRKKIEQGILPAFSEELLCNYSEINLEQGYCSFSSKALKKILPFLREGMIPYDAFIKAGYNPTRKAGKQGTEEITKIPPLAPNELRNPIVQQMLSETFRVVNAIVKEYGKPDMIRVEMARELKKPKTKREEARNKSIQKRKQREEHAVFLSAYLGHTIEPNDPEVRKYELWLEMGCEDTSMDDLDSFLRHGRVSDIKKYRLWLECNRISVYSGQPISLTRLFNSDVEIEHILPYSKTMNNEFTNLCLCEREINLEKGKRLPCDYFASKGEKELQKFKDRVSRLNNEAKQRRFLAKEIPDDFLNSQIVNTSYAARELHARLEILLPPVPDGEQQHLRVQVVNGQATATLRRLWGLNSILSKGDIDTKNRGDHRHHAIDAIVIACTTPSLLHTLATYSKFSELNKLTNDHIEQPWNGFLTNSGNSINSIIVSYRNQKRLVGKKPNKIKVKNLEKYPNGYFKQSAVTIRGSLHEETYYGLVNRDDEQVYVTRWSLQKFTKEDQLDKVLDDKVREVLKERVKRFGGDLKKAFSENPDDPVYMYSLNGSKIPIKKVRIVNPSENLVEVRPNVFVESGNNYCIAIYGDMETGKFDFETVPFWYAVQKTLIKETLVPPFKNGKPFLFTLTQRDIVVRYKNHPDEIEWNNIEYLRDNIFRVRKFDVVGQIFLDYLYASKIDKTNDRNKLFYQVSPNSLNCVKVEIDIIGNITKKEGI

SEQ ID NO: 1053 - protein, 1444 aa, unidentified
  REGION 1..1444: note = Description of Unknown: Cas Enzyme sequence
MGEILGIDLGTNSIGWSIRNTTLEKNQIEKFGVLTFNKGVGLGKSGEYSYAAERTKKRSTRRLYQSRKYRLWSTLEVLITMGYCPLSIENLNKWRHYDKAEARKNNNAGRVYPVLDIAFESWIKLDFNGDGNPDYTSPFQLRKELAEEILDFEKIENRHKLGRALYHIAQRRGFKSSRKGNDDSKEKESENEDVVDLQFSEKKKNKLIQDYFEKFPEAKTIGWLFAILENKKIRIRESVAQYAIRENYKDEIKFIFEHQKSAKSSELFTKLVETGKNKNDGTIFYKRPLRSQKGLIGKCTLEQNKYRAPVSHPNFETFRAWSFLNNIKFKPLEKQDAIWMPIPLDLKQKIYQEKFFRKSKVYFPFSEIEELIKKEGYYWVLNYKSKTTVTGNPVSARLKEIFGDNFLNIKFQKEKKDKNGNEFYTIEDIWHILFSFEDLEYVSDFAIENLKLNEIKTKQFITAWNAIPVGYAMLSLNAINKINKFLIKGLIYTEAVLLANIPQMIGSEIWQENEELLIKEIGNLITSNRNQKQLINIINSLISKHKNLEAHSKFGINDNSYKIDSSDVKDINTTCEEVFGSKTWSNKTETERENVLESIKSCYQAYFQTKNFEIKIINDEKHFVVKANNQFFYKTETGYYRSPKIKDTLSEFLEIHFNLDEEKLCKIYHPSEISIYPHGKEDENGKLKLGSPKTGSFKNPMAMRTLHELRKLINYLIETNKIDSETRIVVEVARELNDSNKRWAIENWQKRREEENSEFAKVIDELINTENGIKADSTNADDIDKIRLWYEQNEKDVEVLPPVTDDKKEVKGVSWQNTKKESYKEIASKKELVEKYRLWLEQKCTCMYTGEIIKLTDLFNDNIIEFEHTIPRSISFDNSLANLTVCFGNYNRGIKKNQIPYNLNNYEVASGGYSAIKPRLKNWEEKVERIKQQIDFWKTKSKKASDKKWKDDAIRQRHLWQMELDYWKNKLDRFTMKEVTDGFKNSQKVDTQLISKYAFHYLKTCFDRVDVQKGSITAEFRKIYGLQVSDQKKDRSKHSHHAKDAAVLTLIPISIKRDNILKEYYEHREKKQTFTIEPYKGFSREFIWNIDDSILINNISNNQSLTPAKKIVRKRGKIQYLQGTDKPKIATGDCIRGQLHDETFFGAIRPAQKDENGKFMRDEKGNLIQEKNSKFVLRVPFQYKNKADAPGFKTIEEIEKVIVDKHLFEQIKKQVEQAGSLKDAFEQGIFMYNAKGEKENKIRRIRIIKSVTEPLKIKKQTYLSKHEYKQHYYAGNATNLAYGLYKTESENNKTIFKIINLFDAAKINVLSRNKSIELEKEITIKKEKYTLHAILHPEQKVIFYKSNKAELKELEKKDLMNRLYVIEGFEKDGRIRFKYHLNSMSDNDLKQLETQYGKAIFQGFSSLNLSSPWPKLKLSMGNLTMLIENKDFKIQMDGTIEWLF

SEQ ID NO: 1054 - protein, 1053 aa, unidentified
  REGION 1..1053: note = Description of Unknown: Cas Enzyme sequence
MKNNTQILGLDIGTNSIGWAVFKDQNQLTAMGTIEFPRSIMDKTPTPKNVARRTARLGRRRTARLNSRRKKVLKMLINNGLLPEALRVNKNPEGIYNEIGDPYALATKGLREELTSDELGRVLMHSAQRRGFLSNKNTVLGDLINDDRFVNEIRAINDEKNMVLNDPSQRKTGDDQQTESTYLKEISELDNAITNSQYDTLREFLHHADGCKRNRAHSPDFLRTDRAMWNHDLKRILSFQQQYHPVLTTEFCQSIEDVIFFQRPVTWDRNTISNCPFVPKKKVAALGRLESQNIRYLQDINYLKYTDNNTGKTVDLSPDDRAKLVNFFDINKKVTFSQIRKLLGLDKTVKFNLEVESKTLKGNHTNATILEAYPGYRKLDNSTKLQIVDDLLTISSKKSLLNRLITAYDLTYREAVLLTILELESGYAAYSVAVIKKILPFLNDGMPIHQARDRAGYASPKQSSKDVVDRLKAIPKTNNPIVDKGLSEVRKIVNALITQYGPFGIIRIEMARDFNINTKRGQKALQAQLDNKKSNEDAKKHYDDNNGQQGLLPSASTKDIIKYKLWKQQDEMCVYSGQLISVGQLYLPTTEVDHIIPKSRNYDDSFNNKALCFTKENRDKGNKTPYEKWGDDTDRWPEIVLNVNKMKSLSNFKKQRILSDVFTAAGISSSALNDTRYICKVALDHLKTLGATVTTVKGFATAICRANWKLNDIISTDNTKNREDPRHHAIDAAIIAMINPADHAKITNLVADVERKNGFMDTKTLYSNCFPVPYSTFTDDVERLTNDMVPARRVLASLNGQLHEETGLSIKPLLDEEGNPKLSRDGRNQYFSTVRKTLDKTINVGKIADKCVRALVEDQIAKHGNDYKSAFSDPTFTIKKVKCIVCEKITADELKNKYISLNDGTKYCKLGNLHHTVLYIQNGKFRFQPTYLITARQRHQAVIDVVNVDSSNGDVIMVLYTNSIVSILNTENVREYYYVTGMFGNGKISLQLVTSRCNCASKLKEAKKTKSSKIIEHVKDGCKNHNLKGYSAKQLMERGLKLHKITTLGKIIG

SEQ ID NO: 1055 - protein, 1124 aa, unidentified
  REGION 1..1124: note = Description of Unknown: Cas Enzyme sequence
MKNFSFDVGMTSLGVAVNDGGEIVFGDVLLMHPEAGAVKAQSERRRLFRTRESHKAREAALESLWRSTGRAPLQRKRFEKTKDANGKKRFVKTAADERLEREFPRQGDDTVYASSLLRVMLLEGKPLADWQIYKALHAAIQRRGYDSNVPWKTRADAREKSGKDENPEEQVGRFDKALRNMTSDARYHLPAYYDAWKMGLWDAQTKQVAHIRQPQRSKEKGEDRARGYNPSRELVTSEICRLLEQATAQIPQLKEQLTEDKRNHLLYGKPHNTGDLRYPSFSKVDGILGQKYPRFENRIVSNCALIPRLNVCKSEKPLAIEVGFLLRLVNWRYEKEDAGGGRSVHSLNGQQLSEAFSKCEAAWEKKSREYAPAEYAKCFKMTPSKIAKMADELGGSVKEGHAEIPASEHTGRSRFSQPALYLMKSLILSDKTPKGFGAELSQLVDAMEKENPGAKFGHRVFPDVPYKYFREDFEFLDKMGDSRDAIYVPDMSLAERYGGKDGDVDSAVRKIINTCNWPELRHRLGVFDRELEILTAKYGKPDAVHLEFVREDFLSKKRKNEYTARADAGKKARQTAMDELKQRNMAVTEKNILRYRLFEEQNKQCVYTGDPIDIGAPESYDIDHIFPREDGGPDAYYNKVLTSRETNQQKGKRLPCECDFINRSWSAFGTLVKGLPLGKSKKKLLLASTRDEAEDLVDKYTGLSGTAHIARLARDIACLRYGWQPGATGEHQRVFVFSGGLTSKVAKKYGLYKVLGDGSMKYQKDRTDHRHHALDAMVISYLHQWTRDKNKTEFFRFPKGIDADYFRLALSKVYPHYITRVKPAIAEQPKSRSDVNKKEFKNISKDPQERGQWYTNKPERGKGTSQHGYIFYQDDKGKVRAKTVHAFRSPYAAMKEVEKKSAEIIGLLYPGKSVFLPGETQVTGTKLGRVARLKFGAYQIVKLQKDTVIESVESREKQPADDNSASARYRIKRGELKKIKICNELLQRKPFDLNEFSVHKDLILTGNYRLDDSARALANCEIVNTDTGEVETVKFSKLVQHLDKVGWGDALDENDVVAIDHIHKGYINEVTNDWKPRQNIPEGRYLIKGFRNSGNSMELVAQDGTVYRLQSNQLDRFAIDRSEN

SEQ ID NO: 1056 - protein, 1053 aa, unidentified
  REGION 1..1053: note = Description of Unknown: Cas Enzyme sequence
VIRLEAGMDKAKGADIGELGFDPATFATALMTLEEFRSKDRVIWAGLDIGVASTGLCLVDVRNHEIVLMASHLFKSPVVDKKKATAAPESLASVRRGARSVRRNIMREGRRKKAIRAALADFDLIPADADGEWFSARRDERTVVRLRSKALGYLLNSRELARVLYSFASHRGYIDHGKSDKEDDAGKVKKALAANHAALADGGCKTFGQYLAGQPRSRNRAGDYSYTADIGMTVDEVRTIFARQRELGSEIASKALEERYIAELTWLTDTSKRDRSTYLKVGFCTYLGAPYRRGATSTISFEMVRAHQTLCNTVILHADGTSSTIPGDIRIEIVRDLFAVKKSVKPLKWSGLRRRLGLSEGDSFKGRPVEEEKRDCIALPAWAVLCAGLYEGHRDLLERLHDHIDDADAVCSALTFASSAASLTGRLAPLALSDDEDEAIIDLPYSARLFSGYANASLEALQMLRGTFEDPRVTSLRQAEEDSGLAQARAILAEERDGSADGLLCAFSDYDPTCRNPVVLRATAQMRRMVNSVIRHYGLPDVIRVEVARDLKRSKHEREIVAESNRARLELNEQAKRDIIEFLGLPDDHHVRGRDLALVKLYREQGGKDPYTGTGIDFRRMLEEHGYAEIDHILPVSRTCDDSQANKVLCLTKSNRDKSNRSPYEWMTSGEASAPDWGEFCGRMERWAKMCEPRRYARKKLANLTCENLTERAGNFIDRNLNDTRYMSVALAKWLRECLPFAKDGHEHVFCVAGGATALMRSVWNIGITGPDGKKNREDDRHHAVDAAVIACCTPGIVRNVALVNEGHARADVRQRLFSDSLPYPEFKEQVDAWIPCIVPTLTLPNAVTGSVLKDTVYPYLGRDEAGKDLYLTVKRDKDGRIVERKVNKATTMWKDGQGGCRKYDEMCALDAVFDASVGKRGRWSFDPVYCIDIPHREAVRRTMRVFSKEKAIDLWGTVEVPDEAPRMTIRRGDVLVCDGKAARFHCFDISVNAIRLFSQRGGKQLQATGPLSAEAFPPPSKWGEGVRIMQEDCLGLCWLSFLAQRAADVQME

SEQ ID NO: 1057 - protein, 1183 aa, unidentified
  REGION 1..1183: note = Description of Unknown: Cas Enzyme sequence
MKKRILSLDLGITSFAYSIIEEERKHRYRMVDYGVMMRKPPYIITDKGVLKSPQAERRKDTAQARLLEQKRWRIDRTAMIFDELGILPKDACLEYNTRSLENNKWLLRAEAIDTPLTTEVLFGILAHIAKHRGYRSLSTSDLIDELKDELGIKKDTTTKKTKKKSSSKSKTPEEKEKEKESKKIAEKIKLLNALHEEYGSQIISQTICRAVSEGKFSSYRNHHVLDKMIHRDHIAKEAEAIIRAQAGFGLISANTAEKLCDLFVSEIIEQDMPTNDMDIFGRCTYYPDEISAPKYSYLGDFFRLYKHLADLKISGYEIQDEDKKKIEDYVFSKINNGKSLPNLKYKDIRKALELSDEQMIFGKEDDEIVKDKKVARIFVSFFFISKIDKFPALFKSVKEHEASTDIFIQLAEITQAEKTPKPAYTRLRKLFDDYGISVTDDEIISLIEERESGSVSLSHRFIKEALPYIKEGNNDLDEVAEMIGDTSPVRYDTMPKSLRHLHLGKNNLYEQYIKPKINNHPVKSLASWSLRGIADLSRKYGIFDEIVIETTRDVLSEKRKKEIEMGMNSNKKEIDNIIETYKKEFPSINREQARKMKLLIAQGFKDIYTGDTITPRMLIKDAEADWEHIVPRALGGVSADYNLVIAKKKSNSEKGCRLPMDWLNHDRDFVKRVEYLYAEKKINGRKKRNLLAESMDDIFVEARDTTALHATSYLEKLVADNLKMFYPFKDEDARKHGHQVRMITGKATSRTRQLLGIPSKSRKTNFHHVEDAIILATLSRGWQNELHQTLKSNYGKSEQEMLRIFRSKTPYIDGLHIADYIKEAFEKFMSLNGGEEGSGIWYKDMNGRIRTVSHLISNKPLNSSLYKDTAYSYKKEYPSSRKVLFGSSAIKPVIEKMKIISNTLKGKWKTKKVNGEVCGSFESFMKDFEKDILSRTLLFKKGDTKNSAYIALYKRGEDIARTIEAYYETKEASSDNKESKEIDNTLKDSLKKLLETPITTKDGVTVRSLSFFFEGFSPIKRRRGDSIFLSRKDDNIIGMFAEVIDGKLVIHRVDPLSINGLRKNSNGILIPSYSLVYLFKKDVEPIQKGMLNTFIESSGGGKKIALFNPRYPNSKINQPSCFLEKSGSSDRLKRIGANGILGLIVVSLNMDGTVKSYRKIGKISKEQEAFFKKESGYGGMENS

SEQ ID NO: 1058 - protein, 1188 aa, unidentified
  REGION 1..1188: note = Description of Unknown: Cas Enzyme sequence
MGGQMITLGLDIGSNSVGSAWVDTRRRLIGLGVGVFPAGVEQSERKRGRPVNQTRREKRQQRHSLARRAERKRRLRRVLTQAGLLPSDLHALDALMDLNPWHLRRKALSAPLTPHEFGRVLVHLNQRRGALGITLDPKDKEEGPVKQAMDRLCARMKEANAPTFGQFIADLMDKRKAESPSKPGIHIQQPVRNRQYRLSPEDHLYADRQLIREEFSILWNRQKSFNGPLADLLGDELKTRLDDPSGDETWRHHGIIFGQRRTYWDTGTLGRCDLEPTDERCPLADIYAQEYRVVETVNNIRIEERGKAPRPLRPPERDNLIAVLRSQKTASAKTVRRALGLDKKALRDFFALNIERDKEREINTDWFYREIVHGAFTEPAWRALSPAQRDSVNRAILNFDPDNPQHRDRLRAGATAWWGLSPDAAETLLHAWETRPRPEKRVNLSRRAIRNLLPYMNQPVGDRWLTQIEARLCLAEDAEAIDQTTGRLMSYEQRQRYSLNASRLTRRERLFLRKHPDLLPPAPMLSNPVVRKAIHEVRRQILAYLRKYGRPPDRIIIELAKAAKQTEKVRNKILANIRKREKEKKEIIAEFGLSAKPLNQQRAAVERVTLCRQQKGICPYTNLTPGAPGKVISEDQAAQGRDVEIDHIVPLSRSQDNFLSNKVLCCREANRGKGNRTPKEWLTPEQFTLLEQRMAHWEKEFPRKWENLHRDPLPEQDFLNSQLAATAYAAEQVGAYLSDALYGGERDGLRRVFFTKGTYTAMLRKDWQLFQSLKDADEDSPAKSASDLQQGGDPGKKNRGDHRHHAIDAAVTALTGPEIIQDVARLAAQREEYHERTGYWPKREPLPPPWGDVQTFRAQVMERVAALVVSHRPVKRRISGALHEETAYGPVLESGGEISQTNFSNRIPADQLTPNHLRMPPRSESIEKQLASNDLSHAERRAAWRKLRALTDQKPGKSGIVRDLPLRLEIRRCLRQHRLDPDHFSEAQMKDLVTKGNLRMRSGMPIKSAVLLRTINDPVLIPRKVWDPSSNRMVPDHDPRTRRVYIGGNNHHIEIREDKRGRWHGEIVTTFEAARRVRCLKRPDAVDRSDRHGMRFGISLAEGETLHMKHPKTGAPGYFVVFKLDKPQTIHFIHHWDARPSKATEDQEPREDIPVTASNLRALEPQPGRPPYKVRVDPHGSITPLKND

SEQ ID NO: 1059 - protein, 1369 aa, unidentified
  REGION 1..1369: note = Description of Unknown: Cas Enzyme sequence
MKLLGLDIGTNSVGSAWVDTEAKSITMGVSVFPAGVEESEDKRGAPKNQARRGKRSLRRSIHRRAQRKRRLRELLTDVGLLPREQDKLQAVLGWDPWELRRKGLSQELTPHEFGRVLVHLNQRRGALGIETREGDERKVKGAIDRVRLELLDRYASLDDKKRLLDLRQSKNDDEQARFAPESANWLEQSSDVTFGRMMADLHDSRRVCILDEEGNPKRNKNGECRCYQREPIRNRRDSFEFHADRALIRDEFAKLWKNQCSFDGDLSRLLTDTLKKQFDDPERELYAAKAQGAWRHGGTLFGQRATYWDTGALGRCVLEPTDRCVPIADMHAQYFRVVETVNNIRICGDRQAERPLTEDERDKVIKLLRGPLFKKSKGSEEAKQSASVTDIREVLRIRPRDKFVWLNIEKDEEREINTDWFHREVVHKAIGLKHWTGLNDKTHERINRAILKYDSEKAESIARLRQEAAQWWGLSSDRIDALLSALKERPQLEKRLNLSRRAILNLLPYMEVFDPINNRWPTQQEARRGFAETLPEGHVRQRYTTGALGATASNRYYMRQDKHQIRCANGTTLPPLPPAPMMSNPVVRKAIHEVRRHIMAYLQMFGGKPDRVVIEFARSAKQSAKVRDQTLARNRYREKERKKILVGDDEEAGVVKTAFGDDFANLSLNQQRAAVDRVILARQQQWKCPYCGKSGLDATDVALGQGVEIDHIVPYSRCGDNGLNNKIVCHVECNRQKRKRTPTEWWDEEFAERARTAKKLFDDVEKGQMYYFTKRDYARKWHNFTREVRDNEWRNSQGSDTAYASAQVAAYLADALFDGKGLPERGGERKIFVTIGKYTSMLRRDWQLFETLKKPTLDGEVCISREEEEELEQKDRGDHRQHAIDAVVIALTTPLIISAVAQRAAMEENIFAEHGHWPGQKTRREACRQCQEYRNRSGRFPGEYEPIVPPKPWDEVKEFRRLVLSQVGPSQSDDGLTVAHRPVKRRIVGAFHEDTLFGTIKDSETLFTGRIPCYSPPDTWLKPAHLRVMKRESERQSIERLTARYMDDGCDKKTARIKAKDAVKQPGFVPQLVDPSPGKTGLVRDPTLRQQIRQCLRANNIDPDNYEKSDMKRIVQDGLLRMYSQPEWKKNSQSENPEKPSGVPIKSVVLLRTHTDPIILPRRKWDPVNKRMVREEHSRSFRVYVGGNNHHIEITESEDGSWDGDIITNHKAAQRNAERLAKLREAGVPSIEKLRKMNKIDRRRYASTIREINRSYPMVDRADREGRRFIMSLAEGETICMKHPQTGKQGYFVVYKLDKPHVIHLKYHWDARPDGGQKDNDGKVIPGSKREGFAVSAGDLKTKCSLGEGEPPYKVRVDPLGNPRKVPKD

SEQ ID NO: 1060 - protein, 1127 aa, unidentified
  REGION 1..1127: note = Description of Unknown: Cas Enzyme sequence
MKKILALDLGITSLGYALLQELDKNSYRLLDYGVSMRDAPFDDKGNSFQSFRSGFKSSRDLIKKKRKRKNHIASIFERYSLSDREKLIESELQNSFKDKWRLRARDVFERRLSIFELFGILNHLAGHRGYKSISTEDLLWELELELGIEDSRDIKPKAADEKSQVKAALLSLEGLMKENPNKTVSTVLYDAVKSGYYNSFRNHDNYEKMLKREHISDEIEKIINSQYKLGFFEKEIDLEKFIKEIDKAVTNQPDPETDETLFSDCRFFKDEKVSSQFSYLYDLYKLYSRARDIKIDKHSITPDQFESIVEYVLDRVQSGKNVSELKYKDVRKILNLKDSEKLFGKEDRIPLKNGKFKENTITKFTFFAEAKKFSELIKIISSKDDEHQIYKAIFDTLQFERSPKRAFEKLKTILDEYQIDIDKRMILELIKSKKGKSTNISHKFIIEALPYLEDFKSESEIKEILGVKTEENYSDYKKGMKFLSIVDKRKNLIQYEIDEGVINNHPVKSTVAWIMRFVKHISSEYGLVDEFVLETTRNSLPREIKDAIEKAQKQSQKEIEDIIEHYKSEGFEGITKKVAKKIKYWREQKELDIYTGEHIGFDEILSNQVDLEHIVPQSLGGLTTHYNLVLTKRDTNIQKNNLLPMDFLNHDKNYNNRVENLYKEGLINWKKRKNLLAKDLSETFEEVRDSKGLRATSYIEKLTGEILKRYYPFVDEKSQKHGQNVRYIQGKVTSKIRNFWDIKVKSRDTNFHHAEDAIILALASRGWVQRVNTIIHQNYKKSDEYLKKMIYKEFPTIEGVLPKDIIEEAFERYMGFGEDSIFYEDLFGNIRSVYYWVSKKPLGTSIHKDTIYSKKLEHRNIYTNKKSIHEAFKDLKIKQNTKPSDFKDSFQKKIYDKLLLSRINPNDETLQAITKRADEFVELLEEFGSKKDKDSQELATKKIDELLKKEIVTSNGKSIRRVKFYVEGMSGFDVRGGIAEKDKNFIALKIDKTDDGKLEFSRVDFENKNRVLKDMKNSLVCYKNDILFLFTKKELKNYGKLVKFMEKGSGAKLAGFSNPRYPVSISKQPERFVSGKSYKDNAIKTSVGIIKLSLDITGKIKSFQKFGKIDDILLNEFLKSIRWDGKH

SEQ ID NO: 1061 - protein, 1117 aa, unidentified
  REGION 1..1117: note = Description of Unknown: Cas Enzyme sequence
MSKKILSLDLGITSIGYSILNELENNKYTLIDYGVSMFDKATDKDGNSKKLLHSESESSKKLHKLRKDRKRNLAELFQKYNLGNKNELLNQEKENINSNKWELRAKKAFEEKLTISELFSILYLISKHRGYKSLESTDLLEELCIKLNIDLDETKKDKKNDEKGKIKLALNTIENLKEKSDKTVAQLIYEIEIKKHNPTFRNHDNYNYMIRREYINEEIEKIISSQKSFSFFMDEFNIDSFITDIIKTIDDQKESTNDLSLFANCEYYPNEKVAHQYSFLSDIFKMYQSVSNITFNIKPQIKINKEQIKLISNDFFKKIEKGKNINDIKYKDIRNILELPENIKIFNKEDYYLSNGKKQENTIIKFHFLSNLSKIGNKFILDILKKENMYEIFKEIFDVLEFEKSPKLIYEKLKEYIDDDKTIINLIKYKSGNSLNISAKAMIDFIPFFENGLNMDEIKKELNLNRHEDYSDYKKGIKYLHISQFEKDDSLKINNHPVKYAVSAIIRIIKHLHITYGGFDEIKVESTRELSQNEQTRKDIEKANRALEKEINTILENKEYQRISENYGKDLQKYARKILLWESQERFDIYTGKSIGFEDIFTNTVDLDHIVPQSLGGLSVNHNFVLTHRDTNLRKSNQLPLNYIKDKQSYINRVEYLFSVHKINWKKKLNLLAESLDDIYKDTFESKNLRATSYIEALTAQILKRYYPFENKIKQKDGSSVRHIQGRATSNIRKVLKVKTKVRNTNIHHAIDAILIGITDHSWLQKLSNTFRENMGIIDDIARENIKKQIPLIDGIYPKELIEIIEDKYNEYGENSIFYKDIFNKTKAVNFWVSKKPMVSKIHKDTIYSKKENNIFTNRVNIINEFINLKTTINTNSKKFEESFEKNILKKMYLYKTNPSDVICKVVQKRADDIKELLNSFIYLDLKDKELVSESKIKLDELIHKELIDNNGNIIRKVKFFQSNLTGFDVRGGLATKEKTFIGFEVDITDVNLVYKRIDASNIHKVKKENHNSFKVYKNDLVFFIYPDRSFKGGKIVSFLEDKKVGAFSNPRFPANIGFQPHSFLTIFNGKANSHKQVSLNKAIGIIKLNLDILGNIKSYSKIGIIESEFLDFLKNK

SEQ ID NO: 1062 - protein, 1139 aa, unidentified
  REGION 1..1139: note = Description of Unknown: Cas Enzyme sequence
MKKILSLDLGITSIGYSILNELDNDKYSLIDYGVNMFDTPYDKDGKSKKVIHSQNTSTTKLYKLRKQRKKNLAKLFEEFNFGKKEEFLLQEKKNLFINKWEIRAKKSFEEKLTFQELFSILYLLAKHRGYKSLDTDDLLEELCEKLGLNQEAKKEKAVDEKGKIKQALKTIETFKSQFPQKTIPQIIYDVESQKENPTFRNHDNYNYMIRREYINEEIKVIILSQEKFGLFDKNFDTKLFINKIIETIDDQKESSNDLSLFGNCEYFKDEKVAHQYSILSDIYKMYQSVSNITFNVKPTIKISKEQIKLIADDFFDKLKSGKSISDIKYKDIRKVLKLSNDIRIFNKEDNYITKDKKQENTITKFHFVNSLSKYNKDFIKNILNKSNKYEILKAIFDVLIYEKQPKPIYDKLNEIFKNYDLISDENIKNNTILELIKNKTGKSLSLSHNAMINIIPYFEDGLTIDEIKQKLNLNREEDYLSFKKGIKYLSISQFEKDNNLVINNHPVKYVVSAVIRLIKHLHVTYGAFDEIRVESTRELSLNDESKKNIDKSNRENEAKITAILENIEYQKIAQNYGKNLQRYARKILMWEEQERFDIYNGKSIGFTDIFSNSVDIDHIVPQSLGGLSVKHNLVLVHRDTNLQKLNQLPLNFISNKEEFINRVEHLFKEHKISWKKRKNLLATNLEEIYKDTFESKSLRATSYIEALTAQILKRYYPFVNQSKNSIEVRHIQGRATSNIRKLLKVRTKVRDTNIHHAIDAILIGLTNQSWLQKLSNTFRENMGIIDDAARQNIKKSIPLIEGIEPKELITIIEDNYNIYGEDSIFYKDIFNKTKAINFWVSKKPMVSKIHKDTIYGKKPNDFYTVKENILNQFISLKITNITQSDKFYEDFKKNILEKMYVYKTNPNDVICKIIQDRAYEIKELLISFEIIDKKNKEALSEAKQKIDTLIHKPLLDNNDKPIRKVKFYQTNLTGFNIRGGLATKEKTFIGFKAILENDKLAYERIDVSNYQKLKAQKDNNFKAFKNDIVFFVFADNTHKGGKLVSFLEDNKIGAFQNPKFPSLLKYQPESFCIIGKDKENKPKKSASKQHKLGKAIGIIKLNLDILGNINSFQTIGNVQSELYNFLKELKNGMESNTSN

SEQ ID NO: 1063 - protein, 1209 aa, unidentified
  REGION 1..1209: note = Description of Unknown: Cas Enzyme sequence
MSGITLGLDIGTNSVGSAWIDTQLKFIQLGTSVFPAGIEESDQKRGAPKNQARRDFRQRRRNVDRKADRKRHLRQFLMSKGWLPTERIELQRWTELNPWILRKDGLERELSPSEFGRILLHMIQRRGAFGFIDEQDFCDTEQDNDTQAEKKDNPNDKEQRIKGAIDQTKREMRKLGIETFGHFIAVRYEERKHKINKGSARETEIRFPVRNRTTAAGEGTYEYCADRDMIWEEFDKLWKKQKLFQSILSDQLTSEVRKELDDPSSDATWRYKGLLFGQRKTYWDMGTLGRCSLEPTDMRCPKADMYAQEFLVLETVNNIRIIPLNEPARRLNSDERALVLKALRSQKTASEGTIRKALKIHTAEKKKFYSLSLEQDAQRDLNTDWFYREIILGAIGETAWEEFPSEKKESINKAILKHDPKEEKDRVRFAQGCRTWWDLDDEQTQRLIIAWQKRPNIDKRVNFSRKAILNLLPYLREGWTVNESRKLFTEDADNHANDEQRRRYGFKESITNRAMRRYIQKHPDLLPPAPQKISNPVVRKAIHEVRRHINEYIRKFGKKPDRIVIELAREARQSAKVCNQILAKNRRQEKIKKDIIETYGSYIREHYNKKYGVDNLTQSQQENAIRRILLCREQKGICPYSDTARDITEKMAAIGEGLEIDHIIPRSRGGNSTLNNLVLCFDGTNRGKGSKTLQEWLTKEDFAKLEQRMSHLKKENPAKWENLHKEVKDIQGFVNSQLTDTAYASRQVANWLKDVLYDGERDGVRRVFTTKGIYTSIIRKDWQLFLNGSDEPKFQKDRSDHRHHALDALAVAFCGPEMIQKVAHVAQERELAKSEGEYLGKRDPFDPPWGNHDSFRQQVMTEVDKLVVAHRPESRKIVGRLHKDRQYGPVIGEKNERCEVCSKKIFVGELSLNHLRVPADWEKLKQKMDVAPTKAFAKAIRSEMLRLPDVLPKKSGIIRDRWFREEIREYLIGIGYPVIEYMKDIEESKGSEKDKKKKRYEKQLFELIKTKGICLNTVPVRRVTLLVSPTVIEIPRKRWNETTANMEYYPEDQKNKTLRLYEPQNNHHIEIREDDKGKWVGNVVTNFEAAKRVRPPKSSGLAPQSAVNQDDTEHGKFVMSLSIGEMVYMKHPETGKPDYYSVFKVDSTNTVHFTPHCDAGRSKATEICTARKDIAPSLSDFSKMGVGSDMRPQKVWVSPLGEVKFLVRD

SEQ ID NO: 1064 - protein, 1110 aa, unidentified
  REGION 1..1110: note = Description of Unknown: Cas Enzyme sequence
MRQSRIVLGLDIGVSSIGWGLVQLEEEPYPYERDDGTVEQKQRIVNGRIIGTGVRCFQVPQDREKKSLAKKRGIARRNRWRVRRRAQRLKRLVELGKEFGLIGEDFRHEKYLKPGKGDGEGNWDIWTIRKEGLERKLSDVELFRVLYHIAKHRGFYFHTKAEELQEEDAKSKQGQVKRGLASVEKKLRGGGWETVGQMFYATLKQAEGKRKRNRKDSYENLMHRRLLEKEIVTVFERQRKFLNGKAGEELQKRYIEEILLSEKGPDEAKLQKMMGVCDFTGKRCAPKAGYTAERFMLFNRLNSMSVGNGERCGGGERLTDQQRRTIEELAYNNEKVTFWQVRNALGLDSKLDARFNLCSYREHDPEYRKKLECAVKGGKLEFDEKHRVPVVNIRTGEVHELDGEIREVFESKKLWPNAKKIHVFYSDIRKQLSLSEDVRFLKLSGYTKSAEELGSEAKYVKQFENAIFVELRGYHKLRKAIEGQCGQAAWQELRQDTDRLDAIAEALTYCKSDVTRRAYLKERGIQDEKVIEAILRVNMSQVANHSQEAMRRLLQHMENGALFNEAKEECGYGRVEYDKQRLLQPYSGVFENNPVVARVISQARKVVNAIVRKYGEEYPIDQIHVEVATDLASSKKRREEIAWGQQRYREEKERAKERCREFGIDPDEGQNLLKFRLAEEQNCRCVYSGARITLYPGGGKDEVYVLDCEIDHIIPMSRSFNDSLNNKVVCTPQANQNKRDRIPYEWFEERYGKDSEQWSAFERTVKQLYGMPYPKRRNLLRRSWTEEDKERFISRDLNDTRYAARHLAEYMRKYFDFSRSKRSDIKEVKRIQVRSGGVTAFLRHMWGLNKDREANHLHHAVDALVVACATDGHVYLVSNLSKEVERKGENWYRAFGRDKFKPWGLVREDIMEAVGRIFVSRMPRRTVTSAAHEESIKSMKKERPKKRVVEVGGGYAEIGDIVRADVFVDEKGHNYMVPIYAVDMACSKPLPDKYLHKNDAPYAEWPSAKDDGLTFRFSLYKDELVSLDGKMYYVAYVRGRRAVIAVKNVDGSPFPNGRTEVEMAYRRAKLAKYCVDVLGSLREVHERRRVGNQFEESKRGRKGQKNEGLG

SEQ ID NO: 1065 - protein, 988 aa, unidentified
  REGION 1..988: note = Description of Unknown: Cas Enzyme sequence
MAPYTLGLDIGSNSIGWALLSNNAGRGIINLGVRVFPEGVDRDTGGLEKSKNATRREARSARRTHQRRNLRKQQLLNVLEKAGLLPENESELRSLFHISPYQLRKKSLDEKLEPYEFGRVLYHIGQRRGFKSNRKTGKAKEDGIVTKEAGKLQADIDASNCRTIGEYFAGLNPEEQRIRGKYTFRSMYEKEYDLLWAKQAEFYPDVLTEQLRKKIRDEIIFFQRPLKPADDLIGKCGLEPDEKRCPRGDWYARQFRLLQDVNNLEIRNPNGIEAKLTDQQRRIVLGELAEKKEVTFDSLRKKLELMETQRFNLEQDGKVKNLKGDAFVAAMRSRNIFGPKCWDAMEEVEKIKLNEWLVELEDDQLSEKLRSKYGLSDEQIGHILKIALPRGYASFSRKAIMKLLPFMEAGAITSEAIEKAGYRPDEGDAGEALERLLQPPDLRNPIVQKALFEVRKVVNTIVREHGNPAKVKIEMARNVHGSMRQREELHWKIRENEKRNEDARKRLREDIRIANPTRDDVIKYKLWIECDKVCPYTGRSISQEALFGANPEFQVEHILPYDRSLDDSFMNKTLCEVHENIHVKRNQTPYEAYGHDAKRFEQILERVNKSQMPYHPKRKKFWQKEINLDEGIKRELNDTRYICRETVKYLKQLGVYVRGTRGKITAELRHQWGLDGIFTELGVRRDDDHRRHAVDAVVVAVTENEHLRRLARSKYSVTGVVFEQPWPDFRQEVKEKVKHINVSHRVQRKVSGKLHEETNYGATDKEGLYVFRKKLEDLTLPMVEKIVDPVVRRIVEGRLTERGIDLAGSGKPPKEVWKELLYMKTTRSNKQVPIKKVRVYNVAEKVIAMKDRSGRPYRYVEPGSNHHIEIFEFTDAKGRTKRDGLVITMFDAVQRSQKDEPVVKRDYGDGKKFICSLAINEMVMMEQDGGVNELYRVQKINQNTQIFFQPHIYGGDLKNHPPISKMPNQLRGYKVTVDPLGRIWPAND

SEQ ID NO: 1066 - protein, 1087 aa, unidentified
  REGION 1..1087: note = Description of Unknown: Cas Enzyme sequence
MAKDYVLKESSGPGSGTDDHVWAFDLGKGSIGEAVRQGTKFLHKASLLIPADFAETKTAATRRRMWRTRQAHKAREKWLREVMQKSGIEVLHGRNYDKNGIWKSGEPADERLEREFAENGDSICYTSCLLRIKLLRGEKLEPWQIYKAFHSAIQRRGYDPNIPWKTRESRAKTKDGDEDEAGTQKRMEEFEQKLTEITKGKPEFHYPCYFDAYEMGLWDGDSQFKDRIDCQAKSTRNQIVPRSLVEKEVRNMVDAAAKQYPKLKGRADYLLYGPTGKAYASFDPKLRKQYELKEGGKNDWQGVLGQKIPRFDNRIIGKCVLIPRLNVCKIRKDDNGELHSKSRIAAETVFLMKLKNMRFQYGDGVRGLTAKEISQIFNDPKRNKLGLTPTQWRKWCEKLGGVPMAGQHEEVTEPSFSGRSRFCRPALEILKRLILSGDTPIVAYEKELQNLGGNTAPLKGLVKDDLKFLQQMGATWEGIYIPNQKLEALARTATDPHETIQNLIGSQNDPIVRHRLTLFAGRLDYLAKQFGTPNFIVLEFVREDFMGKKAKLEYFKFQRERANERAKAREEAAKAGAEERAAGLKMELLKAQVGECLYTGTALIPEKLDEYVIDHIVPRAKGGPDSAVNYVLTTRRANDDKGDQTPFEWLSKAGGWAAYVERVKKRALTLRNKKVQLLTSPDAETLVQKYTALAETAWISKLAQTIIGLRFGWPNGISNGERKVIIVSGGLTGRVRRKYKLNSLLNPDAKSEEEAETKNRNDDRHHALDAMVISFLPNWARDSRFTGFFKFPDGVHRELFGKEIIDVIPQFSTFEKAMLAETIYGREKIDSGLIVQRVELKKLALKPISPAKVKFDLEYARKQIQCVRDDWLKEKLNEFIAAEPDESRWNEFCASFQLTGKNGKTGSKVIKIRVNFGKANEFADLSKDRTGAWKKAKQGHKGQIIYIDEAGKPKIRPVYVFESQYRVSEEIRKCGGKIYGFFRSGCLVSIEKPIAHNTTPLKPGIYRLNTIETVGRAKVTNAQGEKSLPIAIEKFIEANLKPLQALEAVGAVSIEKQKANLARKKIEEELDALSNLQKAKEQANDPS

SEQ ID NO: 1067 - protein, 1163 aa, unidentified
  REGION 1..1163: note = Description of Unknown: Cas Enzyme sequence
MASYTLGLDIGSNSVGSAAVAVAEKKIVLGDGVFPAGVEEREDKRGAPKNQARRGQRTVRRMTKRRAERKHQMRGFLLKRAWMPNDSDEEKKWLADNNPWLLRRDGLKRELKPEEFGRVLLHMAQRRGAYGFDVDEEQEDAGKIKDAINETRKAMEKCQARTFGELMASKYEERRREAGQKGKKIGTPIRNRTKASGEGTYEFCADRRMIREEFDKLWKKQESFGGELAKQLSDECRQELDNPKGDATWRYKGTLFGQRKTYWDVGTMARCDLEPTDMKCPKVDMYAQEFLALETVNNIRITPRGELKRALTKEERDKVIAALEKQKTATEATIRRALGIDKGQKKSEYTLSVEKDPKRGLNTSWFKREIVGAIGKKEWAEFDAKKRESINAAILKFDPQEEKDVQRLMDGCGKWWGFDSGQAARFIKAWKGRPKIDDRVNYSRKAIKNLLPYMREGFTPNEARNLFAEDATNGASDAQRQRYSFGARAGNRRLRQYIEKHPDTLPPAPEDISNPVVRKAIHEVRRHIQGYIRKFGCKPDRVVVELAREARQSAIVRNKQLARNRAREKERKEIIEKFGLAGETRTQQQKAIRRVLLCREQKFRCAYSGETISEKQAAEGTGLEIDHIIPESRGGNSFLSNLVLCFDGTNRGKGNKTPMEWLTKEDFALLEQRLKHLEKENKVKWDNLRTEVPDLDGFVASQLTDAAYASRQVVGWLEKTLYGERNDGKRHVFTTKGRYTAILRRDWGLFPDKKEGRQEDEKNRADHRHHAIDAVAIALSGPERLSQLARAAEAVEVGSEPRRKAIAPSWGDFDSFRADVMKEYDKIIVAHRPESRKITGALHKDNPYGPVVDKNGNLTGEFTIRKFAADLTPKHLRVPKGWDQLQAQLEKCSSRSDKRRIRAQMLALRDVSGGISGLVRDRWFREELRSALRREGLDPDHFTSNEMKDLLKRKELLLESKVPVRRVTLVRRPTVTPPIIRRRWNAVTGRMEKEKDPRANRYYEPQNNHHIEIRENKKGKWVGEVITNFEAAKRVRVKRPKPKPKGWSPPPAVNREDTKKGKFVMSLSIGEMVYMKHPGTGEPDYFVVFKIDGTGPIHFTPHWDAGRARETEKCPAREDIKLPGKKTGGLSATQLQDLGVEEGKGPEKVWVGPLGDVKVLHRD

SEQ ID NO: 1068 - protein, 997 aa, unidentified
  REGION 1..997: note = Description of Unknown: Cas Enzyme sequence
MYTLGLDIGSNSIGWAILNPEKQEVINAGVRIFQEGVDRDTKGAEVSKNAARRAARSARRTRRRRNYRKDKLFRLLVRNGLLPQDPRQIQSLFQKDPYYLRAKGLDEQLEPYEIGRVLYHLSQRRGFWSNRKSEKKKEEGVVAKEAAQLQKQMTETGARTLGEFFARLNPHEQRIRGHYTFRSMYEDEFEKIWSTQSQFYQTILTDVLKHQVKDQTIFYQRPLKPSDELIGNCELEPNEKRCPKADWHARRFRILQVLNNLEIHNPNGTEQKLTEDQRKIVFQELLTSKEVKFDTLRRKLNLLETQTFNLEEGPKNQKKDSLKGDEFNAHLRKVLGRRQFERLTEEDQIDINTLLLDDTLQDEEVVEKLMERYGFTQEQAQEILEVPLPQKYMSFSRLAIQKLLPFLEQGMLTHQAIEAVYGSPQAPRSHQTLDRLPFPEDLRNPIVNRALWEVRKVVNALIRVYGKPAKIKLEMARELKGSKREREEIQFRQRQNEQENETARQELVRMGILSPSRDDIIKYKLWQECGQVCPYTGRPISQEALFGPHPEFQVEHILPYSRTLDDSYMNKTLCAVDENRRKGDQTPYEFYNGTEQFEQILQRVAKLPYPKRRRFWQQQVELDNFIQRQLNDTRYISRKAVEYLKTLGCTVQGTRGQVTAELRHQWGLNSILDDSYLGEEKKRDDLRHHAIDAAVVAVTENRHLRDLAASKYTPAGRAAARFAPPWEGFRNQLQKIVNQINVSHRVTRKVSGPLHEETSYGPTGLKDDKGQDIYVYRKPLESLTLAMVPKIVDPVVRQIVTARLEQFGLQPAGEGKISKEVWKEPLRMKTKDGRPGPLIKSVRIRDVFNNLIPIKDKDGKPYRYVAPGSNHHIEIFEYTDAKGKTRREGRVISMFEAVQRSRRKEPVVCRDYGDGGKFVCSLSKNESFMLKMDDGNFVLHRVQKIIQDGRIVLRPALFGGKVSDSDSPPLIQRRNYSTLDGYKVSVDPIGRIFPAKD

SEQ ID NO: 1069 - protein, 995 aa, unidentified
  REGION 1..995: note = Description of Unknown: Cas Enzyme sequence
MSDYTLGIDLGPNSIGWALVDEKAGCLLNAGVRVFPEGVDRDQQGGELSKNETRRTARGTRRQIARRARRKKRLLKQLVEAGLFPADPREQEDLLRADPYPLRRRALTECLSPHEFGRVLVHLNHRRGFLSNRKSDRAKKKETMGMLKEISDLANSIENGGHRTLGEYMAVFQEGSRQSSAKGLPERIRGKHTRRDMYEKEFALLWERQQEHHRDLLTEDLRLRIHDTIFHQRPLHPVAKLVGRCELEPGERRCPRADRQAQRFRLFQEVNNLRLLDMTTGEERPLEERERRTLREYLATGKEKSFDDIRKKLGFFESCKFNFEDAKRTKIQGMQTDAILTSKNLFGKHWHDFPEPRKNEIVETLLEEQDPKVLIEKAIREWGVTPEVAEKLADVDLPSGYMNFSRKAIEKLLPHLERGLPLMAGDDSPSAMIEAGYLRPDQRQRKPLGLLPCPPRDIPNPIVKQALHEVRGLFNAIIREYGKPARIQIELAREVKGSLRSRQEILNTNRERERERKEAAQKIEEERHKPTREAVERYRLWEEQTHICIYSGKTISLAQLFGGEVDVDHILPYPRSLDNSYANKVVCFRSANAEKKDQTPYEWLSESDPDRYDEVLQRAHKLPYNKRRKFSRKDVELDNFIARQLVDTAYISRKVAEYVRCLGTDVVCTKGQMTAELRHFWGLDSILNPAWEGYEKCRDDHRHHAVDAIVIALTDRSRLQQLAAVRRYTRDPLQRMMPPPWDNFRDDVEKAVNAINVSHRVRRKVSGQLHEETIYGATAREGEFVYRKPVASLTLNMIEDIRDPAIRGIIIRRLEKYGLAPGKNARIPADVWKEPLTMPSGVPIKKVRLLKKDKTVMPIRSGDAKAYVKPGSNHHVCLFEMPDGKRDAVFTTMLEAARRARNGELIIQREHPASPDAKFIMSLSANEMVLIENAGKQELYRYETASTTTQQMKFRHHTFSGKSKDERGIIRKVPSTLYARKVTLDRLGRIRWAND

SEQ ID NO: 1070 - protein, 991 aa, unidentified
  REGION 1..991: note = Description of Unknown: Cas Enzyme sequence
MGGYTLGLDIGSKSVGWALVDKGRKASIIGMGVRVFPEGVDRDTKGLEKSKSAACREARGARRMHQRRNLRREQLLRTLLAEGLLPAGGSELRSIFNRSPYELRRRGLDERLEPYEFGRVLYHLSQRRGFKSNRKSADLKEDGKVKKEAGELRGQTEAAGCRTIGEYFAGLDPEQQRIRGRYTFRSMYEKEFDLLWGKQREFYPEVLTDDLRKRIRDEIIFFQRPLKPTDEFIGQCELEPEEKRCPRGDWYARRFRILQDVNNLKVLDPDGSEDKVGGQERQLILDELSKKKELKFDDIRKKLGLVETQSFNLEQDGKVKALKGDAFAYAMRSRNVFGAKVWDGMDEQKKLELNDAVVELEDDDLVEEVKREYGFNDEQVEAVLKISLPRGYMSFSRKAILKLLPFMEEGCITSEAIAKTGYSRDEGAKGAVMERLPLPSDLRNPIVQKALFEVRKVVNAIVREYGKPVGIIIEMARDVHGSRRQREELHWKILENQKRNDEVRKRLKEDMGIANPTREDVIKYKLWEECGRICPYTGKPIPQEALFGPNPEFQVEHILPYDRSLDDSFMNKTLCEGHENIHVKRGQTPFEAYGHEGPKYEQIQQRIKVLPWAKRQKFLQKEIDVEKHISRELNDTRYICRETVRYLKQLGVHVRGSRGRITNELRHQWGLDGIFDELGTRRDDDHRRHAVDAVVVGVTDNEHLRRLAQSKYSGTGERFDPPWANFREEVRERVRHIDVSHRVQRKVSGQLHEETSYGSTDKKDEKGQELFVYRKKLEDLTLPMVDKIVDPVVREIVKGRLAEKGVDVDGRDRKIPKEVWKEPLYMKNTRSSRRVRIKKVRVADVFSNMIPMSDKAGQPYRYVAPGSNHHIEIFEFTDEKGRVRRDGKVVTMFEAVRRSQRGEPVVGREHGAGRKFICSLGINEMFMVELDKGLTELHRVQKISGNKQIFLRHHTFGGDLQKEKGISRYPNSLKGHKVTVDPLGRVLPAND

SEQ ID NO: 1071 - protein, 1063 aa, unidentified
  REGION 1..1063: note = Description of Unknown: Cas Enzyme sequence
MGNYTLGLDIGSNSIGWTLVDIGEEPRLVDLGVRVFPEEGKGASVSKGGKTVRVSQRGKRGIDRRARNCRARRLQRRKELIRIMTLAGLLPQDSSKREAILKDASVDEKDRPLWAYKLRAEGLERMLTLFEFGRAIMHLAKRRGYQTNRKGGDPTEDKSVGQEAQELLLEIDQSDSGTLGRYLYRAATGEIKDVSGFVEGRIRNRRTFREMYKDEFDRLWEHQREYYRSVLIDELKGEIWNAIFYQRPPRYREPGPCDLDGQPRCLRACWTARQFVLWQKVNNFRIEAPYREPQTLSDVQRAILHGLLSTNAKVKFANLRKELELADGSTFNFEEGGKKKTTSGDEFLCDIRKQVGASVWDAMGEEKQKRLVDLLAQEDDETLITQVLTGDDYQLDAQKAKSLLKVYVPEGRSSLSEDALCKILPQVKDGKRTDEAIRLVYGTGAGAAGAVCDRLARVEAIENHVVMKAMCELREVVNALLNIYGKPKRIKVEMARDLNKSREEKDRISREIKKNTQRNDEVKERLRDLEREYGLRIPPKAASIVKYRLWTETNQTCIYCGRRIHPTKLFGDHSDCEVEHILPRKRSLQPYDYNNKTLCHVACNQLKDNCTPFEAYKDRPEEYRRLLKRVFASDMPKAKKLRFVRETLDLDDSVERNINDTRYVTRRALSYLQTLGADVFGTRGMATDLMRKESSFETLLEPMAIGKKHEDNRNHAVDAVVVALTTPDLLRDIARGYDRTGEFNLARSWAGMRKQLEERLPEVKVSYRPRYRISDYLHKEMAFGLTPEARQAFSEGRMEQLSKHAWISREKLPYIISKDVTDLIKTVGDVQANLPAEAGNIKEAILAEAARKGVDVHDANATIPWDEIDSDHDDELDSAPRKRAKLYLKSKDGRRIPVWKIRVREPHSNMLIVTNQEGEPYKGYVLENNHHIEVAEFTDPQGTRERRGTIVTQLEAARRWADRKPVVRTDYTAEGGQFLYSLARNEMFMVQFEDGTELLHRVEKISGSTIVLRPHTYGGVCKGSDQPPLVLRRGPNTLRGHKVLVDCIGRVRPVPSLAGSDTL

SEQ ID NO: 1072 - protein, 1352 aa, unidentified
  REGION 1..1352: note = Description of Unknown: Cas Enzyme sequence
MRLFGLDIGTNSVGSAWVDTDARTITMGVTVFPAGVEQSEGKRGAPKNQARRSKRSLRRSIHRRALRKRRLRELLVQVGLLPEDGGQLQEVLAWDPWNLRRKGLSEELTPHEFGRVLVHLNQHRGALGIRSETDKEGEVRTAISRLQLQMMQRYDPQTAERLQVGKRLDELNNKGQGGKRKKKDAKGEDEWRSEFGAWIEKNPATYGRMMADIREDDEHHVHLLNAKGEPKRRRNGQQKYYQAKPIRNRQDSFLFHADRAIIRDEFKKLWEKQLSFGGKLARLLMDYEQLRKWFDDPQCELYAEEAKRSWRHGGALFGQRKTYWRDPARCELEPTDRCVPEADMYAQEFRVLDYVNNLRVVERELSRPLRPDGERATVLDLLRKPRPSNGKGKRKAKDDVTVADLTKALGLAKPNIPRDYYRLTLSREDEQDEEAKPVIDWFNRSIACAVFGEEEWLRMDDRKKDSVNRAILKFDPDDESDERRMREGAAGAWGWNLSPGQAEQFIVGWKSRPALEKRRKLSRTAIRNLLAVMRNPHPDGCGQYPNQIQAKKILAEDFANALTVEQRARYIPKVTEEFKHALINRYGKDEATKAIRQRGLNKKARHYLKKHVGNLLPPAPEVSNPVVRKAIHEVRRHILAHLQAQQTEDGRIVPPERVVIELAREGRQSAKVRDAIHARNKARRKIREGIVKQHRLERLTRNQQERAIERVLLCRQQNYVCPYTSLSADDRRKQAKPEDGTCPYSGKTITEEQAVRGDDVEIDHVVPYSKCGDDSINNKVLCYREANQRKGNWTPKDWMGEDSAEFKAMEQRMRHLNIVGKKTGGPSKEDYFTKKDYKRKWDNLHRDPEPDEFRNSQLSDAAYAAGQVGDYLRSALFNGESEGEQRVFFTNGKLTARLRDDWMLYQEIREKISKDDPQAKEKDERNWQRRLKDRGDHRHHPIDAVVIALTPYYVNEIAQEENYRETYHQRTGNRPRRKRMDVPSPWPSLADFRRSVLSKVFASFDDWGQEAEGRKGVGTDLIVSHRPEKRRLVGGLHNDMAHGTTEEPGEYVRRKRIKDLLPKKPTDSAGWVKDIRSRKDPTIRKMIEQRLEKEGIEVVEKKGETGRPAIKFMDKATGKPPTIEKIRKALSNLRMRSGVPIHAIRIRTAIGNPVHPVGNDGVERFYESDNNHHVEILRDPKTGKWSADPPVRMYDAAVRNIDRLRALKKAGVPTARQMRKLKEDKDNPERYRAMRERYRPIIAEINRTYPIVNRNDRDGKEFVMSLAIGEMVHMRHKRTRELGYFVVFKLDKGKIWFTRDRDARPAKGKGTEKRDGFSLSASQLKDYGIDKSKPPYKVRVSPLGDFKELTRD

SEQ ID NO: 1073 - protein, 1195 aa, unidentified
  REGION 1..1195: note = Description of Unknown: Cas Enzyme sequence
MAGYTLGLDIGSNSVGSAAVDIENRVIRMGVSVFPAGVEEREDKRGAPKNQDRRSKRQQRRSIERRAKLKRRLRQYLLEKGWMPKEKDELRKWESSPIFNPWLLREKALHEELNQYEFSRILLHLAQRRGAWWFDEEPEETEKSKKPKKDPAEIPGTVEYTKRIMSQKVAETFGELMAIEYRNRITKTANNRIRNERVRNKNNAFGEKESEFVADRHMILAEFSKTWEAQKAFGGHLAKQLTDEVKKEIYNPQKTDTWRCQGVLFSQRKTYWDTGTLGRCDLEPTDEKCPKAGMYAQEFLVLTSVNNIRITPPMRESRKLDDNERKKVVDVIRKQITASEATIRKALGIDKGANKTLYTLNTDGDKFAVNGDWFYSQIACGVFGEDKWLLFDDKKKGSVNNATLKFDPNEEINECKIREGCKKWWGLDDEKTESFIAAWKKRQKTSERVNLSRKAIKNLLPYLREGWTVTEARDMYAEDASSDADDLTRRRYSTKEVVVNKKIRQFLEKHPDLLPPVSDEISNPVVRKSIHEVRRHLLEHIRQFGVPDRVVIELAREARQTKKVIDRRIMKNKAIDSLKKEIIEIHNLNAPEITKTQKEAAIKRIRLCRQQREMCAYSGTTITDKMAADGDGLEIDHIVPRSKGGDNSMSNIVLCYSISNQGKGHRTPIDWLSEEQFGKVEKIFKHLHREKGEKGKGAITKDNVDMVDEAKWKNLHRRTPKEGFTEEQLRSAAYAAKQTADWINKVLYGDENRGKRYVFASNGDYTGILRRDWGLFFDEDGQRSEKGRKNRGDHRHHTVDAAIIAMTPQCLPKIKQSFIDFEEQKENKRIKPEWKTIEQPWEGFGEQIAEEYKKLKISHRAYNKQIAGYLHKNTIYGPAVIYERYKKDDGKKGIKKGDVKIGKDGKPVLKEGMYIKSIPAIGIKQNHLRMPIGWDELKNDYSNATEQERKAIRGKMFSLEDVPPGRSGVIRDIELRDKIRDWIKDHEFSNMVKAKEFLKENGLIINGTPVRKVRLLWKLNEVVEIARKGFDYKNSSPERIRKSLRVYQTQNNHHIEIREKTGKKGNVKWSGEVITNFKAAKRARIDKTAIVDKNENKNGKFVMSLSKGEIVHMKLPEKKGADYYVVFKIDPSKTVHFTPHTDANPASSKKKGVKLREDIALVPNDLRQNIIFNENNVPEKVKISPLGEVRVLVND

SEQ ID NO: 1074 - protein, 1086 aa, unidentified
  REGION 1..1086: note = Description of Unknown: Cas Enzyme sequence
  MOD_RES 844..847: note = Any amino acid
MRTWLLKNEWMPTEPRAYKEWIQLNPWKLRAEGLERQLSTFEFGRVVLHMTQRRGAYGFDVEEEDEDAGKIKEAVDHTRSEMRLCRARTFAELMVKKSAERTREVGQKGKHIHLPTRNRTSAAREPQYEFCADRELIREEFLALWSKQESYDSELANQLDGKRRQELDNTVGDDTWRCKGILFGQRNTYWNMGVLGRCDLEPTDLKCPRPDMYAQEYLVLETVNNIKIIPPRETKRPLNESERHDVIDILRRQKTATPATVRRALGIHKGVNKTLYALSLDADPKRALNTDWFYREIVCNAIGESEWQRMSPDQQKSINGAILKLDPKQEADRDRFEGGCHSWWNLDDTQAKHLLEAWKLRPNTNVRVELSRRAILNLLPYMKNEGVTVNEARNRFAKDASNKATPEQRERYSFGQKRPRGAIRRFHEKHPHLLPPAPEKLSNPVVRKAIHEVRRHVQAYLREFGRPDRVIIELAREAKLPAKVRNEQLAANRAREKKRNAIVEQFGLGGLTRTQQTKAVKRVLLCQEQIEKCAYCGNGNSTISDKAAAEGIEVELDHIIPESRGGNSGLNNLVLCHTRCNRGKTNKTPREWLTEEAFGKLEQRLKHLKKANPAKWDNLHKDVSDIEGFTESQLTHAAYASKQVAGWLREALYGGEISGKRCVFTTKGRYTPWLRRDWGLYSSGGSKNRGDHREHALDAVVVTLSGPERLQRLARAVEAVELSKSGSEAAPRREPLPSPWNDVETFRAQVMDEFARLVVAHRPAQRKITGSFHNDTMYGPVLDADGHLTRYATIRKFVIELTQNHLHVPKAWDQLRKELDNAPSAAARRAIRGRMLAIEDVKPXXXXSGIVRDRWFREELRQYLRENGLDPDHFSEKQLKELVGNSGVVLKSGVPVRRVTLLRAPSVVAIPRKRWDDSAKAMVYEENRRTMRLYEPQNNHHIEIREDKKGKWIGEVVINYDAAQRVRVKQPKPKPRGWTPPPAVNRNDTNGGRFVMSLSTGEMVRMRHPTTRTLSYFVVFKIDSTRKIHFASHWDAGRSKKTDQAPAREDIGLPVAQLQKLGESPESPPRKVWVGPLGDWKALRCD

SEQ ID NO: 1075 - protein, 991 aa, unidentified
  REGION 1..991: note = Description of Unknown: Cas Enzyme sequence
MSDYTLGLDIGSRSIGWALVQVNATSDIINMGVRVFPEGVDRDTKGLEKSKNATRREARGARRTHQRRTDRKRRLVKSLRNVGLLPQGEDELRALLQTDPYELRKKGLDERLDPHAFGRVLYHLSQRRGFKSNRKSGKIKEDGVVKKQAGELQRQIDAAGCRTVGEYLATLDPEQQRIRGRYTFRAMYEKEFDVLWAKQAEFHPPLWDDDLRRRIRDEIMFFQRPLKPADHLIGDCDLEAGHKRCPRGDWYALQFRILQDANNLIIRNRDGNQRKLNPEERQALRAVLGQKAELGFSEIRRMFALMETQRFNLEQDGKVTKLKGNPFTAGMRSKKVFGPKRWDAMSEEEKTTLNGYVLELEDDALSAKLRSAYGFDDAQVEAVLRIALPQGYMRFSREAIRKLMPPMEAGKLTSEAVKEVYGDAPRVEAQCVDRLGLPPDIRNPIVQKALYEVRKVVNAIVREYGKPRRIKIEMARDVQGSQQQREELHWKMLENQRRNEDVRRRLREDIGITDSTRDDVIKYKLWQECPVCPYTGRSISQEALFGPHPEFQIEHILPYDRSLDDSYMNKTLCEVHENIHVKRDQTPYEAYSHDSQKYETLLQRVNESKMPYPKRRKFWQQEMELDKQISRELNDTRYICTEVIGYLKQLGCAVQGTRGKITAELRHQWGLDAIFTELGVRRDDDHRRHAVDALVVAVTENEQLRRLAVSKYATDGTQFAPPWDGLRDLAKRKVEQINVSHRTSRRVSGRLHKETNYGPTGLKNEDGHDIYVDRKKLEDVTIPMVAKIVDPVVREIVRQRLVENGIDLDAADRRIPKDVWKVPLYMRSTKSTKRVQIKKVRIRDVKNNMIFLKDKAGRPYCAVEPGSNHHIEVFEYTDDLRRGTRDAQVVSTYEAIRRSRTDEPVVQRNHGPQTRFVCSLAINDMVLMKDRGGHEQLYRVQKMSAAKQIYFRHHTAARIDGEESLIRRQATLFAGRKVTVDPLGRILQAND

SEQ ID NO: 1076 - protein, 996 aa, unidentified
  REGION 1..996: note = Description of Unknown: Cas Enzyme sequence
MGNYTLGLDIGSRSIGWAIVEIGENPTIMDMGVRVFPEGVDRDTQGLEKSKNATRREARGARRTHQRRTDRKRRLVRALRDIGLLPQGRDELMSLFQTNPYELRKKGLDERLDPQAFGRILYHLSQRRGFKSNRKGGKAKEDGVVKKGASALQATMDAKGCRTIGEYFASLDPEQQRIRERYTFRSMYLREFDLLWDKQAEYHPGVLTERLRATIRNETIFFQRPLKPTEHLIGKCALEPDQNRCPRGDWYALRFRLLQDVNNLVIQNPDGTEQKLSADQRRVLLDELGQKDKLTFDKIRAKLGLLETQTFNAEYRTGPKGKKMEAMKGDAFAAAMRSRNAFGPKAWDGLDEQHKIAINEMFVELEDDDLAHGLKTEYGLTDGQVEAAMKLSLPQGYMSFSRKAIVKLLPFMEAGALTNEAIEEAGYRRQDADQTNAVAELPLPADLRNPIVQKALYELRKVVNALVREYGKPARIKIEMARDVQGSSRQREELHWKMRENEQRNDEVRRRLREDIGIADPTRDDVIKYKLWEECGKTCPYTGRQISQEALFGSNPEFQVEHILPYDRSLDDSYMNKTLCEVHENIHVKRNQVPFEAYGNDPERYEQIKQRIKVLPWPKRQRFLQQEINLDTHISRELNDTRYICRETVGFLKQLGVNVRGTRGKITSELRHQWGLDGIFTELGVRRDDDHRRHAVDALVVAVTHNDHLRRLAVSKYAVTGARFETPWATFRDEAKEKVRAINVSHRVCRKVSGALHEETNYGPTGVKDKGGQDVYVYRKKLEELTIPMVDAIVDDVVRGIVQDRLREKGIDASTANRKIPKDVWKEPLYMRRTKSDKKVQIKRVRIRDVMNNAIPLRDKTGRPYRAVKPGSNHHIEIFEYVDKKGKTRRDGRVVTTFEAVQRSLRGEPVIRRDYRDGRRFVCSAAINETFMLQIDAGPEQLFRVQKISANQQVFFRHHSFDGDLQASKSISKYPNTLIGRKVSTDPLGRIWPAAD

SEQ ID NO: 1077 - protein, 996 aa, unidentified
  REGION 1..996: note = Description of Unknown: Cas Enzyme sequence
MSGYTLGLDIGSKSIGWALIDTDGKPRVIDMGVRVFPEGVDRDTKGLEKSKNATRREARGARRTHQRRTQRKHRLVRVLRGAGLLPEGHAELKSLLAANPYPYRKKGLDERLELWQFGRVLYHLSQRRGFKSNRKGGDSKEDGVVKKQAGELQKKIDASGCRTIGEYLAGLNPDEQCIRGQYTFRSMYLREFDLLWAKQAEHHPDILTDEFSRKVRDEIIFFQRPLKPTDDLIGPCELEPDQKRCPRADWYARRFRLLQDVNNLIIQNPDGTEQKLSSDQRKALLIELRQREKLPFDKIRQKLALLETQKFNAEYRIGPSGKRVEAMKGDSFAAAMRGKSIFGADRWDVMGEQQKIRLNRMFIELEDDDLARSLATEYGLNDAQVQSAMKVSLPQGYMSFSQEAIEKLLPFMESGALTHEAIEQAGYHAREADGAEAVTHLPLPPELRNPIVQRALFEVRKVVNALVHTYDKPPRIKVEMARDVQGSRRQREEVHWRMLENEKRNEEVRKRLREDIGISNPTRDDLIKYKLWEECGRTCPYTGRQISQEALFGPNPECQIEHILPYDRSLDDSFMNLTLCEVHENIHVKRNQTPFEAYHEDAEKYEQIKQNTKVLPWAKRQRFLQEQINLDTQIARELNDTRYICRETVAYLKQLGIHVRGTRGKVTAELRHQWGLDSIFTELGVRRDEDHRRHAVDALVVAVTDTEHLRGLAASKYAVVGARFETPWATFRDEAREKVKQINVSHRVCRKVSGALHEETNYGATGLKDENGQDFYVYRKRLEDLTTAMVDKIVDPVVRDIVRQRLLQKGIDPAAANRKVPKEVWKERLYMRRTKSSRQVEIKSVRIWDVKTNAISFRDDAGHAYRAVDSGNNHHIEIFEYVDDKGKTRRDGRVVTLFEAVQRSLRGDPVVQKGSSDGRRFVCSAAINEMFLLQFDDGHEELFRVQKISSNQQIFLRQHTFGGDIQKCKAISKYPNTLKGRKVSVDPIGRIWPAND

SEQ ID NO: 1078 - protein, 995 aa, unidentified
  REGION 1..995: note = Description of Unknown: Cas Enzyme sequence
MNSSTLGLDIGSNSIGWALLQGGKKPSIVDAGVRVFPEGVDRDNKGLEKSKNATRREARGSRKTRYRRNLRRDQLVKTLKSTGLLPEENIELRKLFRKSPYKLRARGLDNKLELYEFGRALFHINQRRGFKSNRKTTKPKEEGQIDKEANELQARIEKEGYRTLGEYFEKVDPEKNRIRSNYTFRSMYEKEFGLLWSKQAEFYPKVLTDDLRKKIRDEIIFLQRPLKPTDELIGECDLEDGEKRCPRGDWYARRFRILQDVNNLKICNPDGPVETLKKEQRKDLLEELSKKKEMKFSAIRKKLGLLETQVFNAEYEVNEKGKKNEKLSGDSFNSAMRNKKIFGPKVWDVMDQEEKIKLNNWLVELEDDKLKEKLKTEYDLNEEQVENISKISLPQRYMSFSRKAIQNLLPWMEEGKRTDEALDAVYPYRNKDIDIEEVDKLSLPEDLRNPIVNRALFEVRKVVNAIVREYGKPEKIKIEMARDVRGSARERRELHFKMLENEKRNEEVRKRLREMGISEPKRDDVIKYKLWEECGHICPYTGKNISQVALFGENPEFQIEHILPYDGSLDDSFMNKTICQVHENIHIKRNQTPYEAYSHNPEKFEELKQRVNRTSMPYWKKRKFWQEKINTDEIISRELNDTRYICREVVKYLKQICKDVSGTRGKITSELAYQWGFIKDRDDHRHHAIDAAVVAVTENKHLRQLGESKYSKEGLKFAPPWPHFREELAEKVKHINISHRVSRKVSGALHEETAYGPTGKLDEKGQDIFVYRKRLEDLTWPMVTKIIEPVVRQIVIERLKENNINPDKDKKISKEVWNEPLYMKNTKSKKKVPIKKVRIQDVFNNMILLKDKSGKPYRAVAPGNNHHIEIFEYKDKKRQTKRDGKVVTMFEAVQRSQRDEPVLCRDYKDGKTFVCSLAQNELFMLKLDNDSAELHRIQKITQSGTNITITLRPHTYAGKISDYDKPPLVQRRSPNTLKGQKVTVDMLGRVHLAND

SEQ ID NO: 1079 - protein, 1198 aa, unidentified
  REGION 1..1198: note = Description of Unknown: Cas Enzyme sequence
MKLLGLDIGSNSVGSAWIDTETKTIKMGVSVFPAGVEEQTEKRGAPKNQARRSQRQQRRSIARRAKLKRRLRQYLIKKNWIPTENEKLQEWENLNPWLLRRDGVRKELKSDDKFSANEKLGRILLHLAQRRGAWWFDEEPEEGEKSKKKKKDPKEIKGTVEYTKAIMKQKGAKTFGELIAIEYEKRKTITANDKKRNKRVRNRNNAFGEKISEFVADRHMIIAEFKKIWETQKSFEGELANQLTETAKKELYNKEKTDTWRCQGILFSQRKAYWNLGTLGRCDLEPTDRKCPKADKYAQEFLVLTSINNIRITPPGETSRKLTNEERDKVVKAVRKQKTASEKTIRKALGINKGANKTLYTLNTEGDKFAINGDWFYSQIVCNVFGEDAWLAIESNTKESVNKAIMKFDPNDEDDEKKIKKGCKEWWKLDDKQTENFITAWKKRPKKDSRVNLSRKAIKNILPFLRDGWSVTEARNMYAADASNGADDLTRKRYSTKEVTVDKQVRHFQQKHTNLLPPVSDGISNPVVRKSIHEVRKHLMEYIKQNGRPDRVTIELAREARQTAKVIAERRKKDKAIEELKKEIIDTHKLDAPVITSTQRERAVKRVRLCRQQREMCAYSGETITDKTAADGIGLEVDHIVPRSKGGDNGMSNLVLCYSTANQGKRDRTPIDWLNKEDFRQLELRFKHLKGDKKDKSAVTKDNVDMTDNIKWENLHRKTPKEGFTEEQLRSAAYAATQTTDWINKVLYGREDRSKRYVFASRGDYTGILRRDWGLYFDKDGKRSEKGRKNRGDHRHHAVDAAIIAMTTQCLPKIKDSFIDFEKQKENKNIEPKWKTVEQPWDGFSEQIAEEYKNLKVSHRAYNRQIVGYLHKDTLYGPALIYERYKKDDEKKGIKKGDIKKDKDGNPILKEGLYIKSIPAIGIKPNHLRMPDGWDKLKAEYIKASTKTQKKAIRRKMLALEDVPPAKSGVIRDIDLRDKIRDWLKDHKFEDMKEAKEYIKENGLIVNGTPVRKVRILWKLKEVKETPRKSFNFETGKIVKDNNRKSLRVYQTQNNHHIEIREKINTKGDVKWTGEVITNFDAAKRVRTDNKPIVDKNENKNGKFVMSLARGEIVYMKDPEGNRMNYFVVFKIDSSKTIHLTPHTDANPASSKKKNIKLRRDIALVPDDLRKNIIFDENDVPLKVKISTLGEVKVLVND

SEQ ID NO: 1080 - protein, 1168 aa, unidentified
  REGION 1..1168: note = Description of Unknown: Cas Enzyme sequence
MSSYRLGLDIGSNSVGSAAVDKEKHLIRMGVSVFPAGVEESETKRGAPKNQARRVFRSQRRITRRRAARRHQMRSFLLGKGWIPDDSESEKKWLERYNPWLLRREGLKRELKPDEFGRVLLHMAQRRGAYGFGVDGEDNDTGKIKDAISNTRRAMKECGAETFGELMAIEFERRRVQVGRKGKSIGRRVRNRRNAAGEDVYEFCVDRELLWEEFDKLWNKQRSLKGELAKQLTDKCRKELDDSEGDEAWRYKGILFGQRKTYWDVGTMARCDLEPTDMKCPKADMYAQEFRVLETVNNIRVTPRGELKRALKPEEREKVIAVLEKQKTATEGTIRKALGIDRGQKKGEYTLSLERDRERGLNTNWFKREIISAMGKEEWEGMSEKEQESINRAILKFDPQEKEEREKLRKGCGNWWGFSEEQANRFIDAWSTRAKIDDRASYSRKAIKNLLPYMREGLTVNEARNAFAEDAENEASDAQRERYCFGARAGNKRIRQYVEKHPNLLPPAPEDVSNPVVRKAIHEVRRHVQAYIRELGCKPERVVVELAREARQSALVRNRQLAENRAREKERKEIIKKFDLEKGTKTQQRKAVDRVLLCREQKFRCAYCGDEKDTISEATAAKGEGVEVDHIIPESRGGNSYLSNLVLCHTRCNRGKGNKTPMEWLGEEEFGRLEQRLKHLEKSTKWRNLHREVPDLDGFVESQLTDAAYASRQVVGWLEKTLYGDKNDGKRRVLTTKGRYTAILRRDWRLFPERKENEVSEEGKNRADHRHHAIDAVITALSGPERLSQLAHAAEKQELAKSEGYAEQKRERLEPPWGDFDSFRSDVMKEHDNLIVAHRPEGRKITGGLHNDTLYGPVLDRDGNLTKYATIKKPLSELSPRHLRVPKGWKEMLAKLERATSKSQKRKIRGEMLGLKDVVPGKSGVVRDRWFRQELREGLRTNNIDPDDFSSKQVKELLKGRELVLRSGVPIRHVTILRAPTVKPVGRKWWNPKTGRMEPERNQRSVRLYEPQNNHHIEIREDKKGKWVGEVVTNYDAAKRVRPPKESGLKPQPAVNRNDTEKGKFVMSLSIGEMLYMKHPETGEPDYFVVFKIDKTDGGGRVHLTVHSDGGRDKETERCPRREDVKKRGAKTGGVGPADLQELGVERNKGAQKVWVGPLGDVKVLRND

SEQ ID NO: 1081 - protein, 993 aa, unidentified
  REGION 1..993: note = Description of Unknown: Cas Enzyme sequence
MSGSGYILGFDIGANTIGWAAIRRGQESEIIGMGVRVFPEGVDRDTKGLEKSKNAQRREARSARRNRWRWRRRRDRLVNVLRHAGILPRDERALKALMEEDPYELRARGLDERLSLEQFGRVLLHINKRRGFKSNRKSSKAKEDGVVIRGASELQRQIEQSGCRTLGEYLARLKREGEVVRGRYTFRSMYEQEFDMLWAKQAQWWPEVLTEDLRRTVRDEVVFFQRPLKPTEELIGYCGLEPEEKRCPRADWYATRFRILQDVNNLRIRCVDGTERPLEDEERAEVLGELRNRKELKFDRMRRLLGLLETEEFNLEQEGKVRGLKGDVFSAAMRSRKIFGPNVWDRMSEQEKVQLNEWVVELEDEELEQRLRQEYHLTDEQIKEVLKLELPRGYMAFSRKAIMNLLPAMEQGKTTSDAIAEVYPDRSGMRDVELVERLGPPPDVRNPIVNRALVELRRVVNAIVREYGRPELIKLEMARDVKGSRRERMELHERNLENERRNTEARKRLRELGINNPSREDVIKYKLWLECGKMCPYTGKTISQAALFGEHPEFQIEHILPYSRSLDDSYMNKTLCHVDENRRKRDKTPFEAYGEDPKRYEEILQRVRRLPWPKRMKFLVRELVLEDHIQRELNDTRYICREAVGYLRQICRNVQGTRGRVTNELRHQWGLDGIFRELGTERGSDHRRHAVDAAVVAVTTNEHLGRLAQSKYSSEVENFREPWAGFREQVKEKVQQINVSYRVCRKISGQLHEETAYGPTGQYDKRGQEYFVYRKRLEDLTVSMVDKIIDPVVRELVKGRLEEHGITGGGGKIPKAVWREPLYMKCNKPGVKVPIKKVRIRDVKNYVIILKDDRGRPYRAVEPGKNHHIEILEYKDEKGRTRRDGVVVTMFEAVRRSRAGEPVIQRDHGKDKQFVCSLGINEMFMLEMENGSHALHRVQKIDQNKRVILRPHWYGGKVSDQDRPPRIQRKSPNTLRGYKVTVDPLGRIWRAND

SEQ ID NO: 1082 - protein, 1007 aa, unidentified
  REGION 1..1007: note = Description of Unknown: Cas Enzyme sequence
MSSKKKRLSSKSSESEGSNAYTLGLDIGSNSVGWALLNTGKNPSIVAIGVRVFPEGVDRDTKGLEKSKNAGRREARGARRVHQRRRNRRRQLVRILRVAGLLPDAEEDLSKLLHERDPYQLRARGLDERLEPYEFGRALYHLNQRRGFKSNRKSGKAKEQGQIAKAAGELQGQIEDSDCRTLGEYLAQLNGDQTRIRDRYTFRAMYEHEFELLWQKQAEFHPELLTDDLKARIRDETIFFQRPIRWDTDTIGKCELEKDEAGRPLPRCPRGDWYARRYRLLQDVNNLRICNPDGSVEFLEPEQRSIVLKELSKKKKLPFSTIRKKLGLLETQEFSVEYQIDEKGNKNKELIGDVFNASMLNKKIFGREVWNEMEQAEKIRLNEWLVELEDDELEEKLATKYRLDEEQIQNILKVSLPQRYMSFSQKAIMKLLPLMEQGKTTDEALYEVYPDRRKADMPEQVDRLPLPSDLRNPIVNRALFEVRKVVNAIIREYGRPRKIKIEMARDVRGGSRERREIHFKMLDNKKRNDQVRTRLVEDMDLANPLRDDVIKYKLWDECGHMCPYTGKHISQSALFGPNPEFQIEHILPYSRSLNDSFMNKTLCWVNENRLKGDQTPFEYYSGDNEKFEQLKQRVNRTAMPYWKKRKFWQKEINTDEIISRELNDTRYICREVVKYLRQICRDVTGTRGKITHELAYQWGFVKDRDDHRHHAIDAAVIAVTEPKHLRELGQSKYSQESIPFEQPWPDFRAELSEKVSHINVSHRATRKVSGALHEETAYGPTRQKGDKGQDTYVHRKPLEALTKAMVARIVDPVVRDIVRQRLLVFNVDPDQKGNIPKDVWKEPLHMPGVAGKGPQIKKVRIHEVFNNLIHIKDAEGKPYCGVKPGNNHHIEIFDFVDNKGRSKRGGEVVSLFEAVARARAGIPVVRRIRDRNEQFVCSLAKGDMFLLEKDAGETLLCRVQEIWESTNIVLRPHVNAVEAGDINKSASRLRGRKVTVDPLGRLWPAND

SEQ ID NO: 1083 - protein, 1188 aa, unidentified
  REGION 1..1188: note = Description of Unknown: Cas Enzyme sequence
MKLLGLDIGSNSVGSAWIDTKTKTIQLGDSVFPAGVEELSDKRGDPKNQARRSQRQQRRSIERRAKLKRRLRQYLIKKGWIPIEKNELQKWQNLNPWILRKDAIHRKLTEYEFGRILLHLAQRRGAWWFDEEPEEKENKKKKKDPAEIPGTVEYTKKIMKQKNAETFGELIAVEYENRKTATGNKDKKRNNRIRNRADAFGNKESEFVADRHMILAEFLKIWETQKSLGGQLAEQLTDEVKKEIYNPQKTNTWRCQGVLFSQRKAYWNVGTLGRCDLEPTDRKCPKADMYAQEFLVLTSVNNIRITPPMEASRKLTAEEREKVISAVRKQQSASESTIRKALEIDKGAAKTHYALNTDGDKFTVNGDWFYSQIVCGVFGEDTWAAFDSNVKESVNRAILKFDPTEEADENKIRKGCKEWWNLDDKQTENFIAAWEKRPKKDSRVNLSRKAIKNLLPYLRDGWSVTEARDMFAEDASNGADDLTRRRYSTKEVVVNKRIRHFQEKHPDLLPPVSEDISNPVVRKSIHEVRKHLMEYIKQNGRPDRVVIELAREARQTAKVIAKRIQKNKAIEALKEEIKNTHNLDEKTTTQKERAIQRVRLCRQQRQMCAYSGVTITDKMAADGAGLEIDHIVPRSKGGNNGMNNLVLCFSTANQGKGARTPIDWLSEENFGRLEKIFKHLHSQEGEKGKRFITKDNVDMVDEAKWKNLHRKTPKEGFTEEQLRSTAYAATQTADWINKVLYGNEDKGKRYVFASRGDYTGILRRDWGLFFDEDGERSEKGRKNRGDHRHHAVDAAIIAMTTPSRLQEIKRSFIDFEKQKENKNVKPQWKTIDEPWEGFSEQLAEEYKKLKVSHRAYNKQIAGSLHKDTIYGPAMIYERHKKDDEKKGIKKGDVKTDKDGNPVFKKGMYIKSIPAIGIKQNHLRMPIGWDKLKEEYRNAKTNPERKAIRKKMLALEDVPPAKSGIIRDIELRDKIRDWLIEHNFEDIGKAKEYIKKNGFIINGTPVRKVRVLWKLKGVKEIPRKSFDYKTGKVVKSKDRKSMRVYQTQNNHHIEIRENEKGKWLGEVITNFDAARRVRADKKPIVDRNENKNGKFVMSLARGEMVHMKHPNTQEANYFVVFKIDSSKAIHFTPHTDANPASSKKKGVKLREDISLVPDDLRQNIIFNEDGVPEKVKVSPLGKVKVLVKD

SEQ ID NO: 1084 - protein, 1170 aa, unidentified
  REGION 1..1170: note = Description of Unknown: Cas Enzyme sequence
MYSTTLGLDIGSNSVGSTWIDLKNKRIKLGDSVFPAGIEESDMKRGAPKNQARRGYRSQRKITMRRSDRKHQIRRFLLDKGWMPKDEKEEKKWLEKLNPWIIRKEGLERDLKPIEFGRVLLHMAQRRGAYGFDVDEEEDDSGKIKEAISGTRKAIAEAGAKTFGQLMAIKFVERTKNVGTKNKIIRQPIRNRKKATGEGTYEFCADRDLIWDEFDKLWKKQKALKSELAIQLTDECRMELDNSESDTTWRYKGILFGQRKTYWDMGTMARCDLEPTDMKCPKGDMYAQEFLVLETVNNIRITQRGELKRRLTKEEREKVIAALEKQKSAKKAESTIRKALGIAKGENKTKYTLSLEEDPERGLNTNWFKREVVGGAIGEKQWAEMTTEKRESINKAILKFEPQNKINAQQLANGCIIWWKFDEEKTQRFIETWKKRPKVDDRVNYSRKAIKNLLPYLREGWTVNEARNCFAEDATNCASDEQRQRYSFGARAANRRVRQYMEKHPNILPPAPDDISNPVVRKAIHEVRRHIQAYIREFGCKPDRIIVELAREARQSAIVRNKQLAANRAREKERKEIIEKYNLDGETKTQQRKAVERVLLSREQKFWCAYCGDEKDTISEAAAAKGEGVEMDHIIPESRGGNSYLSNLVLCHTRCNRGKGNKTPMEWLSQEQFRRLEQRVKHLEKENWIKWDNLHKEVPDMDKFIESQLTDTAYASRQVVGWLEKTLYGNVNDSKRHVFTTKGRYTSILRKDWGLFPDSKDIEQKGKKNRSDHRHHAIDALVIALSGPERLSELAHAAEKEELARSEGFEQAKREPLRPPWGNFDSFRVDVMREWKKLVVAHRPERRKITGALHNDTQFGPIVDKDGNLTGAFTIRKSTVELTSNHLRVPKDWDELREKLNRVRSKTEQRRIRSRMLALPDVAGGKSGLVRDRWFREELRGALRREGLDPDNFTGKQIKELIKKKDLVLNSGVPVRRVTLVRRPTVTPPVKRKRWNMSTGKIEPDPNPRSIRYYEPQSNHHIEIRENKQGKWIGQVVTNFDATKRVRPSKDSEQKPQSAVNRSDTSIGKFMMSLSIGEMIYMKHPETGEADYFVVFKIDGNGSIHLTPHWDAGRDKETEKCTVREDIKLKGKKIGGLKAADLQNLGVEGDQPPQKVWVGPLGDIKVLTLD

SEQ ID NO: 1085 - protein, 993 aa, unidentified
  REGION 1..993: note = Description of Unknown: Cas Enzyme sequence
MGSYTLGLDIGSNSIGWALLETHETPSIVDIGVRVFPEGVDRDTKGLEKSKNATRREARGARRTHQRRNQRKEQLKRTLQSVSLLPNGESALRTLFHTSPYQSRKKGLDEILEPYEFGRVLYHLSQRRGFKSNRKSGKAKEDGVVIKGANALQTEMANKQCRTIGEYFAGLNPEEQRIRGKYTFRSMYEQEFDLLWAKQKEIYPDVLTEDLRKQIRDEIIFFQRPLKPTDELIGECELELGHKRCPRGDWYARRFRLLQDVNNLKIQNPDGTQQELSGDQRKIILDELGQKEKLTFDKIREKLELLETQKFNAEYKVNKSGKTVESMKGDVFVTKMRGQSIFGSKKWDALDEQEKIRLNEWLVELEDDQLEEKLRSEYGLDNKQIETVLKIPLPPGYMSFSRKAIIKLLEFMEQGAITSEAIAVAYPDREATIQKNESLNQLPLPEDLRNPIVNKALFEVRKVVNAIIRKYGKAAKIKIEMARDVQGSRQQREELHWKQRENEERNKEARKRLREDIGITSPTRDDVIKYNLWDECGKVCPYTGKHISQQALFGPNPEFQVEHILPYDRSLDDSYMNKTLCEVHENIHVKKNQTPFEAYSHNPERYEQIKQNIKILPWPKRKKFLQKEIELDEHISRELNDTRYICKEVVRYMKKLGGHVTGTRGKMTAELRHQWGLDGIFDEIGSRRDDDHRRHAVDAIVVGVTENEHLRRLAKSKYSVTGESFEAPWVNFRNDVREQVKRINVSHRVCRKVSGKLHEETNYGPTGKKDDKGQDVFVYRKKLEDLTGPMVSEIVDKVVRQTVEDRLLEHNIDPQKVNKIPKEVWNVPLCMKTTSGGKSSVIKKVRIQAVFNNLILLRDTQGKPYRGVKPGDNHHIEILQYTDQKGKTKREGKAVSLFEAASRSRAHVPVVKKFHGANKEFVCSLCKGDMFMLELKPGDRILTRVQEIWESTNIVLRPHVNAVEAGDINKTASKIRGYKVTVDPLGRIWPAND

SEQ ID NO: 1086 - protein, 1041 aa, unidentified
  REGION 1..1041: note = Description of Unknown: Cas Enzyme sequence
MKGYTLGLDIGSKSIGWALVGKGKKPSVIDIGVRVFPEGVDRDTKGSEKSKNATRREARGARRIHQRRNLRRDKLVKTLRKSGILPKDNKDLEQLLEKEPYQLRAKGLDEKLELFEFGRTLFHINQRRGFKSNRKTGEANEKSKIAKGDKEHRGANDLQKAVEDNNIRTIGKYFAKIDPEKQRIRGQYTFRSMYEEEYKMLWDKQAEFYPDVLTEALRKKVRDKIIFYQRPLRWDQKTIGKCDLERDEQGIPLPRCPRGDWYARRFRLLQDVNNLKIHNQDGTIDELRNEQRRIILSELSKSNEVSFAKLRKALGLMKTQEFNAEYEINEKGKKKEKLKGDVFTASMRSKKIFGSKVWDSMDKQKKIKINDWLVELEDDELVEKMSVEYGLNDEKIESIFKIQLPQRYMSYSRKAIQKLLPLMEDGKRTDEALAEIYPDRNKVSATEVKEKLDLPEDLRNPIVNRGLFEIRKVVNAIIGEYGKPAKTVIEMARDVKGNSRERRELQFKIWENEKRNEEARKRLADDIGIRNPSRDDIIKYNLWEECGHTCVYTGKHISQIALFSDNPEFQIEHILPYARSLDDSYMNKTLCEVHENIHVKGNKTPYEAYSNNPEKYEQIQKRIKVLPWPKRQKFLQKEIDLEKCISRELNDDRYICKEVVKYLKQLGVNVRGSKGRVTSELRHQWGLNSILDLSNSDMKNRDDHRHHAIDAVVTAVTKNEHLRRLAKSKYSKTDSSFSKPWTDFREELAEKVKHINVSHRSTKKTSGKLHEETFYGLTKETENYFNKGNFKKEEMRQISRNAWICRKKLNYVYSRTPVEILKKVKDLDKITDDAKNVKDALRKRLIEGGVDISNKKDKIPKDLIKETIYIYSKNGKRIPIKKIRIETSESNMIIFTDKRGNPYRACRTGGNHHIEIFEYADKKGKVMRGGDVVTMFEAVRRNKNGEPVIKRDHGVGKKFICSLAINELFMLDSDNEERELHRVQKITQSGNSISIILRPHNYAGKVSDYDKPPIIQRRSPNTLKGHKVTVDMLGRVHLAND

SEQ ID NO: 1087 - protein, 986 aa, unidentified
  REGION 1..986: note = Description of Unknown: Cas Enzyme sequence
MGSDTLGLDIGSRSIGWALVDTGEKARIVDIGVRVFPEGVDRDTKGMEKSKNAVRRESRGSRRVRYRRKKRRDELVRELRRAGLLPDGKEELAAVLKSDPYSVRKRGVDERLELYEIGRALYHMNQRRGFKSNRKSEKKEEGQIAKEAGELQRLIDDARCRTLGEYLTTVDPEEQRYRGRYTFRSMYEKEFDVLWERQRGYWPEVLTDELRDRVRDEIIFFQRPLKPTDDLIGDCELEPGEKRCARGNWYARRFRLLQDVNNLKICHADGTVEGLTKEQREVVLEELGKKKEVKFGAIRKKLGLLESQQFNAEYEVNEKGKKNEKLKGDAFNAGMRRAFSPKIWDGMGLEEKIRLNEWVVELDDDEVIEKLAGEYGLGEKQIESILRISLPRGYMRFSEKAIRRLLPLMEEGRRTDEALAAVYVDRQEGGSVEEVEKLGAPKDLRNPIVNRALFEVRKVVNAVIREYGKPGRIKIEMARDVRGNWRQRKEDHFKMLKNKKRNEEVRKRLIEDDIVSKLSRDDIIKYKLWEECGHICPYTGKHMSLTALFGPNPTFQIEHILPYSRSLDDSFLNKTLCDVDENIRVKGDQSPYEAYSHDAEKFEELKQRVNKTAMPYYKKRKFWQKEIDTDEIIRRELNDTRYICREAVRYLKAVCRNVSGTRGKVTSELAYQWGFVKDRDDHRHHAIDAAVVAVTQNKHLRELGRTKYSTDGVRFAPPWPHFREELAEKVKHINVSHRANRKVSGALHEETNYGPTGRKDEKGQGIFVYRKRLEDLTIAMVEKIVDRVVQEIVKGRLRDKGVDLSGRGKIPKEVWAEPLYMRTTKSNKKVRIKKVRIAEVFNKMILLKNDSGRVYRGVAPGSNHHIEIYEYEDEKGRIKRDGDVVSMFEAVQRSRGGEPVVNRKRTDGKRFICSLAINDMVTMAGKNGDVDLWRVQRMSVNKQIYFRHHTAARIDDESTLIRKQVSLFDGRKVVVDPLGRVYPAND

SEQ ID NO: 1088 - protein, 993 aa, unidentified
  REGION 1..993: note = Description of Unknown: Cas Enzyme sequence
MGSYTLGLDIGSNSIGWALLNTEGKASVLDIGVRVFPEGVDRDTQGAEKSKNATRREARGARRVHRRRNFRRNQLVKTLQATGLVPKDKQQSEKLLKIEPYQLRARGLDEKLAPFEFGRVLFHINQRRGFKSNRKTGKANENSKIAKEAGELQKEINEANCRTLGEYLAKTNPEENRIRGQYTFRKMYEDEFDLLWEEQSKYYPDVLTENLRNKIRNEVIFYQRPLKPTDDMIGDCDLEEGEKRCPRGDWYARRFRLLQDVNNLKLQNSDGSEGKLTEEQRKTIIEVLEKRKELKFNDMRKKLNLMETQEFNLEQGGKVKSLKGDVFSSAMRSKNLFGPKVWDTMDEAEKIKINEWLVDLDDDELIENMKSEYDLNDEQVDRVLKVSVPQRYMSFSRKAIRKLLPLMEEGKRTDEALAEVYPDRNKKGIEEKNKLALPEDLRNPIVNKALFEVRKIVNAIVREYGKPKKIKIEMARDIKGNRREREELHFKMRENERRNEETRKRLIEDIGIRNPSRDDVIKYNLWEECGHTCPYTGKHISQSALFSDNPEFQIEHILPYERSLDDSYMNKTLCDVYENIHVKGNKTPYEAYNSNSEKYEEIKQRIKVLPWPKRRKFLQKKIELDECISRELNDTRYICREVVKYLKLLGVNVTGTRGKITSELRHQWGLNNILDLSVSDMKNRDDHRHHTIDAAVVGVTRNEHLRRLAKSKYAETGTGFKFEHPWKDFREELGEKVKHINVSHRATRKVSGPLHEETSYGITGEKDEKGQDILVYRKKLEDMTGPMVKNIVDPVVKEIVKDRLAKNDIDPEKQKKIPKEVWAEPLYMKNTKSDKKVPIKKVRIYNVAKRIEIFNDNEGNSYRAVKPGSNHHIEIFEYKDKKGNTKRDSNVVTMFEAVRRKKDGEPIIKTKYGEGRKFVCSLSINEMVMMKNKHGEMDLYRVQKMDQNKMVRFRHHTAATIDKNETYIDKTAHLFEGHKVTVDPLGRIHRAND

SEQ ID NO: 1089 - protein, 1198 aa, unidentified
  REGION 1..1198: note = Description of Unknown: Cas Enzyme sequence
MKLLGLDIGTNSVGSAWIDTKAKTIKMGASVFPAGVEEQTDKRGSPKNQARRSQRQQRRSIERRAKLKRRLRQYLIKKNWIPTEKERLQEWKNLNPWFHRRDAVREELRTDEKFSAGEKFGRILLHFAQRRGAWWFDEEPEKTEKSRKRKKDPAETPGTVEYTKKIMVQQGVTTFGELIAIGYENRVTTTANNKIRNDRVRNRDNAFGEKVSEYVADRHMILSEFLKIWETQKRFGGKFAKQLTDKVKKEIYNPQKTNTWRCQGVLFSQRKAYWNLGTLGRCDLEPTDMKCPKADMYAQEFLVLTSVNNIRITPPMETSRKLEAKEREKVINAVRKQKTASESTIRKALGIDKGAGKTHYTLNTEGDQFTVNGDWFYSQVVCGVFSEDTWAAFKSEKKESVNRAILKFDPAEEADEEKIKKGCKKWWNLNDKQTAAFIAAWKKRPRKDSRVNLSRKAIKNLLPYLREGWSVTEARDMYAEDASNGADDLTRKRYSTQEVIVSKQIRHFQKKHPGLLPPVSEGISNPVVRKSIHEVRKHLVEYIKQYGCPDRVIIELAREARQTEKVISKRMQRNKAINELKNEIIEVHNLDAPEITSTQRERAIQRIRLCKQQRKMCAYSGITITDVMAADGSGLEVDHIVPRSKGGDNRMNNLVLCFSTANQGKGNRTPIDWLSKENFEKLEKIFKHLKGNKKDKAAITKDNVDMVDNVKWKNLHRKTPKEGFTEEQLRSTAYAAAQTTDWVNKVLYGSADRDKRYVFASRGDYTGILRRDWGLYFDEDGERSEKGRKYRGDHRHHAVDAAIIAMTTKFLPTIKKSFIDFDKQKENKSVTPQWKTVEQPWEGFSEQIAEEYKRLKVSHRAYNRQISGYLHKDTIYGPAVIYDKHKKDNEANGIRKGQVKIDKDGNPILKKGMYIKSISAIGIRQNHLRMPDGWDKLKEEYKNAATRAQRKAIRKKMLALEDVPPGKSGVIRDIELRDKIRDWLKEHDFEDMGKAKAYIKENGLMINGTPVRKVRVLWKLNEVVEIPRKEFNFDIGKTMTNSNYKSLRVYQTRNNHHIEIREKVNKKGEIKWSGEVINNFDAARRVRADRKPIVDRNDNKNGKFVMSLARGEMVHMKHPDTQKANYFVVFKIDSSKTIHFTPHTDANPASSKKSGVKLRKEIALVTNELRENIIFNKNNVPEKVKISPLGEVKVLVRD

SEQ ID NO: 1090 - protein, 1234 aa, unidentified
  REGION 1..1234: note = Description of Unknown: Cas Enzyme sequence
MKKFTLGLDLGITSIGWALVSTDAAGNKSIVDMGSRIIPLSTDDKDEFSKGNAISKNQKRTARRTQRKGYFRYKLRRSNLKAFLEQNGMQFPDALMHCTAATLFGLRARAAVQQVSLPELGRILYHLNQKRGYKSSRSDANLDKKDTAYVAEVKNRHQLIREAGQTIGQYFLEGLRQEGYYRIKQQVFPREAYIEEFDTIIAEQCKHYPEVLSEKAIHTLRNEIIYYQRRLKSQKDLVSICEFEGEWKKDKSGKDVFAGPKVAPRSSPLFQVGKIWESINTIALKNKRGEAFAITPEQRYALFNYLDNNKALSEAELFRILGLKKSDGWYGNKQTAKGIQGNLTKCAIKEHLGDTDLLKFELITRYAGEEVFLTDKDTGEVKDAREKMLIDPSFEAQPLYRLWHTIYSIPDAEECSKALQRTFNMAPDVAANLAGIDFTRSGFGNKSARAIRKILPYLQEGYAYSDASSFAGYNHSRSWTGEERLKQTLLPRLELLKKNSLRQPVVEKILNQLIHVVNAIIDRHGRPDEIRIELARELKQSQEERNNTFAALNKRERENKAITERIETEYRHLGIRATRNTILKWRLFHEISDQESKVNATCIYCGQPFGISDALSGNSVDIEHIIPRSRLFDDSQSNKTLVHRRCNEDKGDRTAYDFMESRGAEVLSRYLETVDTLYKNRVIGKGKRDKLLLSSDKIPKDFIDRQLRATQYIARKAKELLENVCYNVWSTSGNITEYLRRIWGWNEVLMNLQLPRYRDLGLTEQREWQTRDGQVHIREEIKGWSKRDDHRHHAIDALVIACTEQGFIQRINTLNASKTRDEMRRQVESAGRQYDARKNLLENYIYAHKPFTTREVEEAAAGILISFKAGKKVATISRYKARGKNVHTGVLVPRGPLSEESVYGKIKVLDQKKPVKYLLEHPDLIFNPYIKALVEERLAASDHNVRQALGSLKKDPLFLDKEKTKPLEYGTCYREEYVIKYPLAGIKAKDVPYIIDKKLRELVAGRLQAFGNNEKEAFKTTLWFDEARQIPVSSIRCRTGLSAVVPIKKDQTGRAISFVKPGSNHHVAIYLDEKGKRQEHICSFWNAVERKRYRFPVIIDNPAEVWNKVLNSPEAFPESFLSQLPGDKWQFAESLQQQEMFVMGLPAQEVEKALSAGDTTLLSKHLYLVWSISENDYWFRHHLETKNSELKTTIGAKESKRYYRCKSISAFYELNPYKLKLDVLGKIVYPHTSA

SEQ ID NO: 1091 - protein, 1051 aa, unidentified
  REGION 1..1051: note = Description of Unknown: Cas Enzyme sequence
MDYILGLDLGETSLGWAVIKVVDGQPAGLIDAGSRVFPPIVDRSANLSNPKIKNADRRMHRGARRVLARRVSRRESLQSALSDAGLLPESEKERAQLFAAVNPYEARAKALDEKLPPHELGRALYHLAQHRGFKSNRKEESSDDKEQGKVAKEIGTLQALITEAACRTLGEFLWRLGRDSRRLEYGETRLRNRRFSRDMVEAEFDAVWQAQQAHHPALLTEKLRARLHNNIFFQRDFAISDERRAALPKRANALRAPQLKACSLIPDEKRCGAGEWIAQQFRIWKEVNNLRVMEGHHAERPLTVEEAAKLVAGLIRQKKMTFGRMKTILGFAKDSHFNLEAGGRKDLDGNTVEAALATAFGKAWDALDEETKHERRSLLTHEESPEKLAEVARQWGLDDEAAEKLAKFKPKGSYLRYSAKAMEILLPYVEAGLMEYDAIVQATEDGKLPHSEETDPVDRLPGPPDLPNPNVMRCLHETRKVVNALLAMYGKPMRIVVELARDLKASGAEREAAVRRMRDNEKLNRQAREFFADHGNPEPSNTDLIRYRLWQEQECECPYSGRTITADHLLSHYNVLEIDHILPYSLSLDDSLQNKVLCFTDANRDKGQRTPFQWKGGPDSEAYEEMITRVRRYYHYNRGKLLKFQRAEIDVEEVIQQKLVDTRYASREVKTFLALLYPPAERVGEKRVQASPGRVTAILRYLWGLNTILNPEGDNEKSRLDHRHHTVDAVVIACTERRFVKALSDAAKRELRRDEMHVPPPWEGFRGEVERVLCRQVRTWNVDGREITTEGILVSHRAERKIGGALHEETSYGPTADPKVFTSRVKVENLTGAMVARIRDKTIRRIVREHLLAQDIDPAKKTGVTPAKAWQTMPQLPVSAARRRKDPTLPESIPIRKVRVLKTIDRPLLMPGPDGEPYRAVITGSNHHMEIVEEIDAKGRRKWVGIPVTMLEAARRARRANEPIIQRDHGEKRKFVMSLCKGEAVFVETNGEFNPYRVQKMDQQGRVWFRRLTDAGPVEQKKLLQKNVGALSGKIFKIALDAVGRVKSCHD

SEQ ID NO: 1092 - protein, 1173 aa, unidentified
  REGION 1..1173: note = Description of Unknown: Cas Enzyme sequence
MKEIFLDSNIILGLDIGKSSVGFALVDKANNYKIINAGVRLFDAPEKPKEQTSLSKERGEFKRARNSNKNEFYRTKNIVKCMLKYNILNANTIRTYDKSPKVKQCPKSKKKHLFYIKTAEYLFYKKSKNNNVLNLRVKALTQKISNLELARVLYSMNNHRGVTYDEIREIPEGSNKSLSEDQKNLKDGFQKYNEEYKSKENDYLTVGQYLEKNHGAKFRNTDKWAKGKKVGKDYLFSIPRDDLKNEIEIIFEKQREFKNDICSKEFQDEYLEHFLWEKESPKYDTLVSPCIYNPNEKSANKHHFSSQLYISLEKLYNIRYREIGTKEYLEFSKEQKQIILNNSFEKIKGLSYKDIKKILKLPNLEFKGILEEEKSIVTNFDTFIQIKKIFNLEFNPLEEFKNDDGFIQNTLVSIINILAYETKDSLKKVELLKLDILDENIEKLLKITIRGHLSYSVCVLDKICKYMLNGDIPHDVKQKIENEYGVKSIDKKAYLPPIIYTDFPLKNNHTVIRALSQVRTVINDILKHYRKESGNSNWTFDMVTIELAREMNSKKQISSIDKAISQNTKSNQEAKEFCEKYNINNPTQEQILKAKLWILQKGIDPYVWIQNDENNFVDSYTLGRISAEKLFDEGYCEIEHTLPYGRSLDDSQSNKTLVRSSTNQNKGDKTPYEWLSKEQFEKFEKYIKDNWKDYTIPRVRKLLNKDFKGVDGFKQRDIVDTQIISKYAGLYIDKHLKFWNNPNFDGKRRVYANNGKITSILRKAWAIGKKNRDTHLHHGEDAIIIACSTPSLIKNISTFVGIQTYLTGGVLTLEKFDRVLNKHKTLKEYILNELKIHDIDIEKLNLKNKNVRDDFTSILFKILANKNYPYDGFRDDFKDIIENAPVTRYVKQKTNGSIHDETISKKKSDDEKGVLIRNGISRNGAYVRYDVFKIINLKGKITYDFVVLTAQYNGTKIDDLPTPILKDGDKSTFMFSVYKNDLLRYSLKDKSIIVCNFVKVDSSIIVKEPKNKESELFRKQIKGLHNSWLKTDDVEELKDIMSDKAILKELNLKLEKVTKLTSQVEKVTNLCNKVSSIIKTKYGINTVFIMEKMNSNQTKELRDILIQQSIVKEDIELTSDLIKTIFITLSESGYIPSSRADGQKKLIDLVKLKVDCLGNIIDEITSEIRRPLK

SEQ ID NO: 1093 - protein, 1122 aa, unidentified
  REGION 1..1122: note = Description of Unknown: Cas Enzyme sequence
MNGLVLGLDIGVASVGVGILKKDTGEIVHASSRLFPAATADNNVERRSNRQARRLHRRKKHRGVRLQDLFEDYGLLTDFSKVSINLNPYKLRVHGLDNPLTNEELFISLKNMVKRRGISYLDDASEDGGVVSSEYGKAVEENRKLLAEQTPGQIQLDRFERYGQVRGDFTVVENGEKRRLINVFSTSAYRKEAERILRKQQEFNNQITDDFIDDYLTILTGKRKYYHGPGSAKSRTDYGRFKTDGSESDNIFGILIGKCTFYPDEYRASKASYTAQEFNLLNDLNNLTVPTETKKLSEEQKKTIIEYAKSAKTLGASTLLKYIAKMVEGSIDQIRGYRIDVNNKPEMHTFEAYRRMQTLETISVGDLSIEVLDELAHILTLNTDREGIEDAINTRLINCFSQEQVLELVQFRKNNSSLFSKGWHNFSLKLMRELIPELYETSEEQMTILTRLGKQKSKETSKRTKYIDEKELTEEIYNPVVAKSVRQAIKIINEATKKHGIFDNIIIEMARESNEEDAKKDHIKRQKANQDEKNAAIEKAASQYNGKKELPDSIFHGHKELSTKIRLWYQQGEKCLYTGKNIRISDLIQNQYQYEIDHILPLSLSFDDSLSNKVLVLATANQEKGQRTPFQALDSMDDAWSYREFKSYVKDSKLLSNKKKDYLLTEEDISKIEVKQKFIERNLVDTRYSSRVVLNALQDFYKIHKFDTTISVVRGQFTSQLRRKWNLEKSRDTYHHHAVDALIIAASSQLRLWEKQNNSLISYEGNRFVDSETGEIVSLSDDEYKELVFKAPYDHFVDTLKSKKFEDSILFSYQVDSKYNRKISDATIYATRKAKLDKDKSEETYVLGKIKDIYSQPGYDAFIKIYNKDKTKFLMYHKDPQTFEKVIEEILRTYPSKELNDKNKEVSCNPFEKFRQENGPIRKFSKKGNGPEIKSLKYYDNKLGNYIDITPDDSANQVVLQSIAPWRTDVYFNHKTKKYELLGLKYADLQFEKGSGDYSISIEKYLSIKEREGVDSQAEFKFTLHKNDLILIKDNQTNEKQFFRFLSRTMPNVKHYVELKPYDKAKFDGEQPLISLFGKVAKGGQCLKGLNKSNISIFKVKTDVLGKKHFIKKEGDEPKLKF

SEQ ID NO: 1094 - protein, 1113 aa, unidentified
  REGION 1..1113: note = Description of Unknown: Cas Enzyme sequence
MSYGIGLDIGIGSVGYAVLDLDHEEKPWGIIRLGSRIFDKAEVPKTGGSLARPRRDARSSRRRLRRHRHRLERIRQLFLKSHLLSQKELDTLYEGKLPDIYELRVKALDERVTNSELARILLHLATRRGFKSNRKAELADSEAGALKTAISENARIMAEKHYRTVGEMFLHDFRFKEHKRNKGGSYTTTVDRSMVAEEAELILDTQQKLGNIVVSDAFKDDYMTIMLSQRAFDEGPGGKSPYGGNMIEKMVGNCTFEDGSHGEPEEKRAAKACYSFEYFNLLQKINHIRLVSDKESIPLSNDQRNVLISLAHKVEKLTFARIRKELGISSEYSFNMVRYNEVNKDNIAEAMKAAEKKEKFEYLSAYHRIIKTLKSKGKDRIVAYTPEILDQVGWYLTIYKGDDKRREALKTVGIPDDDVEKLLEISGVRKFGHLSLKALRKINPFLEQGMTYNEACEAAGYDFQAHLVEKSMYLPAKAPELDDITNPVARRAISQTIKVVNAIIREQGESPLYINVELARELSKNFQERGKIEKENESNRHKNEMVMEKLRENFTNHKPSGQDLVKFKLWHEQDGISPYSQKKIEYGRLFETGYAEVDHVIPYSISFDDTYKNKVLVLASENRDKGNRIPLAYLSEDKGQEAANRFKVWVNSNVRDYRKRQRLLKESLTEDDFKGFKERNLTDTKYISRFMYNYISDHLLFAPSETGKKRRVTAVNGMITSYLRKRWGINKIRGNGDKHHAVDAVVIAAATPSLIQEISGYTAYRETGRYKKNYAYEQGLNGGYLIHKGTGEIKAEFPYPWEGFRNELIARSSDRPTMGLEKSPYYVNRDLSEIKPIFVSRMPRRTITGPAHKDTVMGARHLEEGYTLSKVSLTDLKLDKNGEIKDYYNPNSDRLLYNALKERLTAYGGKSQEAFAEPFYKPKTDGTPGPLVKKVKIMNKTTMPVMVQNKTGAAGNDSMVRVDVFHVEGEGYYLVPIYVADTVKKQLPNLAIVANKPISQWKVMDEKDFLFSLYPNDLIYFKSKGVKTFSRVNDDSSLREKYETNEGLVYYVKTGINTASITIISNDHSYILNSFGVKSVSLIEKYEVDVLGNYHKVKREKRRPIVFKKKKNC

SEQ ID NO: 1095 - protein, 1102 aa, unidentified
  REGION 1..1102: note = Description of Unknown: Cas Enzyme sequence
MEYGIGLDIGIGSVGWAVLALDHEENPWGIIDLGSRIFDAAEQPKTGASLALPRREARSMRRRLRRRRHRLERIRNLFIKCGLLTTEQLDHLYDGKLEDIYTLRVRALDERLTDEELARVLLHLAHRRGFKSNRKAESQSAEAGELKKAISLNQKTMEENHYRTVGEMFCKDPRYTEYKRNRGGNYLNTVDRAMVEDEARKILEIQEKLGNSKLNGDFQESYLSILLSQRQFDEGPGGKSHYGGNQILNKVGTCTFEDGSNGEPAEKRSPKVCYSFEYFNLLQKVNHLRLTSSKDNRGLDEAERKKVIALAKNKADLHLGKIRKDLQIPSEYRFQGVSYNTKELPEETEKKTKFNYLPFYHQMQKLLKSKAQVDISDYSLDVLDKIGQILAFYKGDDARRKELEKLQLAPKAVEALLEMNGTTKFSHLSLKAIRKITPFLEQGMTYEKACEAAGYDFRAHQENKSFLLPADAPELEDITNPVVRRAIGQTIKVVNAIIRKQGSSPLYVNVELAREMAKDFQERIKIKNENEANQSQNDTLMKEIRETYQRMNPSGMDLVKWKLWKEQDGKSPYSQNSIVSERLFETGYVEVDHIIPYSISFDDSYKNKVLVFSWENRDKGNRLPYQYLLQKYGQGAADRFKVWVNNNVRDYRKRQRLLKEEMTEEEISGFKERNLSDTKYISRFMYNFIRDHLEFAPSETGKKKRVLAVNGRITSYLRKLWGIRKIRANGDKHHAVDAVIIACTTDKEIQDLTVFSEEREKKYEADENGGHLVNTSTGEVLKRFPFPWDGFQQELEARCSVHPERELAGLPFYMNKDLNDIKPIFVSRMPRRKVTGAAHEATVRCARQIEDEIALSKTALTDLKLDEDGEIKNYYNPDSDRLLYEALKEKLIQCKGQAKVAFKDPFYKPKADGTPGPLVKKVKLKVKATLAVPVEGKTGVADNDSMVRVDVFKIEGEGYYLVPVYVADTVKKELPKKAIIAHKPYKKWKDMDEKDFLFTLYPNDLIYVESKKEMIFKIPPKKRKNSTLEPEFSCHKIFGYYQGTDRYGGVIDILTDDGAYLDHGQGVKRLLKIKKYQVDVLGNIHLVEKEIRRKFIIKQKAR

SEQ ID NO: 1096 - protein, 1047 aa, unidentified
  REGION 1..1047: note = Description of Unknown: Cas Enzyme sequence
MAQLPFSDYVLGLDIGANSLGWALVSLKDGIPQSILKVGVRVFEAGVEGDIESGKDQSRAAKRREARLHRRMLERRSRRLAKIAGLLQRAGLLPDGDLKSEESRIKVLRELDDSISARHHPTSEKPDPASAHLLPYRLRALALDQKLHPFELGRALYHLAHRRGFLSNRKAPAKDPNEEGKVNQGIHTLRQKIEESGARTLGEYFSRLDPEQERIRQRWTARDMLDQEFEAIWNAQAKHHPTILTHDFKKQLRRAIFHQRPLKIKKNLIADCELEKGQKVAPRCCLLFQRFRLLQQVNNLKVTEPTGKSRPLTRDERETLLHALETQDKLSFSEIKRLLKLRDHRFRMGEGDEEVLTGNKTAAKLREIFGDRWDELSPQERDRVVEDWWSIQKSETLRKHGVKYWRLDPEAAERLGKLALETGYCKLSKKAMRKLLPLMEEGISHAKAQEQLYGNEPPPKPFDKLPPLDRAPLPKPHNPAVHRALTEVRKVVNAIIRRYGRPSLIRVELARDLKKSKEDRKKISDQIARNRRDRERAKKALIDNGIQEPSRDDIEKWLLYEECNGICPYTGKSISLASLFGPNPQFDVEHIIPFSRCLDNSFTNKTLCDIEENRNRKRNQTPYEAYGADPARWEEIIQRVKRFRGKAAAAKLHRFQLESVDSLEEFASKQLNDTAHASRSALRYLGLLYGSNKAGVGPDGRRRVQAGRGQVTAFLRDEWRLNSILGDLQKSRADHRHHAVDALAIALTDSRIIKTLSDAASRALSERRRRFGRVAPPWKSFLEEAKNAIAATIVSHRVSRKVSGALHEETIYSKPHTDKDGRVCHHIRKRLDKYFTRPMLDKIVDPVIRDIVRKHFQANGSDPKKAFSDPGNHPFLCAKDGRHIPIHSVRVREDRSTVQVGSGVSRRQVLTGSNHHVEIVEVEDEKGQPRWEGRIVTLIEAIKRLRNRQPIVQRDHGEGKKWVFSLAGGETIQLTDGGITKLYTVRTITVRRGQYVEIAYVPISDARTKTEIREKKEWRTDLLEPLRKLQCRKVLVTPLGEVRYARD

SEQ ID NO: 1097 - protein, 1002 aa, unidentified
  REGION 1..1002: note = Description of Unknown: Cas Enzyme sequence
MDVTRPYLVLGLDPGIASCGFCLLDMTNHKILEMGSHLFKAPQEDKTKTSLAVTRRKARSIRRNTARTAARLKRCLELLAGAGLVPADADKTWLQTKKGDKPILKLRAGGLDRLLTDREFAQVLYSLCGRRGYIPHGEGRLGETDEDESKKVLGAIKKNQDAMAAGSYRTVGEMLNAQGRSRNRGGDYSLCVYNSQIQDEAKVLFASQRAHGNTKATRELEDSYLACLTWEKKSLDHDARVYELVGPCSYFPGEKRAASADISSELCRAYERLGHIVIVHEDGSEQALTASEIDDHLKILFSTAPIKGNKECKVTYGTIRKDLDISGKSVFKGIAQDREKDEPFAPKAWRSLRRVLPEGLLARMFADRKLGDAVCEALTFASSEASLIERLSDLGLSDDERDAILAVPFTGKLFKGYGSRSLKALGLLLGAFEEPEIRILTDAEKVTGLLDLRLSDRGVRGQLLPPYDSYDPTCRNPVVLRAMGRMRHIVNAIIRIHGVPDEIHIELGRDLKMSNKEKSLVDKRNRENAASNKKWATTAAGILGCTPEEVPGRIIRKLILREEQGEKDLYTGDSIDLEHLVRDDRYCEIDHILPYSRTCDDSRANKVLVLSKSNQDKRERTPYEWMTSGEAGAPSWDSYRARVMAQVKNPRKRANHLNTDLGPETQAKFLARNLNDDRYMSVAVKNYLEDCLLFPEDGRKRHVTAVAGGATGNLRWVWGLNFGEGNVKDRADDRHHAVDAAIIAACSESTVKKVAEASAKGREAFKQLRKSRLADTQPWPTFAAEVAARREFVVPTRMADHGVTGRAFQDFSYRLEGLRETGYAEISRQTDPATRERRSDAAGNYALSSNGTVKLLDAIAFVRFWHDPDAGKNGKWYAEPVYCADIPAIQNGSYVPKYQKQKVARNSWLPVPDSAMHNEPLVLFQGDVLIIDSHIGRFWTYAIGGGTLNILSLLDKNEKAECFPPISKWVNSVEVRVLQEDCLGHCYDDISINPEDSTFRQR

SEQ ID NO: 1098 - protein, 1013 aa, unidentified
  REGION 1..1013: note = Description of Unknown: Cas Enzyme sequence
MENINNYTLGIDLGTNSIGWAVVEHHDNLQPSGLIACGTRIFQEAVDAKSRVPKNQARRAARSARRLIARRKMRHKEVLSLLLNKGLLPSNNDEREILFTDNKSFDPYQLRKKALDTKLTLHELGRVLYHLAHRRGFQSNRKALSKEDGVIKSSITSLHNEIKNSGCRTLGEYLADQPKKRNRYTNRTMYQEEFEQIWQEQQRHYSDLLSQAFKVSIHKAIFFPRPLKIQKNLVGKCTFEPSRKRAARALLETQRFRILTDLNNLAVKNPVTREYRTLVSEEREKLLAILERQKTLSWNKARTALGLHEGEIFNLEEGKKKELIGNRTAFALRSILKKQWDEMGQTKQNDLVTDILTIDNEQGFLNRMTSHWGFDAETAEKLATTELEPGYARLSLKAIRKILPYLEQGMIYDKACKAAGYNHSAPNQQVATDRLGAPPYLRNPVVQKALYEIRKVVNAIIQSYGKPVVIRVEMARDMKLTRRQKEESQKRQKENEKTNDKAKGILQREFRIQNPSRADIQKYNMWIECNMTCPYTGISISREMLFSPEVDVEHILPYSRSLDDSYMNKTLCMAAENRSSKHNRTPYEAYHADETKYQTILQRIRALPWPKRRRFEQKDIDTDAFVERQLNDTRYICTEVKKYLQQTGVNVEISKGEATAALRHRWNLNRILSADGSSEKNRADHRHHAIDAVVIALTSRSLFQELSMLSAQSSVSLSERGFPLESPWPSFYEDVDEKIENIIVSHATSRKISGALHEETAYGFSKHENCFLYRKPLDANITLSQIMKIRDRYIKELVIARLEKFEPEIRNAINETIPRRLRFKMTKKQEKELMKKAFGNVNDPLLHKDGKTTIKSVRIMDNTLKSNMLAVKNRCGQEYKYYPFGNNHHIEIIEHAETGRREGFVVTSAEAARRARINKIPIVQKNPPWEKEGEIFGNEWKFGMSLAINDILMIDKDGLKQYFRVQKISSNTQIFYLSHAAAILDESTSKMPDALSFRKVVVDVLGNITACND

SEQ ID NO: 1099 - protein, 1014 aa, unidentified
  REGION 1..1014: note = Description of Unknown: Cas Enzyme sequence
MEKIPNYTLGIDMGTNSIGWAVVGHDDNLKPTGLIACGTRIFQEAVDPKSRIPKNQARRAARAARRLVVRRKMRLSSVLNILLKTGLLPNNVDEREKLFADNKSFDPYQLRKKALYNKLTPYEFGRVLYHLAHRRGFQSNRKVSSKDDGEVKISINSLHQEIKNADCRSLGEYLASQPTKRNRYTDRSMYQEEFELVWQEQQKHYPDLLNQTLKVSIHKAIFFQRPLKVQKYLVGKCTLEPLKKRASRALLEVQRFRILQDLNNLTIKNPVTREYRIPTNNERGKLLELLERQKTLSWNKARTALRLHKGEIFNLEEGKKKELIGSRTAFALRSILKKHWDEMKLAKQNDLITDMLTIDNERGFLNRMKSEWGFDSETAEELAKTELEPGYARLSLKAIRKIIPHLEQGMPYDKACNAAGYNHSMLNKQAAGEKLGAPPYLRNPVVQKALYETRKVVNAIIHRYGKPTVIRIEMARDMKLTRRQKEEWQKKQKENEKINDKARDILQNEFEIQNPTRADIQKYNMWIECSMTCPYTGAIINREKLFSPEVDVEHILPYSRSLDDSYMNKTLCMAYENRATKHNRTPYEAYHTDAQKYPAILQRIKTLPWPKRRRFEQKEIDTDKFVERQLNDTRYICVEVKKYLQQIGVRIEISKGEATAALRHRWNLSRILSEDGSLEKNRADHRHHAIDAIIIALTSTSLFQKLSSLSAQSGVALSESGFHLEKPWSSFYEDVDKKVRHIIVSHAPSHKISGALHEGTAYGFSEHEECFVYRKPLGVDITLAQILKIRDKYVKELVIARLEKFEPEIRKAIDEAIPKKSRYKITDKQAKDLIKKAFGNSEYPLLHKNGKTPIKSVRIVDNTLKSNMLAVKNESGQAYKYYPFGNNHHIEIIKHTKTGKRDGIVVTTAEAARRARNNKIPIVQKLPPWEKEGTIFDECWEFVMSLAINDMLMLDKDNIRQYFRVQKISSNTQIFYLSHAAATLDESTSKMPNAFEYRKVIVDVLGNIIACKND

SEQ ID NO: 1100 - protein, 1016 aa, unidentified
  REGION 1..1016: note = Description of Unknown: Cas Enzyme sequence
MENANNFTLGLDMGTNSIGWAIIGHDEDQPSGIIACGTRIFQEAVDAKTKTPKNKARRDARSARKLVSRRKMRRDKLLNLLLQNNLLPKDANDREKLLTDNKLFDPYQLRKQALDKKLTPYELGRVLYHLCQRRGFQSNRKAKSKKDGDVTMAITSLRQKMIDSKSRTLGEYLANQSIKRNRYTDRAMYQEEFELVWQTQQKHYSELLNQIFKVTIHNAIFFQRPLKIQKNLVGKCTFEPTRKRASRALLEYQRFRMLQDLNHLTIKNPITRNYRQLANDEREKLLGLLEKQKTLSWSAARKKLKLHEGEIFNLEEGKKKELIGNHTAYTLRSILGERWDNMSQDKQNALVIDILTIDNVQGFLNRMTSHWGFDAETAEKLAKTELETGYARLSRKAICKTLPYLEDGLNYYTAEFAAYSPCPSDKKEEIIKMVKSKIDFKDACKKVGWNESEKVGSSNSSNNVLDKPPYLRNPVVQKALYETRKVINAIIRQYGKLATIRIEMARDMKLTKRQKDELQKKQKENEKANDKARDILQREFGIQNPTRADIQKYNMWLECQMTCPYTGTVISREMLFSQDVDVEHILPYSRSLDDSYMNKTLCIAAENRTSKHNKMPYEAYHADEAKYQSILQRIKILPWPKRRRFEQKEIDTDKFVDRQLNDTRYICVEVKKYLQQLGIGVEISKGEATAALRHRWNLNRILARDGIIEKNREDHRHHAVDAVVIALTSRALFQKLSCLSAQSGAALSERGFSLDKPWSSFYEDVDEKVKNIIVSHAPSRKISGALHEETAYGYSEHEKCFVYRKPLSSLTENEIEKIRDAKIKQLVKERVAQFENNLKKVFGDENNPLLHIDGKTPIKAVRLKVNLNKNTTHPITDQKGSAYKYFKYGNNHHVEIVENITTGQRKGIFVTAMQAAKRARMDKTSIIQRNQGSEWMLVMSLCINDIVETKDGETNKLYRIQKISSGKQMEITLKHLNDSIPDYNNNTWAMKSATATKAIIRKVAVDAIGNIYTCND

SEQ ID NO: 1101 - protein, 1113 aa, unidentified
  REGION 1..1113: note = Description of Unknown: Cas Enzyme sequence
LPADESPPLLKLAGTIVALVQLSKRCIPYRLTPVKGGFHEITAPRSARRHLILGLDIGAASIGWALVERTDGKPDKLRTLGVRAFSPGVSEDITAIRAGRDSSPAVPRREARLRRRQLARRRHRLTKLTHILQEAGLLPPGQIESGDDLMAYFIELDRELFSQDARRAEPHLLPYALRARALDERLTPHEFGRALYHLAQRRGFLSNRKVKPKPAGAPQTDEEKEEGKVKTAIGELAQKMQESGARSLGEYLSKLDPEDKRVRNRYLGRQMLIDEFEKIWTAQVAHHPDILTDSLRDAAREAIFFQRPLKSQRHLIGACDHEKRARRAPLASLVAQRFRLLQKVNDLKISLPDGRVRKLTPEERAKLIDALERQGDLKFSKIRSLLQLPKKNCHFNFETEGEKGLIGNRTASKLAAVFGDQRWTEFPEKERSRVVDEMRSIHNRDALKRRAAMLWNLDDEAAQKLSEVPLEEGYSNLSRKALAKLLPLMEESMPYASARKEIYGDEPGPQIRPDLPRLDTVLDVRNPTVQRALTELRKVVNAILRQHGRPDEVRIELAREMKKNRKDRKRIHANNTANREARESAAQEIQREIGIANPTRNDELKLLLAEECGWACPYTGKTISWDALFGDHPQFDIEHIIPFSRSLDNSFMNKTLCDAEENRSHKHNNTPREAYGNRPERWQEILDRVKKFPGHSGRVKLQKFQMEDLAALDDFTTQQLNDTRYASRLAIEYIGLLYGAGASGVDAEGRRRVHAGRGALTSFLRGRWGLNSILGAGQKTRDDHRQHAIDAVITALTDPATIKRLSDAAQKAPLEKNALFAEMPPPWEGFLDDVRAAIHDTTVSHRVSRKVAAALHEQTIYSKRHPDENGKECVHIRKPLQDLSPKDIDAIVDPAVRECVRDKLAELGHTAPKKAFTDRGNHPTLRAKDGREIPIHKVRIRKSETTKRIGGDGARARNVKLGSNHHVEIIETTDKKGRKRWRGEVVSTLEAARRLRARQAIVERDHGPDEEFKFSLAGGEIIELNSTETKEETKKEKPGTSKDRGRALYVIRTISITNSGRVTVDFAHINDARKKDDIRKAGDWGRSDIDPLRRRGCRKMLVTPSGEIRRAND

SEQ ID NO: 1102 - protein, 1055 aa, unidentified
  REGION 1..1055: note = Description of Unknown: Cas Enzyme sequence
MKVPRQNKPSAQQHILGLDIGANSVGWALVACEAGRPAKLLTTGVRVFPAGVEGVISTGQDQSRATARREARLRRRMLARRRHRLNKLALLLQEAGLLPPGDLRSIEAASTYFAAIGDTVFSEDGPSHPHLLPYRLRARALDHKLSPYDLGRALYHLAQRRGFLSTRRTATRPAQKQDDEGKVKKAISELTQRMQDSGARTLGEYLSGLNPEEERIRGPGRWLGRGMLEDEFNAIWAAQAPHHPDILTDDLRKGIHRAIFFQRPLKSQRRSVGRCELEKPRRRAALALPSSQRFRLLQKVNDLLVITPDGQRRALTPEERTALLNALETKPEMKFPQIRRLLGLARHSFNFETDGEDRLVGNRTAAKLGKVFGERWRRLSCEERDLVVEDLRSVHKPEALKRRGMKAWGLDEEAAQRFAEIPLEYGYCNLSRQALAKILPLMEEGQPYATARKEIYGEQPPAHAFNSLPPLKDVMQVRNPAVERALTELRKVVNAILRQHGKPAYVRIELARDLKRPRKQRKEITKRNAANRRSREEAREWLRKERGMAAPRPSDEDKWLLWQECNRQCPYTGRQIEAEALFGDSPQFDVEHIIPFPRCLDDSFMNKTLCEVAENRERKRKRTPWEAYGHDPDRWNDIMQRVRSFGSSAAKAKIERFQIQDLQSLDGFVSQQLNDTRYAATLAVRYLGMLHAAGGDGVDPAGTRRIQAGRGQVTYFLRNEWGLNAILGGGEKTRDDHRQHAVDAAAIALTDAATIKRLSDAAAQAPQRGRRRFAEFAPPWEGFLDDMRRAIEGLTVSHRVSRKVNAALHEETIYSKECYRDENGKQCVHVRKRVEDIKTAKEAEAIVDPVVRERVKAKLQEQGTLKGDPPTLPTKDGRQIPIRKVRMRRYDQTEIIGAGARQRRVKLGSNHHVEILETTDKKGQPRWEGRVVSTLEAMRRLRAGEAVVQCNHGPGKRFVFSLAGGEIIELDAEHKEKDACGGEQQRSRQLYVIRTVTENQKGYKQVEFAGINDARMKNDIKKGGAWGTAMIDALRRRHCRKVLVTPLGQVRWAND

SEQ ID NO: 1103 - protein, 1077 aa, unidentified
  REGION 1..1077: note = Description of Unknown: Cas Enzyme sequence
VKNGSNVGEGQHVLGLDIGANSIGWALVARKDGKLAGVVRTGVRVFAAGVEGDIESGRDESRAAKRREARLRRRMLGRRRGRQDKLALLLQQAGLLPAGDLATPKARMQFFGDLDRSLFPEEVRRSDPHVLPYRLRGRALDEKLAPYELGRALYHLAQRRGFLSSRRFRGKPPEDEQDKDAAKPGSETQVKRSKDKEDEGKVKGAISELQKRIEQAGKRTLGEYFASLDPTEERIRRQWTGRKMFEEEFENIWAAQSEHHPDILTQPVKKQVHRAIFFQRASKVPRHLIGECDLERGRKRAPMALLAAQRFRLLQKVNDLQIKAPDGQTRALSAEERQGLADALETRGDLTWKEIRGVLRLGRTCHFNLEDERPKGLIGNRTACELAKVFGDRWASLSPEEKDRVVDDLRSIQVRSVKDEQARKRRGMKTWGLDEVAARGFCDVHLEDGYCSLSRRALEKVLPLMEQGVQYATARKKLYGEKPPKRAVDALPLLSNVVQVRNPAVQRALTEVRKVVNAIVREHGKPAVIRIELARDLKKPRQERREISRRNEQNRSAREKAAERICQEAGVTKPTRSDTEKLLLAEECGWVCPYTGKPINMDGLFGDSPQFDVEHIIPLQRCLDDSFMNKTLCQVEENRNRKRNRTPWEAYGSDPDRWDEIIQRVKRFQGGARKAKLERFQIKDLESIDDFASRQLNDTRYAARLAVEFLGCLYGAGADGVDSQNKQRRIQAARGQVTAFLRNEWKLNEILGGGEKRRDDHRQHAIDAAVVALTDSATVKMLSDAAARAWQEHRRRFAPIAPPWPGFLDEVRGSIDKMIVSHRVSRKVSGAMHDETIYSKPHKDPDGRECVHVRKPVDGLSTKDLDHIVDPAVRDCVTAKLKELGEEDPKKAFSDEKNHPPLKGRGGEQTPIHSVRIRRYEATVPIGEGARERRVMLGSNHHMEILETEDKKGQPRWEGVVVSTYEAMQRLRAKKPVVQSDHGPGKKFLFSLAGGEIIEIDENDGTRGLYVIRTVSKSRSGGKEYPAVEFVSITDARKKEEIKSKGAWGSALVEPLRKKNCRKMLITPLGEVRWAND

SEQ ID NO: 1104 - protein, 1092 aa, unidentified
  REGION 1..1092: note = Description of Unknown: Cas Enzyme sequence
MSAKSSAEYILGLDIGVSSVGWAMLGTTRGKPDNLIRCGSRVFDAGIDEGDFSAGKENSRNATRRQARAARRLISRRMRRQRKLFNLLVKAGLLPSGDPAKVLPELDASLRKKFLSDLKKHSPERRQAEHVLPYRLRALALTQKLEPFELGRALYHLAQRRGYKSNRKERAILEEPETEQTEEKRKKKEADSGKDARKKELNKVEGGITELEQKMQAGGAETLGQYLADLDPEQERIRRRWTSRAMYENEFDKIWTAQTVHHPKTLTDDLRKRVRKAIFHQRPLKNQSNLIGPCEFENGVNRDPNTGRILPRRKRAPKALLIAQRFRMLQQINDVRIVTSRNPKDEYLTADQRDVLIERLDRQGTLKFSEAKKILSIPKNARFNWESGGESEFLGNSTNAKLSRIFGDRWWKFTDAERDSIVEDYLSIHEDKALAKRGKNHWGLDDAAAEKFGRLALEDGYCALSRQALAKITPMLQDGVPYATAVKELYGDQNLEPVDSLPPPAAQYPHIRNPMVLRVLAELRKVVNSIIRKHGKPAAIRVELARDMRRSKKQRIESWKQMRRNETDRKKAAAKIAAEAGIQTPSRADIEKVLLFQECGEHCPYTGKSISMKALFGEHPQFDVEHIIPFSRCLDDSFMNKTLCDIAENRDHKRNRSPFEAYAGDPEKWDAILARVKKFKSNARDDKLRRFTLATTENLKDFTTRQLNDTRYATRQATDYLALLYGGLYEVGGKRHIQASKGGTTAYLRNEWQLNSILGDGGTKSRDDHRHHAVDAVVTALTDASAVQMLSDAAARATREGRRRFGRIKDPWPGFLDDVRHAIENLSVSHRISRKINGPLHEETNYGPSKDRDAAGRPQSFAVRKRLDSLSTSDVERIADATVSRLVMEKLKEIGGEPKKVFASADNHPCFRLKDGRCIPIHAVRVRRAETAMPVGQGPRERWVQSGSNHHMEIFEVKDAKCRTKWTGRVVSRYDAMRRLATRKPVVDKMPPDTGQFLFSLASGDLIELEQEPGRRGIYVVRTVTQNKKGYVTVEYVRITDSRMKGDIKKPARQRTEGELKGWFTAALNALAEKHCRKVIVTPLGEVRYAND

SEQ ID NO: 1105 - protein, 1050 aa, unidentified
  REGION 1..1050: note = Description of Unknown: Cas Enzyme sequence
MKSEFQAGDYILGLDVGVNSVGWALVTLDNGQLAGLTRAGVRVFAAGVEGDVATGRDESRAAKRREARSRRRMLERSRRRLDKLALLLQQAGLLPPGDLSSPHARTRFFTDLDRSLFPQAPRGTDAHVQLYRMRARALDERLEPHELGRALYHLAQRRGFLSSRRFRPGREDREKEEGEVKQEIGKLAESMHKAGARTLGEYFSGLDPTQERIRSRWTGRPMYQDEFEAIWTAQAPHYPQVLTDELKKRVHHAIFFQRPLKLRPDRVGQCELEPNCKRAPFALLAAQRFRLLQKVNDLEVTTPDGPRRKLTPQERQTLLDALEAQGDLKFGRIRNLLKLRRHTFNFERDGEDRLIGNRTASKLVEVFGKRWKELSSEEKDQVVEDVRSIQDREALKRRAMRRWGLDEKGAAELAEVALEDGYCHLSRKALAKILPLLEQGKSYATARKEVYGEQPPAEAVDILPPVADALDVRNPAVERALTEVRKVVNALVREHGKPASIRIELARDLKKTRKDRQQIASRNWENRKAREQARGKLQEYGIPNPKRRDIEKLLLWNECRRQCPYTGQMICMDALFGPSPQFDVEHIIPLHRCLDNSFINKTLCDNEENRNRKRNQTPWEAYGSDDARWSEIIERVKRFQGTAGTAKLERFQMQEVESLDDYTSRQLNDTRYASRLAVQYVGTLYGAGADGVDPADTTRVQAGRGQVTQHLRNEWELNRILGGGEKRRDDHRHHAIDAVVVALTEPATVKMLSDAAKRAPSERRRRGRTAPLDPPWPGFLDDVRSVVENIIVSHRTSRKVVAALHEETIYSKPHKDPEGRECHHIRKPLGDPKRGLSKRDLEHIVDPVVREAIMAKLRELRRDDPKTAFKDRSTHPRLRTKDGRQIPIHSVRVRCYDATTPIGEGARQRWVILGSNHHIEILETKDAKGRSRWKGEVVSTYEAMRRLRADEPIVQREHGPGKNFLFSLAAGEIIEIDGEADCARALYVVKKVTRRRGDKGERVTVGIAHINDARASSERDLQELSPEVLRRRRCEKVVVTPLGEVRSAHD

SEQ ID NO: 1106 - protein, 1054 aa, unidentified
  REGION 1..1054: note = Description of Unknown: Cas Enzyme sequence
MKSAQGVNSGELVLGLDIGAASVGWALIQLQGGMPKVLRATGVRAFPAGVEGGDASAITAGRDVSSAAKRREARSRRRLLARRRHRLTKLALLLQHAGLLPQSDVASGDALVQYFAALDRELFPADARHDTPHLLPYRLRARALDEKLTPYEIGRALYHLAHRRGFLSNRRVKPKAAGVKETDEEKEEGKVKGAISELAQRMRDSGARTLGDYLSRLNPEEERVRNRYLSRKMLQDEFDRIWAAQFPHFPDVLADDLKQKVHRAIFFQRPLKTQRHLIGDCDLEKGRKRAPLALLSAERFRLLQKANDLRVRPPDSEERDLIPTERAALVNALEQRGDLTFEAVRKELNLPKGVTFNFQTDGEKGLIGNRTGRKLAEVFGNEQWTAFAPTERDRVVEDLLSIHNHEALKRRATRAWGLNETAADRFASIALEHGYCNLSRQALARVLAPMEQGVPYATARKQIYGETPPLTAVAALPRLEAAPFTVRNPAVERALTEVRKVVNAVVREHGLPGRVRIELARDLKKPRKERKAISERNAANRKAREAAAKEIEDLVGPDPRRSDREKVLLWKECREHCPYTGKPISRDALFGEHPQFDVEHIIPFPRCLDNSFMNKTLCEVTENRSGKGNRTPWEAYGHDPERWGEIIARVRGFQGQAARAKFSRFQTREVASLEDFTTQQLNDTRYASRLAVEYLGLLYGAGRDGVDPQTHRKCVEASRGAVTYDLRSVWGLNGILGGGEKTRDDHRQHAIDAVVVALTEPTAIKRLSDAAERAPAERRRLFADMVPPWPDFIDHVRAAIDSMVVSHRVSRKVAAALHEETIYSKPHFDDDGKQWVHVRKPLDQNFSARDVANIVDPAVRQAVHKKLEEVGEKALKDVENHPALAAKDGRQIPIHSVRLRVPVTTEPIGTGPSGRHVKLGSNHHVEIIETTDRKGQPKWEGIVVSTLEAMQRLKARQPVIQRDHGPGKPFLFSLAGGETIELDAEQDERKLYTVRTISVDSGGRVGFVSINDARRKEDIAKAHAWYRETINGLRKRGCRKVVVTPLGEVRRASD

SEQ ID NO: 1107 - protein, 1059 aa, unidentified
  REGION 1..1059: note = Description of Unknown: Cas Enzyme sequence
MKRTDSVPSPTGEFVLGLDIGAASVGWALVQYSDGDPVALKASGVRVFPAGVEGDAGAIASGRDVSRAVKRREARSRRRLLARRRHRLTKLALILQGAELLPAGDIGSPDALVAYFAALDRQLFPLDARRTNPHLLPYRLRARALDERLTPHELGRAMYHLAQRRGFLSNRRVKPKPAGVKQSDEEKEEGVVKAAIGELAKAIDEAGARTLGEYLSHLDPEQERVRNRYLSRKMLLDEFEAIWTAQRAHHPAILADDLKEKVHRAIFFQRPLKSARHLIGKCDLEKGKRRAPLACLAAQRFRLLQKVNDLKLFLPDGEVRELTPEERAALLDALQRAGDQTFAAVRRLLKLPRGSKFNFETEGEKGLIGNRTARKLADVFGEERWAAFPPEEREHIVNEMRSIHNRDALKRRARKQWPLDDETAQRLAEIPLEDGYCNLSRQALAKVLPLMEEGIQYATARKQLYGDQPGPRRLSALPRVQTTLQVRNPAVERALTEIRKVVNAIVREHGLPAYVRIELARDLKRNRKDRKQISVRNAQNRQGREEAARKIIAEAGLPNPRRSDIEKWLLADECAWQCPYTGKQISVENLFGDHPQFDIEHIIPRDRCLDDSFMNKTLCDLEENRAHKRNRTPHEAYAHDEENWARIIARVKQLSGRSGRAKLERFQSETVPGIDEFASSQLNDTRYASRLASEYVGLLYGAGPDGVDPDGTRRVQAGRGAVTADLRNEWGLNSILGGGHKTREDHRQHAIDAVVTALTTPAAIKRLSDAAAHAPEARRRRFAPIEAPWPGFLEAVRDSIDTMVVSHRAGRKVAAALHKETNYSKPQTDDDGKPCVHVRKPLESLSTSDVDSIADPAVRRSVEQKLGELGESNPQKAFREKANHPTLQAADGRAIPIHKVRIAVPVTPQTIGRDARTRHVKLGSNHHVEIVETTDKRGRTRWEGVVVSTYEAMRRLKARTPVVQRDHGPGKRFLFSLCGGDTIELDAEQEKKELYVVRTISLKKTGRVTVDFVGIKDARKKSDIQVAGAWGSSDIDPLRKRNCRKVIVMLLGEVRRAGD

SEQ ID NO: 1108 - protein, 1058 aa, unidentified
  REGION 1..1058: note = Description of Unknown: Cas Enzyme sequence
MAMPGATINDRLVLGLDIGANSIGWTLIEEDEEGPTALRDMGVRVFPAAVDEGNVEAFRTGRDKSAAAGRREARLRRRQLARRRMRLTKLALVLQEGGLLPPGDFNTAEQLLSYFAALDRQLFTPEQRKANPHLLPYSLRARALDERLEPYEFGRALYHLAHRRGFLSNRRVPPGGLSAEEERDEGKVQSAISDLAARMEAAGARTLGEYLASLDPEEERVRSRYLSRKMIEDEFEQIWAAQAAHHPDLLTPKLKKRVRHAIFFQRPLKSQRHLVGHCDLEKGKRRARLACLDAQRFRLLQKVNDLRIVQGPEERELSEEERNLLLDALERNERLKFSEMRRLLGLPRRGCKFNFETEGERSLIGNYTAARLRAALGDARWDAMSRQERDQAVELLLSMHNQAAIARRARKLWDLDAETADRLAEVALEDGHIGLSHQALAKLLPLMEKRVPFATARKEIYGEQPKPAAVSSLPPLERVVEVRNPVVRRALSEVRKVVNAVAREYGKPGRVRIELARDMKKTREERRRLTKRNAVNRQVRKAAAEELERQGITKPSRDDIEKYLLAIECGWECPYTGLKISFESLFGDHPQFEVEHIVPLPRSLDNSFMNKTLCHVEANRRKGNRTPWEAFHDTPEWDNIIDRVKKFGPTGPGVPSAAKAKLDRFFTEKFDLDEYSSQQLNDTRYASRLAMEYVAALYGAGADGVDPQGTKRVQATRGQVTAHLRNAWGLNSILGGGEKTRGDHRQHAIDALVVALTTPATIKRLSDATARGLMSRSQRPAPMEPPWPSFLDDVRAAVNSMVVSHRVSRKVSGALHEETIYSPPKPGPDGKEYVHRRKPLEDLSKGDIAKIVDPAVQACVKAKMEELGTDDPRKAFEDRQNHPTMRARDGRLIPIHKVRLREPVSPEVIGGGARLRHVKLGSNHHLEIIRTAGRRGQEKWEGVLVTRLEAAQRKRRALPIVNRDHGPGREFLFSLACGDIIELDDEQGGRSLYVVRSISSTKAGRIRLEFVTINEARKIEEIKKSRQWFRSDIDPLRKRNCRRVVVTPLGEVRRVGRD

SEQ ID NO: 1109 - protein, 1052 aa, unidentified
  REGION 1..1052: note = Description of Unknown: Cas Enzyme sequence
MPAEFILGLDIGVASIGWALVEQHDGQPAGLKAAGARVFEAGVKGDIAAGLDKSRATARREARSRRRQLSRRRRRLTKLARLLQRAALLPPGELNSPEQLLGYFDSLDHQLFPSEVRHRDPHTMHYRLRARALDERLTAYEIGRAFYHLAHRRGFLSNRKTAPRRSDAEGVVKKEIGQLGQRIEDRDARTLGKYLSGLDPADERLRGRYLGRKEMVQPEFEAIWQAQAAHYPELLTEALKQEVSEAIFFQRPLKTPARFIGYCELERDQRRAPLAVLPAQRFRLLQKVNDLKIKAWGASYDLTDDQRRRLTQELETKEDLSFDDIRKLLPELSEARFNFETFGEEKLIGNRSAARIAKALGKKHPWQQLPSGEQERLVQEVRTRSRDAIARRARQREYDEKTAEKLSRVRLEEGYCRLSRRALASIVPLMESGMRYAAACKQCYPDLGRGQASAVLPPLDDVVEVRNPTVERALTEVRKVVNAVVRTYGTPSLIRIELARDLKRNREQRKSIYERTTKNQRDRAEARAALDAMGYDPSPRDVEKCLLWWECNRQCPYTGLPISEVALFGAFPEFQVEHIIPLPRSLDNTFANKTLCHVSENLRKSNRTPWEAYGHDPDKWREILDRVGRFRGGGRAREVRSRQRSKQRQSLRTKLDRFQLREARDLAGFTDQQLTDTQYAARLAVEYVGQLYGAGADGNDAEGTKRVQAARGQVTSALRGTWGLNFLGAGEKAREDHRQHAVDAVCVALTDAETIKLLSEAAERGLHTAGQRIDRMEPPWPTLRDDVAHAVYAMVVSHRVSRTVRGQMHNEMFWSPRRRDAEGKEWVHQRKALSALSEADLDSIVDDGIRRRVKDRLRGLDLSNPKQAFRTAANLPTLSHQGREVPIRKVRIRRRDKTRTIGQGARAREVMLESNYHIELFAVTDAKGKVKWDSEVVSTYDAMRRARRKEPVVQHDREGFLFSLAQGEAIELDEGADRGRAVYVVAKITKRGEGQRERRTVGIVRHDDARMSTAPEKEKARSLREPSAEVLRKQGCRKVVITPLGEVRNAGD

SEQ ID NO: 1110 - protein, 1025 aa, unidentified
  REGION 1..1025: note = Description of Unknown: Cas Enzyme sequence
DGAPCGLIAAGVRAFAAGVEGDISAGRDESRAAKRREARLRRRVLARRRYRLTKLAGILQSGGLLPAAELDSPEAVDAFFTELDRELFTQDMRARDPHLMHYRLRARALDEKVTPDEIGRAIYHLAQRRGFLSNRRETARPRRDDDEGVVKKEIGELEQQMRDAGSRTLGEHLSKLDPEKKRVRDQYLSRGMIECEFGAIWQAQAAHYADLMTDELRTQIHYAIFHQRPLKSPKRFIGFCELERDRRRAPLALLGAQRHRLLQKVNDLRFTTNDGQTRDLTPEERRKLSQALEGKGEMTFGAIRKLLSLKDGRFNFETEGEKGLIGNKTAARLAEVFGDERWEALSSAERDQVVEDLRTIHNVDARKRRAMKAWELGDEAAARFAEVRLEDGYHSLSRQALSRTLPLMEQGTQYATARKACYPDRAEGRPRDLLPPVHEVREVRNPTVQRALTEVRKVVNAIVRKHGKPSLIRIELARDLKRNRKQRGEIHKRNAENRRDREQAAAALLQERGITKPLRSDTEKWLLAEECGWTCPYTGRQISVEALFGDAPQFQVEHIIPFPRCLDDSFLNKTLCHVEENRRKANRTPWEAYHGSDQWDNIISRVKSFQGGGRGRAARNPKLRRFQMEKVESLDEFTSQQLNDTRYASRLAVEFVGQLYGAGADGVDASGRRRVQAGRGQVTADLRAEWLLNSILGGGEKTRDDHRQHAVDAAVVALTDPGTVKRLSDAAARAESAHRRRYAPMDPPWPTLLDEVRDAVNAMVVSHRVSRKVAGPIHEETIYGRPRPDEEGRLHVHVRKPINSLSPKDIASIVDPAVRQCVQEKLAALGESDPAKAFKTADTHPVLLARDAREIPIHKVRIRRSDATRQIGLGAYAREVQLGNNHHMEIIEATDAKGRMNWEGRVVTTYEALQRVRQGKPVVQRDHGPGRNFLFSLAAGEVVEVDDGIHGNRGFYVVKKVTRRGEGSGERVTVGIVSVNDARMSTAAEKEKARSLREPSAEVLRKQGCRKVVITPLGEVRNAGD

SEQ ID NO: 1111 - protein, 1070 aa, unidentified
  REGION 1..1070: note = Description of Unknown: Cas Enzyme sequence
MNCLIPLPSIPVKGGKLMKRTERTPSPSGDLVLGLDIGAASVGWALVEYSNGQPTGLKSAGVRTFPAGVEGDASAIASGRDVSRAVKRREARSRRRLLARRRHRLTKLALILQGADLLPAGDIGSPDALVSYFAALDRGIFPLDARRANPHLLPYALRARALDERLTPHELGRTLYHLAQRRGFLSNRRVKPKPAGAKQSDEEKEEGVVKAAIGELAKHIEDAGARTLGEYLSRLDPEQERVRNRYLSRKMLLDEFEAIWTAQRAHHPSILTDDLKEKVHRAIFFQRPLKSARHLIGKCDLEKGKRRAPLACLSAQRFRLLQKVNDLQLFLPDGEVRELTPEERATLLDALQREGDQTFAAVRRLLKLPRGSKFNFETEGEKGLIGNRTARKLADVFGEKRWAAFPPKEREHIVNEMRSIHNRDALKRRARKQWPLDDETAQRLAEVALEDGYCNLSRQALAKVLPLMEEGIQYATARKQLYGDQPGPRQLSSLPRLETALEVRNPAVERALTELRKVVNAIVREHGLPAYVRIELARDLKRNRKDRKEISLRNAKNRRGREEAARKIIAEAGIPNPRRSDIEKWLLADECGWQCPYTGKQISVESLFGDHPQFDIEHIIPFHRCLDNSFMNKTLCDLEENRAHKRNRTPHEAYAHDEENWARIIARVKQLSGRSGRVKLERFQSETVPGIDDFATSQLNDTRYASKLASEYVGLLYGAGASGVDPDGTRRLQAGRGAVTADLRNEWELNSILGGGEKTRDDHRQHAIDAIVTALTTPATIKRLSDAAARAPQARRRRFAPVEPPWPGFLEYVRAAIGDLVVSHRVSRKVVGAIHEDTYYGRYEDADGKVWAHQRKPLADVTDIESIVDPAIRECVRKELKGRTPKEAFASKADCPHLRTKKGRNIPIYRVRIRKRDSLTPIGRDARSRHVKLGSNHHVEIVEATDKNGNPRWEGVVVSTLEAMRRLKAREPIVQRDHGSGKRFLFSLCGGDTIELDAEHEKKELYVVRTISLKKTGRVTVDFVGIKDARKKSDIQVAGAWGSSDIDPLRKRNCLKVIVMLLGEVRRAGD

SEQ ID NO: 1112 - protein, 1056 aa, unidentified
  REGION 1..1056: note = Description of Unknown: Cas Enzyme sequence
MKYRIGLDIGVASVGWAVLENDEHDEASKIVARGVRVFDIPQNQKDGGSLMAERRGFRSMRRTLRRRKVRVGLVKHLCESTFNIAFKGILEQQNLPCIYSIRLDALSRKLEIEEFARLMLHFIHRRGFLSNRKNIEKGSDDGKVLVGIKDNEKVLKEKGYKTIGEYYVKEFISKGLTVRNKSGSYNCTFNRKSIEDEIKLIFRIQRELGFDANLIGENFEIRFLELFNKQIPYDIGPGHPSPYAINSYLDAVGVCEFDGNPRAYQATNAAERFRLWSNLNNLVLVTRTEKTIKDRELTLPEKESIAEYCLHKGGKVTYGMLRKKLGLGEDVRFKHLTYVKRVKTEGRFQVQESEPVEVEKKVFVDLRGRSAVKKVFKDKFGELTDMEIDTIITVLHAYHSEDRLRMAIAGELENGRFTLDPEYTDYVLNIQLPQSKPTHLSTEIIYKILPHLEAGHKYYKAMELAGFNHTTASEVEKKIKLSLKDIEKEIRNPVVLRSVSQTIKVVNAIIDKYGSPQQVIVEVARDLARDFRERQKITRENEENQARNERIKKQIMELGILVPGGEDIVKYKLAQEQNWEDPYDGGRKIDAEKLFEPNYVQVDHIIPYSKSFDDSYANKVLVHAASNQNKGSRTPLQFLTGDRAQMFINWVRSAKISPRKRTNFLTVEPKEDEMKERNLKDTQYITKFIKNFLEKHLYLADSKHGVPIKAIKGGMTAHFRKRLGLNKFRDTDEHHATDAIVVACFTDKLVRQITEFSKRYETIYEKLKFPEPWDGFRDELQALAPVSVSRMPNRKITGPGHKETVRGLVKELDVKGREIYYTITRVPLAKLKLKNGEIEGYYNKESDIGLYNKIKDVLLTNPEKDLEAAFSGFRKPKADGTDGPVVHKVKIKAKTTNFVTLDRVGGVADNGSMVRIDIFAKGDKFYFVPIYTADFYKPQLPNKASVSGKPYVEWLEMDEGLGFEFKFSLYSNDIFHVAEYGFLYYRGADISSARISAAYQDGRVEDGKRIQIRMGIQKLQEFRKMEVSVLGEIKDAPFQPRDVRTLLGPRSKKKEK

SEQ ID NO: 1113 - protein, 1108 aa, unidentified
  REGION 1..1108: note = Description of Unknown: Cas Enzyme sequence
MKYRIGLDIGIASVGWAVIKNNENDEACGIVARGVRAFDVPQNPKDGGSLKAERRGFRSIRRTLRRRKVRIAMIKQLCEQTFGIAYQQILQQKELPDIYEIRFQALSRKLSTEEFSRLLLHFAHRRGFLSNRKETAKTGKDGKILKGITENEQKLQEKGYATVGEYYFKEFIVKGESVRNKSEKYDCTFNRQTIEDEIKLIFSKQREFGFDKTTISTEFESKFTDLFNKQIPYDVGPANPSPYATKSGSLYQDMLGVCSFDGNFRTYQATNAGEKFKLWNNINNLTLSMIEQGRSKEQELSLSDKQILANYCFKKAGKITYSDVRKILKLNDNIRFKHLIYSKRTKANRYVLQELAREEVEKKVFVDLKGRAVIKKAFKNDLDKLSYDEIDTIIVVLQAFHSNENLLAALNGGLSDGKFKINPDYIDTVLGIEMPESRPMHLSSQIIYQILPYMEKGEKYHKAMESAGYNHVGKIAVDKKVKLSIHDIEKDIRNPVVLRSVSQTIKVINAIVQKYGFPSQVIIEVAREMAKTFDERNKARKSMDENREHNERIKERIKQLGRLVPSGEDIVKYKLAEEQNWEDPYSGGKKIDASKLFESNYVQVDHIIPYSKCFDDSYNNKVLVHASSNQNKGNRTPLQFLTGEQAQMFINWVKTARLSARKKTNLLMVEPYEVGMKERHLKDTQYITRLVLNFLKQYLYVLPSKHKEPIKAIKGMMTSYFRKRFQLSKFRDTDEHHATDAVIIACFTDKLVQQITNFHQMRESFYQDKDGRYICKITKTVSDDQMKNIMGKFEDKFPEPWTGFRKELDDLNITNPISVSRMPTRKITGSGQAEAIRGYVEEVDEKGIKTIYTITRVPLTKLTLDSNGKIKNYFNPQSDILLYNKLKELLRNNPTEEDFKNFRKPLTNGNDGNIVRKVKIKEKVTMVVKLDKVGGAAANGSMVRIDVFAKGDADKEKFYMVPIYAADFYKPELPNKAITAKPYDQWPKMEQSKSYNFKFSLYPKDLFYFEKVDSKTLWKEVVEQDESGELKKVKKPKEVTSGNFYYRTADISNGSISGFSQNGEWEFTKLGIQGLKVFKKMEIDILGNIKDAPFEPRDTRTLLRQKAR

SEQ ID NO: 1114 - protein, 1018 aa, unidentified
  REGION 1..1018: note = Description of Unknown: Cas Enzyme sequence
MGDGISISQFEYVLGLDLGVASVGWSAVELIEGAPAGILAGGVRVFEAAAPPEQIEKGREELRNAQRREARLRRRQARRRARRLAKVYGILAEAKLLPAARDEVQRQKALDGLDAEIVAQHPEWAVNLPYQLRARALDEKLAPFELGRALYHLAQRRGFLSNRKAAVKDDEEEGKVREGISTLRAKMAEAGARTLGEYLAGLDPREERIRQRYTERRMYEEEFDRIWAAQAAHYPEILTGEMRKTLRRAIFFQRPLKAVEVGECEFEVGRRRAPWAVLAAQRFRLVQKANDLRVDIDDWHERDLTPDERKTVVELLESRAKVKFSDLRPALGLKKTVKFKMERGGEKQLVGNRTAAKLREILGDRWDRMPSEERDRLVEDWLSFVNDEALKRRAIRHWGMTEKQATDFAKVELESGHCGLSRQALKKLLPLMEAGKSYSEAVDEAYGFRLSGGPVYDLLPPLRRCPRLRALRNPMVERTLTEMRKVVNAVIREYGKPVRIVVELGRDLKRSRAEREELSKRMREREGDREKAREALRKAGVADPKREDIEKWMLTEECGWECPYTGRKISVKTLFGDAPEFDVEHIIPRGRSLDDSFANKTLCEVAENRHGKAGKTPREAYGHDRERYEEILRRVEAFRGNDALRRAKRQRFEMTTEQVDALLQDFREEQLNDTRYASKMAAGYLGMLYGGRDQNGTRRIYVTGGQVTAMLRSAWGLNAILGRPDKRKERGDLRHHAIDAVAIALTEHCRVAELARAAERSAIERKRKFSSLPGPFPDFVDKVHGIVVSHRMEHVLRGALHEETNYGKAEANGRRRVRKPVDGKFELEDIVDDAVREAVKKKLAEVGGNRKALAANPPELKGGTKIKRVRVWENGRFERVGQGHRERYVIPGGNHHVEVIEEAGKWKFQPVSRLEAVRRKRCGEAVVNRKPAGFRFSLMGGDTVEMEHETGIRHWVVKSITNESQGRIRRLVVIPAHLAPQEAEKKGLKEKRTAEKFQRMKLRKVQVDPLGRVFAARD

SEQ ID NO: 1115 - protein, 1048 aa, unidentified
  REGION 1..1048: note = Description of Unknown: Cas Enzyme sequence
MEKGETRVRYLLGLDVGANSVGWAAIELEDGTPTRLLRSGVRTFEAGVEGDFSTGKGTPRNADRRIARQRRRLLERRARRLRVLFNILQRAGLLPKGSPPEVLPDLDRTLQAKYLATGDLSQVDQQRLPHVLPYWLRARALDHPLQLHEIGRALYHLAQRRGFKSGRLVTADEEKELKGKVKPAINQLAADMASAGARTLGEYLSRLDPEQERFRARWTGRQMYLDEFEAIWSAQAMFHPETLTGELKREIQYAIFHQRPLKSSKGLVGPCELEPSRRRAPWALWSAQRYRLLQQVNHCKVITPDGEERPWTREERAALIEALESRGELRFADVKRLLKLSRPHHFTLEEGGEKRFVGNRTTAKLAEVFGERWSDLSARERDDIVEQILDIEDDDALARRAREAWGLDENAARSLPETQLEPGYCRLSRRALGKLLPFLEDGLAYAEAVKKAYGELHRRTQPLDRLPAVDITLPHLRNPVVQRALTEVRKVVNALIGEYGKPERIRVELARDMRRSKKQRQQIALRNRGNERKRKEAAEQILRETGNQNPSRDDIEKVLLAKECNCQCPYTGRTITMAALFGASPQFDVEHIIPFARSLDNSFLNKTLCYHEENRRVKRDHTPYEAYAHDPERWNEILSRVRDFRGNAAREKLRRFTMEDPPDMEKFTDQQLNDTRYAAKEARRYLSLLYGGFTDSEGTLRVQAVRGGTTYFLRSAWGLNAILGDGDLKTRDDHRHHAVDAVVVALTDPGAIKRFSEAAERAAAERRRLFGRIEEPWTGFLDSVRRSIEAINVSHRPTRRVRGALHKETFYGPPRPGPDGKPYVHLRKPLAKLTKDDIEKDRIVDPVIRERVREKLRELGGDLKAFKNPSNHPFLETKKGRRIPIHKVRVRLAENAFPVGDGARRRYVTTEGNHHVEIIEVRRGGRVRWEGVVVGRLEALRRLRRGKPVVRRDHGPDKRFLFSLAPGDMMEIDGEEGARRLVRVRSVSPMPSGTARIEFVDANDARLKTDIKKKGSGKWISRTPEKLRRMRARRVIVTPLGDVRRAND

SEQ ID NO: 1116 - protein, 1054 aa, unidentified
  REGION 1..1054: note = Description of Unknown: Cas Enzyme sequence
MSDRPTILGLDLGASSIGWALLSARADGRSLQPDGLVAAGVRIFQAGMEGNMEAGREESRAKGRRVARLARRQTERRARRLRTVFNALRTAELLPTYSDLDLSSSSGRHQTILRLDQEIRDSGRLDGLARAIGVQGAADKLPYVLRAAALDHPLEPHELGRALYHLAQRRGFLSNRRSPRRDDEEGVVLSGISQLRDDMARTGSRTLGEHLSQIDPHQQRIRSRYTARAMLIDEFEAIWTSQERFHPTVLTPELKKRVHHRIFHQRPLKSQSDKIGRCELEPKRRRAPWALIDAQRFRLLQAVNNLRIRNEFGVEYELTPEQRQTLIDELNRKKEVTFDRMRRLLRIPDVTFNLERGGDKRLRGNETNAILAKVFGDRWWQFDRDTRNRIVEDLLSIEKAETLERRGREVWGLDPEKAREFANTRLPDGHCRFSRRALAKLLPHLEEGLNLQLAIERAYPGHRLVGRAQEHLPPVKQVLPDLSNPAVIRTLTELRRVVNAIIDRYGRPAEIHIELARDLRRGKDERQRLQSENRKQEAARKAAAAEIREFQEGEEPTRRDIERLLLAKECEFTCPYTGRKFSMAALFGPEPQVDVEHIIPFHMSLDNSFANKTLCFAEENRNVKRGRTPFEAYGGTPRWDEILERVRNFKSRLAGEKAFRFQLHGEELEEWLSDFASRQLNDTRYASRLALRYLSLLYGGTADGVDPEGKRRIMVVTGQTTAHVRNWLQLGSILNDGGEKTRDDHRHHAVDAIAIALTSQGTVQMLSVASRKQLLRNGRLYGDPEPPWPTFLDDVRETISRLVVSPRVERRVRGPLHAETFYSPRTEEGAKSREGRYVYYTKRLEDLSRSMVEKIVDPTVRRLVVEALDGEEPKDVFKDESRLPHFVRRNGKTVPIRKVRIRDKVPVTQIGEGDRQRFVQTSGNHHLEVFEVTDAKGRSRWEGRVVSMLEAYERVRKGLPVVNREYLPGSRFLFSLVGNPGGDVIELDEPDGTRGLYLVESIWMQEKHARVRIRPINQAVTRSERIQPRINVLQRTRCRKVSIDPLGNVSYAND

SEQ ID NO: 1117 - protein, 1026 aa, unidentified
  REGION 1..1026: note = Description of Unknown: Cas Enzyme sequence
MSKTILGLDLGSNSLGWALLSSGSEGGAGSIIDLGVRIFPKAVEDKTPTPKNQKRRNSRLARRTIQRRSRRKSRLLNYLIKLNLLPAELHGNAQPEGILNSLGDPYMLRAKALDHDLLPHELGRVILHFAQRRGFLSNKKTLLGSDMLDDPDVIAVLGDDGQGDTDSSEETAFKADISLLRAEIKSGGFRTLGEYLASKPVHECKRNRHDEHIRTDRRMYIDELTLIFASQSTCSPGLSEDVQAEIEEIIFFQRPLKLKKDRVGKCSLEPSKKRSAIARLEYQRFRYLQDINNLQYFCQNTDQWIKLNDVDKEKLGMLFEASSDLSFARIGKELGLSRGTTFNLDSGVKNLKGNTTSVAIRAALPSWDDLTAEVQFSLVEDLISIQKKSALKRRLMSHWGFSGEVALGLCLVELEPEYGQVSLKAIGKLMPHLISGMIFSDARKAGGYGYEIKKVVAQDKLGLPPELPNPIVSKGLSELRRVVNAIIAEHGKPDIIRIEMARDLEMNTTRYKNFISQQAKNTKANDRAVEAFRDAQTSPTGSRYPSRDQKIKYRLWLDQRQCCAYSGKTINLAKLFTADIEIDHIVPYSRSLNDSYMNKVVCFAKENQVKGQKTPKDAFGADEDKWNQITQALRHLPRELSSKKDAFYKTDADLSEHDFIGSQLTDTRYMSKVAGDYLKSLGSEITFTRGIMTSWLRRQWQLNDLIGRTAEKERTDHRHHAIDAVVTACIDRSIYTSLVEISRDLERRGSSLTMNDVYIDPPVPAIREELDTHLRDMIVSHVPQRKITGALHEETGVGFVNNVGTVYRKRLDQDFDTKKAQNIVDPVVKALVQEHLVGHAGDAKKAFAPGFKLAHVGGGTLIKRVRVVQAKTTLDALERDKFGIKDSSGKLFKWHAYGNLHHVEVLRSGSTGKYRSEFITAAEAASRARGIGRPSAPIIQTEHGEDWELLFALHINELVQVSVEGDAKIYRVQKLDKGSSRLFLRCHTAANLKDSEQSIEKSINTLIRDYQLRPLKINVLGKCVDD

SEQ ID NO: 1118 - protein, 906 aa, unidentified
  REGION 1..906: note = Description of Unknown: Cas Enzyme sequence
ERLYHVLPYWLRAKALDHPLTPYEFGRALYHLAQRRGFLSNRIAGTRDKKELGEVLQRISDLELEMKNANARTLGEYFSGLDPLEARIRNRYTSRQMYLDEFERIWASQIQYHSALGQMKDQIQRAIFYQRPPKSTSHLVGTCELEPGQRRAQWGRLEAQRYRILTQLNHARLISPEGRELPLHREQRDKLRAELERTKEKSFSAARRLLRLHSGWRFKEEFSSKEKGFRGNTTAARLIKVFGKRWFDLPQSQKDAIVEDLLSIGKAEVLERRGKEVWGLDQEKAKQFASLQLEEGHCRLSLKAIRKLMPHLEEGLSYAEAVKKVYGQFQRRSEPKDVLPPFLEHTRDLRNPAVVRALTEVRKVVNAIVRQYGKPDIIRIELARDMRKSAKEREELSKRNRENERARRQAAAAILREANIPIPSRRDIEKYLLWQECNGICPYTGKAISMSALFGPNPEFEVEHIIPFSRCLDDSFMNKTLCHVQENRTVKGNRTPWEAYGSDPERWREIMERVSRFQGRASSEKKRRFALKPEELEELDTFTSRQLNDTRYASKIAREYLGLLYGGFTDEAGRQRVQATRGGVTAFLRNAWKLNGLLADASEKSRDDHRHHAIDAIVVALTDHRTIKALSDAAARSWRRRPGSLSIPEPWPGFGDEVKSAVSRVVASHRPVRKVSGPLHDETFYANRPDVRVRKPLENLSRDEVDAIVDDRIRDIVKKALGGADPEKAFAKRENHPKIPTRDGRSIPIHKVRIRKSDAVTPIGKDSRLRHVVTGKNHHIEVVEVKKRGKTRWEGHLVTLREANERLRRKEPVVKRHHGPADKFLFSLHTGDTIELPGKGLYVIRSISQQQRGDVNVEIVSVNDARPVKDIKKSHDWTKKSIDKLRALGCRKVEVTPLGEIRACNE

SEQ ID NO: 1119 - protein, 1022 aa, unidentified
  REGION 1..1022: note = Description of Unknown: Cas Enzyme sequence
DSDARPVELLATGVRVFPAGVKDDIESGRDSSRAVDRRNARQRRRMLDRRARRLGKLARLLQSAGLLPEGDLSTSESRHAFFQKLDAAIFPENARRETPHTLLYGLRARALDEAITCHELGRAIYHLAQRRGFLSNRVTKEVEEETGENEGKVKEGIAKLSAEMQATGARTLGEYFARLDPEKERIRKRWTSRQMHLDEFEAIWQAQREHHGDLLADSLKKTIHRAIFFQRPLKWDRSTIGTCELELGKKRAPWALLDAQRYRFLQKVNDLRLLGADPKTGEMWPSEKLDEDRRAKLVNALESEGDLTFAAIKKLLALPKWITFNQEGGESKLIGNRTASKLRAVFGPRWSEMSSEEKDRAVEDLRSIRSEKALRGRAERFWHLDAEAALAFSRIVLESDYCSLSRQALKKLLPLMEKGVPYATARKELYGDRPAPEPFTFLPSLDKAPLSPIRNPAVLRALSETRKVVNGIIRQYGKPAFIRVELARDLKRGRKERQVIWKENQANRKKREEAGRRLLEEHGIAHPSRQDIEKWLLADECGWRCPYTGLTISGDQLFGPTPQFDVEHIIPFSRLLDDSFLNKTLCQMDENRHVKQNRTPWEAYGHNPEKWDGILQRVKQFNGPAKTEKLRRFQLDSLDSLDDFTNNQLSDTRYASKLAIEYLALLYGTGAQGVDADHTRRVQVGRGGVTKYLRDEWGLNRILGDGSGKSRDDHRHHAVDAVCIALTDARAVQMLSKAASSALQEGRRRFGKTAPPWPGFYDQARGLIEKTVVSHRPARKVSGPLHEETFYSPPKENGRAQPAVHLRKPLNKLSKNEVAAIVDPKVREIVSAALNGGDPKKVFAEPSTHPRMESGVPIHAVRIRKAERTEAIGSAGRQRHVMTGSNHHVEIFARMDRKGGIIWDGVVVTLFEAMRRIRAGEPVICRDHGPDCTFLFSLCQGDLIEIDGKNGRELLVVRIITTSNQKGRSYPSLSFAGHRDARLKKEIIENGAWLRSLLDPLRKLNCRKVSVTPLGEVRYAND

SEQ ID NO: 1120 - protein, 1031 aa, unidentified
  REGION 1..1031: note = Description of Unknown: Cas Enzyme sequence
MRRLIALAKEYHLIGADFGHEQYLKPSKGDKESSWDIWLIRKEALERKLTDIEFFRVLYHIAKHRGFFFHTKAEETQEEKTNSERGKAKAGLARIRQKLEDGKWQTVGQMFWEEFKQTNPESKRKRNTSGKYEHSIHRTLLRDEITKIFLCQRSKFKNGKATEVLEDRYINEVLMYEEGPDDKRLEKMMGRCELIQSLCAREGRTCEPNCTRCLCAPKESYSAERFSLFSRLNVLELVDIKSGAKVKIDGHQAQIEALAYKNAKVTFAQIRTALGLEDKLHLRFNLCSYREKNPEYNEKLECEIKNGRLQFGEQHKVPVVNIRTGAIEILDGKIKDVFSGKKLWPNAKKMHVYYSDIRKQLNLSGDYRFKNLSGYTKSAEEFGSEAKYIKQFEYATFIELGGYHKIRKAIEEKCGSQTWQTLSADTAALDTVAEALTYRKSDQTRAAYLQERQITDSKLIQAVLTLNMDKLATFSKEALVNLLQHMETSGGGLLFHEAKEKCGYKNVDHHKQAVLEPYTGFFEKNPVVSRVFAQTRKVVNAVVRKYNGSYPIDQIHIEVATELANNDKRKAEIAQGQARYREEKVRAEERCREAGINPDEGHNLLMFRLAEEQNNRCPYTDKWISYSSKVTSENGVYILDCEIDHVIPMSRSFNDSLKNKVLCTRKANQDKRDRLPAEWFQDTYGPDSDQWAQFEHRISRMLNMPYAKRKNLLRKSWTEEDKEKFISRNLNDTRYAARHIAEYLRKYFDFSRSQREDIKEVSRIQLRSGGITAFLRHMWGLNKSRDDNDLHHALDALVVACSTYGHVYLVSNLAKQIERAGKSWYKHFGREKFTPWDRIREDIDSTAKEVFVSRMPRHKATSPAHKDTVLKKSEPVRKRVLKVNGGYAEMDEMIRADVFADESGKNYVVPIYAVDIFSRNPLPDKYLKKNDAPYNEWPSVTEDHLKFRFSIFKDDLVSVDGAMYYVNFVRGTRAKINLRSIDGSLKDREVSYRNVILKKYAVDVLGSYKEVKEEKRIGNEGVKRVKKRRPK

SEQ ID NO: 1121 - protein, 1044 aa, unidentified
  REGION 1..1044: note = Description of Unknown: Cas Enzyme sequence
MSTIESSIKGEPYVLGLDIGINSIGWAAVKLTKGKETGLLKVGVRIFPQGMEGDIEKGRDASRALPRREARMHRRILDRRRRRLIRLAHLLQKLNILPAGDLLPDLKRQEYLRNLDTSLIKEHELAEYPHTWLYKLRALALDQQLPLKAIGRIFCHLAQRRGFKSGRREAAEKQDEKGEIKKSIGVLGKEIESAGARTLGEYFASLDPSLARIRGRYTSRQMYLAEFGQIWISQNRFYPDLLTPETKRMIEKAIFYQRPLKSSRRLIGNCELEHGEPRYPMSCLATQRFRMLQKVNDLRIIIRSTGEIRALLEEERKTLLAELEHESSLSFAKIRKLLSLNRLDTFNFAMDDDERGLIGNKTNALILPVLGASWETWSDEDRNALVDEMRLTMKEEVFVRRTSARWKLHHHIAQEIWNASMKMEDSHCALSRKAIEKVLPLLEKGESFATARKAAYGESRISKPVDYLPPVDMQEVFFVRNPAVHRALTQLSKVVNAVIRSYGKPEVIRVELARDLRRSRGERQDISREQGLRGKAREKARQNLIDNGISNPKGTDIEKWLLAEECRWECPYTGKTISPKLLIGPHQQFDVEHIIPWHRSLDNSFLNKILCAAEENRNRKQGRTPWEAYGSDTERWKEILLRVSNLQGDAREAKLRRFQMESTEDLEDFTHRHLNDTRYASLLAMEYLGFLYGADKQGVDASRNRRIQAGRGTMTKFIRDELELNAILGEGYQKNRGDHRQHAVDAVAIALTSSAMIKRLSVAAQNAYKLGHRRFDSLEPPWPTFQENVREGIAALLVSHQPQRKVQGALHDATFLSLPTRAKVRVRKPLASMTIKEVDKIVDPKIKEIVKKALDGRDPGKAFAEGQPFPMLKTKDGRKIPIKKARIYKSDKIVEIGDGHRKRFAVSGGNHHIEIIERHDHPKHPWEGRMVNLLDATRRVQAGLPVVKREHGTGTRFVMSLCAQDIIELDSEKGTRELYLIRSTQQMTTNPNPEIKIVPITDARLKADQVQDRSLVLKSMKSLKELGCKKVTITPLGEIRRAND

SEQ ID NO: 1122 - protein, 1063 aa, unidentified
  REGION 1..1063: note = Description of Unknown: Cas Enzyme sequence
MANTQPAKTVLGLDLGVASCGWALLSLNARNKPSGILRTGARVFEAGVEGDVQSGKDSSRAAARRGARLIRRQTERRARRSAKLFRILQEAGMLPDEEAVAGDGRDNIIKTLDKELATGLGLNGKRRTAHLLPYILRAKALDEKLAPHALGRALYHLSQRRGFKSNRKTPPKDDEDQGVVKGGIAELEGKMSAASARTLGEYFAGLDPEEERIRGRYTSRDMYEKEFEAIWTAQVEHHRAVMTDKLKRRVRSAIFHQRPLKSAKHLIGECDLERGERRAPLALLLSQRFRMLQKVNDLEIIHGETGEVYRLTNPAHREERERLVRALDTEGDLTFARIRELLNLPSRNTKKTKKSVFNLEEGGETKLVGNRTAAKLRKVFGGERWDAMPGEERDAVVDDMRTVREDNVLAIRAMTRWNLKPDAAKALAEVSLEEGYLFLSKKALARLLPELEKGVQYATARRELYPESFEKTAPLDLLPPLARTAVGKQVRNPAVFRTLTEMRKVVNSVIREHGKPDVIRVELARDLKRPRKAREEIWKRNRANQRSRDAARAKIVKEAKRWVKEPTRTDILKVQLAEECGWVCPYTGGSISMKSLFGPSPRYDIEHIIPLSRSLDDSYLNKTLCETEENRKVKRNRTPHEVYSGNREKWEAILGRIRAWPGSKKKDGKRAAQAKLRRFMLDREGVELAFRGFANRQLTDTAYASKLAREYLGLLYGGMADADGRLRVQVGAGQVTADIRNELCLNGILGDGPRKTRDDHRHHAVDAVAIALTEPGTVKKLSDAAKRARQEKRRRYASMRAPWPDFVDSVRVAVGRIVVSHRVNRKVSGALHEETIYSKPLEDPHGRVYYRARKKLGDNFTMKDVEKIIDPAVRGRVREHLKKHGNDPKKAFSDEKKMPYMKARDGRRIPIRKVRIEKPVKPVAVGSGHRARRVEPGSNHHVEIVEVKDAKGRIKWDGEVVTLLEAARRKRAGEPVVKRDHGEGKCFLFSISKKDCLIIDTDGPRRVYVVDKITPGKITITSLNDARLKAHAERFGRSPDKLRQLNCRKVSVDPIGNVRPAND

SEQ ID NO: 1123 - protein, 1044 aa, unidentified
  REGION 1..1044: note = Description of Unknown: Cas Enzyme sequence
MTNEKASDVILGLDLGSNSIGWALIAGNTNARHRMLASGVRVFEAGVEGDFASGRGEPRGKARREARQHRRMLERRKRRLRKLLNILTGAGLLSSGPAKDTISELDKTLYARHIDSLSVAKPEKKRASQVLPYILRAKALDEKLEPFEIGRALYHLAQRRGFLSNRKVPQSDKKEAGAVKKGIEELRDNMTQTGARTLGEYFASLNPHEQRIRGRWTARAMFENEFECIWSAQQEYYPELLTDELKQRINHAMFHQRPLKNQADLIGTCELEAGHKRTPWALLAAQRFRLVQQVNNTRLITPDGEDVQLTADQRQTLLDLLENQGEMTFGKARKKLGLSSAYHFSWEAGGEKRFLGNRTNAKLAATFGDRWKGLSTGDRRRIVEDILSIQNNDALARRAVCVWGLDEDVARKLARVELEPRYCRLSRKALCKLLPLLESGLSYAEAVKEAYGEFHRKGGVVDCLPSVSRVLPQLRNPVVNRVLTELRKVVNAIIQRHGKPGLIRLELARDMRKSPKQRQQATQRNRRNEKDRAAAAQKITTEASIEHPSRDDIEKVLLANECNWECPYTGRRMSMASLLGANPQFDVEHIIPFSRCLNNSFINKTLCYHEENRNVKRNRTPFEAYGADPERWDEITERVKGFTGTAAREKLRRFLIQETEGLEGFIDQQLNDTRYATREAIKYLGLLYGGTVDHEGRLRVQATRGATTAYLRDAWDLNRILGDGGTKSRHDHRHHAVDAIVIALTKPNAIRQLSHAARRELTGRVKFDDVKPPWDGFVDHVRQSVNAINVSRRACRKVNGPLHEETFYGPVEPDEDGNPTAFHVRKPLAALSAKEATGIVDPKVRQVVLDALNERGGSPKTAFAKPEQHPYIETRDGRRIPIHRVRIRTSVAAFQVGKDPRTRFVLSKTNHHAEIFELLDKKGQKKWVARIVSRYQAMRRLVKGEQVVKCEHDGGGRFVFSLAPGETIEIDEQDGKRALFIVRVVSQKKTGGVEFECVHVNDARKKADIRANHASLRKTPNKLAELNCRKVTVHPLGEVRWAND

SEQ ID NO: 1124 - protein, 1063 aa, unidentified
  REGION 1..1063: note = Description of Unknown: Cas Enzyme sequence
MGNSHEDAPLILGLDVGANSVGWALLSAAKQPREKRLVPTGLVACGVRVFEAGVEGNLESGRDDGRDDPRGVTRRQARAMRRLLDRRARRCDKLFRLLQGAGLLPPGGPPQASSPPDTATRRRLRAARAKARDELLNKLDSQLRKGLSAKLRAEGVEEGILERLPQTLPYLLRARALDHPLEPYELGRALYHLGQRRGFLSSRKAPVKDKKEESVVKEGIARIREEMREAGARTLGEYFAGIDPEDRRIRGRWTARDMYEDEFERIWSAQGRHHPNILTPQLKERIHRAIFFQRPLKIRKEFVGACAHEPKRKRAPIALLEAQRFRLLEQVNNTRVQMPDGTVVPLSPDQRTKLIEALETKGDLTFSRAKKLLGLHPHAQFNFERGEEKRFVGNRTAAALAKVCGDRWTELPPDDKKRLVEDLRSIQKPETLARRAQRVWGLDPDQAARLAELRLEDGYCRLSREAIAKLLPLMEEGLTYQEAVGKVYGHAAPTTTVPLLPPVAEALPELRNPAVSRALTELRKVVNAIIREYGRPAIVRVELARDLRRSRKQRARAARKMARYRKQREDAERRLRELGVQNPTRADIDKVLLWDECGGICPYTGKSISFASLFGPQPQFDVEHIIPRSRSLDNSFFNKTLCEINENRTRKRNRTPREAYASDPDRWNEIIQRVKKFQGDAAREKLRRFQEEPDFDDFVARQLNDTRNASRLATKYLALLYGPETRSRVQVTRGGVTRFLRDVWGLNSILGDGPSKSREDHRHHAVDAIAIALTERATIKMLSEAAEKAWPDFLDEVRAAVRDVNVSHRVSRKISGPLHEETFYSPGHTDPDGNPCVHVRKPLADLSKEEVEQIVDPAVREAVEAKLAQLGTRNPRQAFADPANHPFLRRRKGTPTQIHRVRIRKRLATFPVGTGHRQRHVVSKLNHHVEIVETRDEKGNPRWEGHLVSLFEAYQRHYKEGLPVVRRDHGPDKKFLFSLAPSESVLMVDEDGKKALFKLTGISQSAQGRIRFEFRRNADARPLTVLRRTRGGRVFRTPETLRKTQAEKVLVDPLGRLRRVGRD

SEQ ID NO: 1125 - protein, 1087 aa, unidentified
  REGION 1..1087: note = Description of Unknown: Cas Enzyme sequence
MASNKVDGLVLGLDLGVTSVGWALVRYSGGEPVKIEKTGVRIFDAGVDGDFESGRSQGPAVDRRRARLMRRMLERGARRHKKLFNALVGAGLLPAGDVGTVIRGIDKEILSRASAEERDELAHVLPYKLRARALDERLSLHEIGRAIYHLGQRRGYQSNRKSEATEEVEEKPGKARKKGSDADSQAGGGEKTTGQVLKEIGDLEDEMKREEALTGRRPTLGQLFARLDPRERRIRGKHTSRPMYKDEFERIWAKQRECYPDILTDRLRRRVFGAIFHQRRMKSTRHLIGKCQFEKGRTRASMAFPISQRYRLISQVNNIRVKKPGEGAGKSLDPEQRQFLIDELEKTHHMTFEDARKRLKLAKGCKINLEGPAEEEGRLLGNETNANLAAIFTEQSTTTGQGWWAVSEETRERIVADLMSVEKKETLTSRGMTAWNLKPKTAEEFAKCRLSGKYSNLSRKAMRRLMPLLEEGLTVAEAVMAIPEYAKRQTTEPVERLPRVSSALGDLRNPAVNRILSETRKVVNAIVAAWGKPAAIRIELARDLRRSKKDRKRVWDNQQKNKRKNDEARKALKDMGLDPEKDHNLLKWHLWQECNKQCPYSYPARMISCEALFGPNAQVHIEHIIPFSRCLDNSFMNKTLCYAEENQRKHSMTPHEAYAGLPQYDEILMRVRNFGTAVKEYDRRAREEKLRRFQMDSSDNLSALREEEWADSSMLNDTRYATKLAAEYLGLLYGGTVDANGTRRVQASRGGVTGFLRNEWRLNEILGDGGEKNRDDHRNHAVDAIVVAVTDARMMHLLSAAAVAAAQRRSRRLFEGMEEPFGGFLDEARGSIERVKVSHRQCRKVNGPLHKASHYGPSKAKDAKGTPVYYHIRKALVKLGKEDVIVDERIRAIVADKLAGRPAKVVFKDRSNHPCLPARDGRQIPIHNVRVKVAGRFIQVGRGAKERHVLSESNHHIEIVALTDAAGGIKELRGYVVSRYEAMMRLARKQPVVLQEHAPGEEWQFSLSNGDMLEADWEGERKLLVVRGISGDGAADIDLECVEHVDARKAKDRKAERIRYRNYKKLKGAKPRKVIVTPLGEVRTAND

SEQ ID NO: 1126 - protein, 1022 aa, unidentified
  REGION 1..1022: note = Description of Unknown: Cas Enzyme sequence
SNRKVNKPDEQKPEGEATEPKRPARGKAADPDAPAKEKRVGMLDQIRSLRAEIGEGRTLGQHLAVQTPTAWDVPIQGATPRSFRIRSRFTAREMYLQEFDAIWAAQAPHHPTVLTDALREEIRNVIFTQLPLQSQRHLIGRCELEPNEKRVERGTIEFQQLRLLQRLNDLRVLLSPLETRSLFPEERTKILNALEDTRGKAKLSKSEVCALLGSNFKSRKGSFPTINFGDDAAGKGEAKALQGNDTVNLMRGIFDGKRGPAWDQLTPAEQEERVDCLISDEISDEELFRLAQDQFGLKKEAAEEYAQTSLDDKFCSFSRKALRRLLPHLEAGVPLSTAIKLEYGERAERLPILPLLPPLIPSKPPRWDSHPALREQWQANAPAYPDYVPPELRNPVVQRALTELRKVVNAIIRRHGKPAEIVIEYARDMKQPLKQRLQAQERNEEARKRREKAYQTIAESFGMHLNPEDARDRALVDKWLLAEDQDFICPYTGRKAQGAEALSSAFEIDHIIPRSRWPNNEWRNKVFCATEANRRKGNLAPSEAFSGEEWEQVQQRVNSWLTIKRNAPRFKAFEAKIKLFLTPQDQLQEIIDSWTNRQLVDTAYASRMARWYLGHLYGCLGSTGDLPPDQSTGKGRKVIRVLQGGVTAEMRNALHMNAILSKSDEKTREDHRHHAVDAIVIALTSQATVNLLNRLNGLPRQDKDARDAVRQALTEKFGDFTEQARSVIGQVIVSHRPDRSVSQALHKESIYSLRDAQGRRPRSAAEASDTSRFCYIASRTKVTSLNSLDKVLNKGTRRAIEKVLTERLGISLDDSAAVKKGLQKLTGPLTPVLESAKTKELIPIKSVVTLEKGSVQPIGKGHRLRYMATDPNHHLEIFEIVEGPDKGNWTGRMVKVIDAYARINERKGRGRKSALFVENKPHLWPAGTRLVCELCKGDTVLLMINGERRPYRVRKFSLTSPKRPDIVFDLVNDGRREKDRDDTKVRLTSWDAVKAANPGRVQITPDGLLNSLPGQEEAGQHA

SEQ ID NO: 1127 - protein, 1067 aa, unidentified
  REGION 1..1067: note = Description of Unknown: Cas Enzyme sequence
MGEKERREYVLGLDIGATSVGWAAIESRNDEFTGLLASGVRIFEAGVEGTLDTIESGKDDSRAKGRREKRSSRRRQDRLARRLVRLFGILREAGLFPTYDIPQDASSPKPGGQRKAAERDYTLKRLRADLLSAWDMRLRAAGANDDSREIRLLPDLLPYLIRSRAVSARIEKEEIALAIYHIAHRRGFLSNRKELPKDDKEKKDEGKVKESIGELRKLMQEAGTPFLSQYFTTLNPHEARVRSRYTARAMYEEEFDAIWKEQEKHYPGVLTPALRKKVHNAIFFQRPLKSAAGLIGQCELEQGHRRAPMALPECQRFRYLQKINDLDISHPDGTRTRPTPEEREKLVAELEHSDSVTFAKMRKILGISRLCEFNLERGGDKSLKGNTTSAKMRNIFGARWDSFSIEEQHKVIEDINSIQKPATLKSRGMRVWGLKEEQAQEFSEIILEPDYCNLSLRAIRKLLPSLEEGTPYKTAEKAVYGDRPTGIIVDVLPPVRKQLKELRNPAVERALTELRKVVNAVVRRYGKPAAIRIELARHLKRPRKARVEITKKIRRNEAFRKTAAEKIAKEVGITNPSRSDIEKVLLWQECGGVCPYTGKSISIRALFGHHPQFDVEHIIPRSRSFDNSFLNKTLCDAAENRKKRARTPWEAYGSDEKRWGDILDRVARFDTDSDTRTRKLELFRVKDLQDISDFASSQLNDTAYASREACRYLGMLYGGVTGTGRRTVQATQGRATALLRATWKLNDIIGGGEKTRDDHRHHAIDAIVVALTAPGMIQKLSRAVQQSEEKLQRAVEAMNPPWEGFFDDAKRVIEGMAASHRVNRKVNGPLHEETVYAKRLDENGKECFHVRKPVYRLSPNEVEQIADPVVRERVKARIAEVGDIKALEKAENLPFMQARDGRRIPIKSVRVRVSANPRPIGSGADTRYVKPGSNHHVEIVETTDKRGRKKWEGFVVTSLDAMTRLRNKEPIVKKDHGPGKDFVFSLAGGETIQHDTDDGPQLFRIRTVSQTNKGYPRIDYVRINDARLKKEIMASGDWFIGFFESLRELNCRKVVILPTGEIRTAND

SEQ ID NO: 1128 - protein, 1031 aa, unidentified
  REGION 1..1031: note = Description of Unknown: Cas Enzyme sequence
MTEKTADVKKNSFILGIDLGTNSLGWCLVAVERDPEGRWVPRRIERMGVRIFEAGMDNLEEGGRGESRALARRTARLARRRLERLKRRLRKVRNLLVRAGLLPADFPAGPLGAADPYKLRAKALDEPLEPYELGRVFYHLAQRRGFKSNRKADTTDKEAGTVDKNIGELESAIRQAGCRTLGEYLSKLDPHQQRLRGRYTSRAMYEDEFEKIVSAQAPHHPVLTDDFRRALRRAIFFQRPLKSARGLIGRCALEPRCRRAAVAGLLFQRYRILQQVNDTQITLPCGTRRPLTPDERFKLIKALEDSKKLSFAKAKKIMGLPAGTTLNYEAGGREEYPGDETSYELRKIFGARWDAMPPSERDEVVHDLLSIDFKKALERRGRDRWGLGAEEAQKFANISLTPGYSSLSSKAMRKLLPLMEQGMPAGRAREQLYPRSVVKPVDALPPVEDPRNPVVRRALTELRKVVNAVVRNYGLPEQIRVELARDVKKNSKQREKIAKADRAREKVRREAAEKIISETTIRQPRPADKDKVLLADECGWQCPYTGKGFGWEHLFGPHPQVDIEHIIPFDRSLDDSLANKTLCFAEENRNVKRGRTPAEAYAADPERWKAILDRVRAFKSRDRNEKLFRFQLQGAELDEWLHSFRERQLNDTAYAAKLAASYLGRLYGGEVDAQGVRRVRVSSGRLTGWLRNEWGLNAVLGDGPEKSRDDHRHHAVDALAIALTDERMVRALAEAASRASGEGRRRFGRVPEPWPDFLKEVRARVAEIIVSPRVDRRVNGALHEESLYSPRIRHADGREYVHIRKRLDTLTKQEVEAIVDPAVREAVERRLREVGETEPRKAFSRPENLPVLRARDGRQTIIRKARIRKPEVPIVIGQGSTRRYVLSEHNHHVEIFEEKTRSGRIQWKGRVVSLLEARRRLLSGGPVVDQVWEGRRFVFSLAPGEVVALSADGGERRLYRCRSVSISATGRIELAFSLLHDARLKKEIVRAGALERMSPEGLRKRAVMDPETGRGPKYVVTPLGELRSAND

SEQ ID NO: 1129 - protein, 1053 aa, unidentified
  REGION 1..1053: note = Description of Unknown: Cas Enzyme sequence
MGTMSERMPAAPYILGLDIGTNSVGWALVNVDGTGHPTGALAAGVRVFPVPVTGDISSGLDKPRGAERRAARLRRRMLARRRQRLNKLAHLLQGAGLLPPGALDTPQDHLAFFADLDARLFSAQERKEAPHVLTYRLRARALDEPLSPHALGRALYHLAQRRGFLSNRRQEPKEGDEEGKVKKGISRTHDAMHAAGARTLGEYLASLDPTQERIRQRYTDRKMYQDEFAAIWAAQQPHHPHLLTEDLRKRVSRAIFFQRPLKYPRNRIGQCDLEPRCKRAPLALLAAQRFRLLQKVNDLQVITPDGEICALTTEERAKLVHALDTQGDLTWPKVRHLLGMTKEHRFNHEQADDRLIGNRTNARLVEVFGDRWWALSPAEREAVVDDVRSIEKPETIRARAMRRWGLDQAAAQALADVRLEEGYCSLSRRALAKVLPLLEEGLSYATARKRLYGEPRNLEPKDSLPPVLQAVSVRNPTVQRALTESRRVVNALVRRYGKPVRIRVELARDLKKNRKDRQAIHTRNRENYRRRETALRQILSGTDILRPKPADIEKWLLAEECRWRCPYTGKPISKPALFGPAPQFEVEHIIPRQRSFDNSFMNKTLCEHEENRTRKRNHTPWEAYGGDPQRWEEIITRVKSFTGSAARAKREQFMTGAPGGRDLLSLDDFATRQLNDTRYASRLAVEYLGALYGAGADALDAQGTRRLQASRGQITYDLRSAWGLNNILGGGDKTRDDHRQHAIDALVVALTDPATVKAFSTAASRAPGRARPELPPPWPGFLDEVRALVGRLHASHRAARKVAAAIHEETIYSKPLAGASGKPYSHVRKPLERLSPNEVKRIVDPKVRDLVERRLQDLGEDNPAKAFADGANLPALPAPTGRMVPIRKVRISVSGAVFPIAHGARQRHVKLGSNHHMEVMRTTDKRGEERWHGVVVTTYEAMRRLRTGNRRVINPAGDPAFLFSLCQGEVVELDDGPQGGRALFVVKKITVRGEGETARSTVGIVPLNDARMSTPRGGGEIRELREPSAEVLRRLHCRKVVVTPLGEVRRAGD

SEQ ID NO: 1130 - protein, 1029 aa, unidentified
  REGION 1..1029: note = Description of Unknown: Cas Enzyme sequence
MSNENLKKKVVLGLDVGSSSLGWVLMNEEEVLDIGSRIFEAGMDGNIEKGTDESYNVQRRDARLTRRRLQRRTRRLIKLALYLQRVDLLPESNIEDSKIRHEFFNTLDRSLSEKYNMPHALPYLLRAKALDEKLTQHELGRVLYHICQRRGFLSNRKSPIKDKEEHGKVKDGIKSLREKLSENDSKTLGEYFSKFDPDDRIRTQYTARDMYDDEFNLIWDKQAEFYPDILTDDFKDKIYHVIFDQRPIKFKKSTIGMCELEKTKRRAPALLLDAQRFRLIHMINGTKIYVDNVERELTDEERETLINKLETEGDLAFTKAKKLLGLKMKKDKFNWEGGPEKRFIGNRTSAALIEIFGEEKWNLLSKVMKDQVVEDIHSIQKNETLLKRGLNKWELSEEKAIELSEIALEPEYLKLSRAAIAKLLPRMEKGEHYSTLVKEFYGDTKDVEEHDILPPLFQVEKYISNPAVIRSLTELRKVVNTVIREHGKPDEIHIEFARELKQGKKSRQAVTKRISENEQSRSKAAKRIIDELKIQNPTRTDILKVQLAEECNWECPYTGRTFSIGDLFKPTPQFDIEHIIPFSRCLDNSYLNKTLCWSEENKNVKRNMTPFEAYSNTDKWDEIIQRVKRFKGDVARFKLARFMMDSKGVKEKFEDFSARQLNDTSYVAKLSQQYLRLLYGNEWRKHIVPTSGGVTSFLRNVWGLNSILQDGGPKKERTDHRHHAVDAVVIAMTNRRTLQMLAYANSRRIKPERLFNDKEIKPPWETFWDDVKEAIDGIVVSHRVSNKVSGQLHEETFYGLGPDEDGDGKPDYYTITRPLTALKKTEVDKIVDPYIRQLVKDKLGDDDPKNVFQEKENRPFIIKPDDTVVFVNKVKVKVRVTPFQLVEGEDSRYVTPKSNHHAEVIEYTDKKGRTKWDFVVVSMLEACLRKKDKLPVINRDYGEGKKFLFSLAPGDIIELDNDKGGRSLYRIRTVPMSKQLSYVSINNAMKQKDAKEAKRWYSKKPDKLREANCQKVTVNVIGRVRRAND

SEQ ID NO: 1131 - protein, 1077 aa, unidentified
  REGION 1..1077: note = Description of Unknown: Cas Enzyme sequence
MENEKVFGFDMGANSIGWCVQIIGEDGFTLEILGMGSRIFENSRDPKTRVPLSVERRMAHAMSVRRGRQIMRTRNLCSILRKYGLLPSGENVSVSERNPYKLRAKAVSEKVDMFGIGRAILHMNKRRGFKSNRKADKKSDGAESRGMKLGISKLREAMGDRTLGEFLYERKKSGMGTRMRADAIRGKNEYEIYADRGMYESELRRIWDCQRKYHRNLTDEMLNEISGALFFQRPLKSPERGFCRFEPGERRAYKAYPVSQKFRILQEVNALEILDIAGNGEGITLSMRQKLARALLENDRKIVNKKGIATFAKIKKFLGIPQSLNFNFESESRKGFDGDSTAAVMGSAECFGDAWADMDDCLREKIVDLILADKEGEFAALCAEKFGFGAEKSCAILDAGGELKDGTVSLSAKAMRKILPHLEGGALYHAACAEAGYDFTADYDGERSDLLPYYGKILRTSVLGGNPNFDPEKQPEKYYGKINNPTVHVALNQLRKVYNKLVAVYGRPDMVAVETARELPLGAKGLGELLSEQGKNRGKNLEIAEELKKFGAANNYRNRMKYKLWEDLNPDCIKRAYPFCGRPIELQKLFTPEFEIEHLLPFSETFDDTRANKVVSCASCNRILKGNRSPYDAFANRAGYDWNGILSRVSDMPKSKQWRFRPDAWEIFEEKYGDYIARMLNDTRYMSKLAREYLTSVIEPEKILTVTGSATSMLRAKWGLDAILDDSSPLQFGGESESSAVKAPKAPVKNREDHRHHAIDAFVISSLNRKLISAISQCAKRAEQAHLENLFKAIPRAYERISYEKLEAAVKSINVSHKLDRGDAKGALKRGGTVAKLHKETAYGMIGSPYGGKATLAKRVPILSVECDEGQISEIANAKIRADLSRFCEQVYREAATKEEKKSMWARLLGEYCASNKIRRVRIHLPNRELKKLIPISDKKGKVYKYMENAESYCIDIYKPRNSEKWKFEVINMFAAHKNEMPQWRKDDSRAKLVMRLFKRDTIAYEENGEYRLAVVAGMATHGQISLLPLNVAKVEGNPPKKTPSVLQKLNARKVYVDEIGRVFDPYKRENERMQSC

SEQ ID NO: 1132 - protein, 1035 aa, unidentified
  REGION 1..1035: note = Description of Unknown: Cas Enzyme sequence
MDKTNYVLNKKPELATNDKFLTGLVFGFDVGTGSIGYAVRQGREFKDVGVLICDSEGSDLSKRRDLRRQRRTLRSKKFRRQLFAKELAQLGLPKSEAALDDPISLRLRALNGEVLKPEELHAALTHLFKRRGYSKVPWANVEKAVKEIAKPKKDDEEGVIKEKVKEIKAELGDRHPCQLLAERRTEVGKSPTENWARKIYWPREVLRDEFLAIAEAQKKNFPKLAEKADWLLYGDSQSKEKNGETFHVFFKSTEARNPGVLGLRWPRFDNRGPALDSLQPVDEQGRPLHVVRKNKEAFGNAQWELALMNFRVLDFKTRQKRDPRTDFPIFIENVRNEWNKKGKVTEARLKKLAEPFKDKFLLIEDQKPLAPETGAGRARYSSPTLELIRKEIGEGRRVDPPQPILRRQGENAEQSLNRYLADIKHPVVRHRLALFRGILTRLVKDYGQPDMIVLEAVRSLALSPKAKNELNKRNEQFRKERELARGDLSAVGKSTSRKAITRYRLWKEAQSTCPFCGEKITQEQIHNGLADIEHLVPRAIVDCNELYNLTVAHIECNRELKKERTPFEAFANTPDWPKLKANAERCFNGRKLEIFLSPDAEQLIEQKSDLQHTAYIARVIRHISLIQLGWLNDAGRDPTPEKQNPALSFQVTNGQLTSRLRKAWGLNQILHPLPPGKRWDELTDEEQAQFTEKNRGDLRHHSLDAMVIACTLPWLAHRTHGATDEFGHHGWWTQDEKQRSKAVNPLFPKDGEMHDVVKKEIEKVVVRHHVSRSNHKRTYDTTIYGRKSPNVYVAREKLTELKQKDFDGVYPKIFGVYIAAAWERFTAETPGLPEMLKATKNKLPELFARKLCFSHFQNWREKKPITFDWPDKVRIPIRSVKYIGVHDDKAVAKASSGTHGYVARGGYKEVRIHKTTDGKGWVPVFVPYWKGDRLIHEQPFQAEKPVQTIRLGDLIELKNGYGLNNPPGTYRVVSTMQKQIQLMPPNIADTKEALKASGYLENGINLRWPAFFKAAGYELPHPPSVKPQSESPHQA

SEQ ID NO: 1133 - protein, 1194 aa, unidentified
  REGION 1..1194: note = Description of Unknown: Cas Enzyme sequence
MASKQNNLGALTFGLDIGIASVGWAVLGENRIINLGVRCFDKAETAKEGESLNLARRTARLLRRRLRRRAWRLTKLARLLKREGLIADANLFKYKIEKSTPVPKSSWQLRVDALDRQSSAEEWARVIYHLCKHRGFHWISRAEEKAAEGDSKSEGGKVKQGLAGTKNRMQEKSYRTAAEMVLAEFPKAQRNKQGDYSKALSRILLGEELKKLFEHQRNLGNAFATKKLEAKILGNGDKKSGLFWAQNPALAGSDLLKMLGHCTFEKSEYRAPKASFTAERHVWLTRLKNLRIVVDGTTRPLNEAERKIVLPLPYEYDTDFTFKRLRMALVKAGLTNDFKFSGLAYPSEKQKSEEKAKDPEDEKLTKLTGWHDLRKALKADGLQDEWKALSADALEGKPQPLDEIARVLTVFKEDEEVKRELNKINLPNKAKMVEALLSVRFDKFSNLSLKALYNILPHMVSGLRYDEACINAGYHHSQLHEVGGGEHKYLPPFYAGRSKDGRLKFNEEMNIPRNPVVLRALNQARKVVNALIKEYGSPYEVHTEMARDLTKPLIGHFDSKGNKIMGRKDIESEQKKNRERNDEDWQEFVANAASLGLRDVPSREKHGRDFTKWQLYREQHSKCAYSLKPFEIHRLLERGYVEIDHPLTRSRSFDFTKENQDKGNKTAYEYLTSFTGGEDGERWRQFKAFVESNKLYRQAKRNRLLRKDFGEKESKEFRERNLNDTRYICKFFKNYVEQYLQLHEDSEAKRCVVLSGQMTSFLRARWGLVKARGDSDRHHALDAAVVAACSHGMVKRLSDYSRRKELEQVRTGFVDVDTGEIVNPAMFQQVQEHFPNPWPHFRDEVKLRLSIDDPALLRNEMEKFGTYSPDALEALHPLFVSRAPQRRNGGAAHMDTIYTKPRDGHVLMVEDKKAKKIAKDNAEIVLRPATTEEKASMAIARIGVTDKDSKGNYKLTLEKLDDIIDPRRNERMIEALRHWIASRDEREKTAKAIEANFGRGKEKRKPTDAENAELERLRALPRKPLQADPDSGPFTGPIIRAVKVNAGKTTGITVRNGIAANETMLRVDVFTKASKFHLVPVYVHHSVAKVLPNKAVVSKKDESQWTVMDDSYAFHLSLYPNDLLQLKIDGESILGYFAGININDGGLKYFPHDQRGADSLKKRGISGAELFTKLNVDVLGNRYPAPPEKRRDLA

SEQ ID NO: 1134 - protein, 1058 aa, unidentified
  REGION 1..1058: note = Description of Unknown: Cas Enzyme sequence
MRSLMSYRLGLDIGSTSIGWCMIRLNKEIPPQPIAIIKMGVRIFPDGRNPKDGSSLAVTRRAARAMRRRRDRLLKRKNRLMSALINLGFFPVDAESRNALTNLDPYVLRRKGLDAALTPPEFARALFHINQRRGFKSNRKTDKGASDTGALKGAIKLVREKLIADGSRTIGEWLAKRHEMKESVRARLRGSGSKAVYDFYIDRAMIEAEFDALWKKQAELQPQIFSEEKRAELKDILLFQRPLRPVKPGRCTLLAHEERAPLALPSTQQFRIFQEVNNLRLLKENLAEQSLTLEQRDLIVDLLNKSKEVTFTAIKKALKLGGTAKFNLEDAKRDKLKGNATSVLLAKKDFLGDAWTQLSLQQQDDLVQRLITEQSESKIISELEKEFSIDEERAERIANAALPDGYGSLCRKALDKVLPELKKAVVTFDKAVIAAGFEHHSAISHSQQTGEVLSALPYYGEALQRHVSFARENPKNDEERYGKIANPTVHIGLNELRKVVNRLLERYGHPTEVIVEVARDLKQSKKVRDEINKDQAERQKQNDQFRAQIKDLLGSEPKPQDIQKMRLWMELNKSDAANRRCPYTGEQISIEMLYSDAVEIEHILPFAITLDDSLNNKTVSLRRANRDKGNKTPYEAFGHSPDGYDFQTILERAKLMPKEKAKRFAEDGYQRWLKEDDGFLARALTDTAYLSRIAKEYLSLICPHNNVRAIPGRMTAMLRGKFGLNALLSGNAEKNRDDHRHHAIDAAVIAITDQGMLGRFAKASADAREAQLNRLIKSMPMPWPSYREQVARSVENVIISFKPDHGYQGALHNDTTYGLRAEGKVIHRVPLDKFSSDKEIEKAEFADSALQAWLLNETQNLSGKEFKEKLMQVTKEFRHRRVRILEKLAVIPLSSVKAGTRHGVNEEGQPANYKGYLGNSNYCIEIVKMESGKWTGEVISTFQAHQIVKTLGEEEGFTKLRNPTKSQSGKELVMRLMIGDMVKMEVVGITQLMRVCAIPQSGQMAFSAHTEANVDARNRDKENSFSYVTKYPGSLQATKARRIAVSPIGEFRDLGFNG

SEQ ID NO: 1135 - protein, 87 aa, unidentified
  REGION 1..87: note = Description of Unknown: Cas Enzyme sequence
MSDKSTEQLTFGFDIGIASVGWCVLGEKHIVDLGVRCFDKAENAKDGESLNLARRSARLMRRRLRRRAWRLVKLTRLLKREGLINSI

SEQ ID NO: 1136 - protein, 1014 aa, unidentified
  REGION 1..1014: note = Description of Unknown: Cas Enzyme sequence
VDGLERKLAPEEWARVLYHLCKHRGFHWISRAEEKNAEADSKGEGGKVKKGLSDTKRRMNEKSYRSAAEMVLKEFPEAQRNKQGEYAKALSRLLLAEELALLFERQRELGNLHATPELEMRIAGCGDRKSGLFWEQKPPLTGEGLLKMLGRCTFEKTEYRAPKASFTAERHVWLTRLNNLRIVVAGNVRPLNEAERRIALPLPYQQASDLTYKQLKNALVKAGLLPENVKFSGLDYPTQQAEDKVKDPESERLVKLPAWQALRKTLKEKGLETEWRGIAGAATGGQPELLDRIAWTLSVFKDGDEIEQELRKLSLPGGEKMVDALSELSFDKFHNLSLKALGKIVPHMEVGLRYDEACAKAGYHHSQLSKTGDGQHKYLPPFYSGRDKGGRMVFDEEKDIPRNPVVLRSLNQARKVLNALVSRYGSPSVVHIEMARDLSRPMDERNKIKKAQEEFRDKNEKAKADFEAKFNMPAKNREVEKYLLYSEQHGKCAYSLKPLDLDRVLHDQGYAEVDHALPWSRSYDDSKNNKVLALTSENRNKGNRTPYEYLTSFAGGENGERWRNFAAFVEGNKSYRLAKRSRLLRKHFGKEESEGFKERNLNDTRYICKFFKNYVECYLKLAEGGDSKRCVVLSGQLTAFLRARWGLHKVRSDNDRHHALDAVVVAACSHSLVKRLSDYSRRKELEQAGNVIDMETGEIRDPELLSKLERHFPKPWEYFREELLLRLNTDDPALLKREAERHGYPSATLENLRPLFVSRAPKRRNSGAAHMETIYSQPERLKSTGSVTQKVSLTSLTLKDIDNLIDPHRNEKLYAAIRTRLEAHNGKGDKAFPSDNPLRKPDRDGNPTGPFVRSVTMLIDKLSGIPVRGGIAKNDTMLRVDVFRHKKDRKYHLVPVYVHHAVAKELPNRAVVAFKDENEWTLIDEENFDFCFSLYPNDLVKISLKKGGILGYYAGCNRATGAIDLWTHDRNRAIGKDGLIQSIGVKTALCVEKFHVDTLGNIYPAPPEERRGLA

SEQ ID NO: 1137 - protein, 1074 aa, unidentified
  REGION 1..1074: note = Description of Unknown: Cas Enzyme sequence
MRRIWGLDIGVTSIGWAVIDYDNARETGQILRMGCRIFPEARDPDGTPLNQHRRQKRMMRRQLRRRRERRRALNEYLAEIGLLPPFCSRNAQGKAAETDSWHLLMRSDPIALRKRGLTEMLTPHELGRALYQLAQRRHFKGRDLDDDEDDHEVEAATTGKDKGKRKGKEAKAEETADTGEQSADEKAAKASRDSTLAALKASGETLGEYLAAKAVAHERQRGTHANRATVLNEFERLWDAQAIHRETLRDPAIRERVQEAIFAQRPVFWRKNTLGTCRFMPGEALCPKGSWLSQQRRMLEKLNNLAIVGGNARPLDKEEREAILAILQTQGSMSWGAVRSALKPIYKARGEAGAERSLKFNLELDEKGTLLGNPLEAKLAGIFGDAWANHPHKQAIRDATHQRLWEADYGVVGTQRVVIHPLFERKQRRAAVAERLMADFGITPEQAAALRDLKLPTGWEPFSIAALEQFMPHLETGVRFGALTNGPEWQAWREKAFPERERPTGEILDRLPSPTRKHPEELKRIASLRNPTVVRVQNELRKVVNNLISLHGKPDLIRVELAREVGKSKRERDEMQIGQRRQEKRRKDARADLESKGIKEPSRGDIEKWLLWKECDGFDPYSGDPISFDALFGTPEFDVEHIWPRSKSFDNSFANKTLCRKSYNIRKGNRTPFDAFGKDPEWEEMKDRVWKLVKNGKMNAGKAKRFCREIPLEDDFTTRQLNDTSFAARQTVAFLKRLWPDVGTEAPVNVQVVTGRVTAQLRRFWGLNHILSDDGEKTRADHRHHAIDALVVACTDPGITQRLSRYWQLRDNGTAQQPQLNPPWPTIRPDAEKAAMDIIISHRVRKKVSGPLHKDTVYGDTKRDITTKTGTYRLFVTRKSVSSLSKGEIEDICDDRVREIVARHVAQRGGDPKKAFPPYPTLGPDGPPIQKVRLTIRQQTNLMAPVSTGYADLGSNHHVAIFRQPDGKAAFEVVSLFEAARRLARREPVVSRKQDNGAIFVMSLAPGDTLEYAGGDKKGYWIVQGAWANGQIVIERANDAAHATTTRPAPGALLKDRVRKISVDPIGRVRPAND

SEQ ID NO: 1138 - protein, 1072 aa, unidentified
  REGION 1..1072: note = Description of Unknown: Cas Enzyme sequence
LERIFGFDIGTTSIGFAVIDHDPDEATGEIRHLGVRIFPEARDAKKGAPLNQKRRNARLRRRQLRRRRERRRLLGDLLSESDLLPAYGSPEWRELMKCDPYQLRKRAFAGELLSPHEFGRAIYHLAKRRHFKGRDIDEISDDAEADAEKDKAAIADEKKAEKARKSTIAALEKEGKTLGAWLSERGPRERKRGEHATRKIVEDEFNKIWNGQKKHLAALRRDGLKEEAIREAIFAQRPTFWRKNTLGECRFAPDAPLCLKGSWLSQQRRMLEKLNNLEFARGKRGPLDAEERGAILARLQTQAAMTWGGVRAALKPLYRDRGEPGAERRLKFNLEEGGEKKLIGNPLEAKLSGIFGSEWAKHPRRQEIRDAVHERLWRADYGEVGERRTDSGRLDAQRVVILSAKKRKANREKVARSFVDDFGATEEQAAVLKDLKLPAGWEPYSSKALRAFLPHLEAGDRFGALVNGPDWEGWRKETFPEMERPTGEALALLPSPANPEERKRVAKLRNPTVARARNELRKVANNLIRAFGKPDLIRVELAREVGLSKRQREERQQGMSRQEGRRGKAKEELEKCGIARPPSRDDIEKWMLWEECGHFCPYTGDPISFAALFHNNEFEVEHIWPLSKSFDNRFWNKTLCRRDVNIEKGNRIPFEYLGGDAERWAELEKRLWKMKAAKGGVGMSPGKIKRFLAREIPEGFTDRQLNDTGYAAREAVAFLKQLWPDRGPDAPVKAQAVSGRVTAHLRRLWGLNNVLAEDGEKTRADHRHHAIDALVVACTHPGMTRKLSRYWQAENRQARKPRLDSPWTTIRAEAEKAVAGIVASHRVRRKVSGPLHREMVWGDSKKVEAGPDGTTYRYFVTRKKVEELSKREVDEIRDEDVREIVRNWVEERGGDPKKAFPPYPPRGRKGPEIRKVRLLKKQQPRLVAHVGTGYADKNENHHMAIYRLPDKKVDFEVVSLFDAARRLSRGEDIVRRKRDDGARLIMSLAPGDFIEFRKGEKKGRWVVHGIASAGRPTLARVNDARPTTTKEAHRLGMDGKRKDFNPRFQGFMKRCPIKLSVDPIGRIRPAKD

SEQ ID NO: 1139 - protein, 1487 aa, unidentified
  REGION 1..1487: note = Description of Unknown: Cas Enzyme sequence
MKSNLSPKNPLTFGFDIGIASVGWCVLGEDHIIDLGVRYFDPGEDNDGKPHNQTRRSKRVARNRLHMRRWRLNQLLRLFCDVGIISRPEPQLLISPPRGKGKPDTSSPWQLRDQGLKRLLEPIEWAHVLYYMVKHRGFEFFRKSEINSPADKDAEADKTEEISETQDAQSEVTTEKDKKKLKAALSDTTTLLEKYRKRTQNPNLTVGALAAWLSKDRYEASEPQPDEDDCKLFRESLRNKGGSYRHSFFRAVLRQELQELFATQTNHGNPYTTLELPADGEYLQRMLGQGNTKLTPEKTIPVGGKSRLVGQTFQQAVFDLFDLQHPPLYGDQIHEMIGECELIEGQPRAPKNAFSSERATWLEKLNQLRIRRNGSEELSPKERECLINLPYEHTKVTLKLVRETLMANTDFPASWQEANFNVARYQAKPANDGAWILIVPRGEEPISLVKWADTEKRKKNLKEVKKQLTGGSMTFTALREQLELDDSDRFVYRIKETRIVSREHEQERIPFSSQGEGILAKGQSYRYICSDGKPKVFSKAAWKAVTTLRTRSTATLADWRTLIASFKGMEGAWQFEHSETKEEAIEVSDELRTVPLQFEDAQAVETDHKLVELKGWHAMRLALAEKFPDRWASLQVAYKEPASTQGLRTAKDIDEIATILTLSQTDHEIEDKLRTLAYSETEIEALQTISFSKFRNIGFEALHKILPHLEEGHIYSKGCSLANLSHSEKNYQRSRYLPPLETFIYQRYRHGKLSGHIEKRYKELLSPVVARSFNQARLVFNSLVAKYGSSTYVHIETARDLARSKKLRDEIRRQQETNGKRLEIIRNDLRNRLGREPNSTQVLKMRLYLEQKGQCLYTGKSLEPLIDSMLNENTNDVEIDHIWPRSKTFDNSLDNRVLVIAGANQDKRNLIPYEFFNGAGGDPRWREFEKRVLDCKGINAEKQRRLLSKTLEDADEFLARNLVDTRYATRMFANMLREGVLFAGGATPEELEAISPDDDGKTRWNRYQRARVRTPQGRLVDFLRGKWGLAHLKDRKKSDLHHALDACIIAACSPAIIQRVNNYFAEEENGHGFKRNSDGTYTNRSTKKNLSKAEARERGLYLPAPWEDFHRDVRNALGKVFISRRPKRKSAGEVHDANPKGIRYLPVPLVELTEEMLTDECLREVGRRRRENYEALRMALQVTNGDAQMAFADGYEIQGKHGKLKRIYSIAMPLWSLPNDYLKQRNKALTIENAKRRKEGDAKLLYENLSKTARKTVPLTSLTQKMLTEGELGSTFYQRNKELIEALKTHLGDKKAKDAFAQPFQPPPGKSGKERPVIRSIRLPDTHGSGVLVRGGITGLGESISTEVWWTGSAYFFRPRYQADKETMFGMEDLPDGAKHIFNLRIDDPIEVVLTNGEIIPGGAFPGYFVVYEGDGRMRIRTHDRPGKTPLKTNQTEENNDDEQSNAVKDTSLRRFNTKDIKKLRKFKVDVLGRYKEVNGGSPHGLA

SEQ ID NO: 1140 - protein, 1169 aa, unidentified
  REGION 1..1169: note = Description of Unknown: Cas Enzyme sequence
MKSNFLSSTRDSLTFGFDIGIASVGWCVLGEQHIVDLGVRCFDKAETAKEGESLNLARRTARLMRRRLRRRAWRLVKLVRLLKREGVIDSIQSLRQPSAKSPWQLRVEGLDRKLAPEEWARVLYHLCKHRGFYWISRAEEKKAEADSAGEGGKVKKGLQDTKRRMNENNYRSAAEMVLKEFPDAQRNKQGEYTKALSRLLLGQELVLLFERQREHGNPHATPDLEMRIAGNGDRKSGLFWEQKPPLSGNDLLKKLGRCTFEKSEYRAPKASFTAERHVWLTRLTNLRVVVDGNARPLNEAERSVALPLPYNQASDLTYKQLKNALIKAGLLPEDVKFSGLTYPTQQTGDKAKDPESERLIKLPAWQALRKTLKDKGLETEWQSIAGAATGGHPEQLDQIAWVLSVYKDGAEVEQELRKLSLPGGEKMIEALSEISFDKFHNLSLKALRKIVPHMETGLRYDEACEKAGYHHSQLFKAGEGQQKYLPPFYSGRDKDGRMVFNDEEDIPRNPVVLRALNQARKVLNALVSRYGSPAAVHIEMARDLSKPLNGHFTENGRYIEGRRDIEKAQKEFQSENQKNKDEFVKLFEFEPKSREFEKYRLYNEQHAQCAYCQQPLAQNGVVHKIFKAGEAEIDHVLPYSRSFDNSKNNRVLVHAECNRNKGNRTPYEYLTSFAGGENGERWRSFAAWVEGNKSYRLAKRSRLLRKNFGEKEAGEFKDRNLNDTRYICKFFKNYVERHLQLAEGSDSQRCVVLSGQLTAFLRARWGLAKVRSDSDRHHALDAAVVAACSHALVKRLSDYSRRKELEQARNVVDAETGEIIDPALLSKLEQHFPKPWEYFREELLLRLNTDDLALLKSRVEHYGYPPEVLENLRPLFVSRAPQRRNSGAAHEETIYAKPRLAHKLKVEEKTKQGESRRAATPQELESMVIERVGVFDTTGQGEKKKYRLTVDRLKDIVDLERNERMVHALHLWLTERGDDLKQPGTKALPRKPQKSDPENGPFTGPEIKTVKMNGGKKSGIPIRGGIAKNDTMLRVDVFRHKTDKKYHLVPVYVHHTVAKEFPNRAVVAFKDESEWTLIDEENFDFCFSLYPNDLVKVSLKNEIRSGYYAGCDRATGAINLWAHDRSQAIGKDGLIRGIGVKTALCIEKFHVDTLGNIYPAPPEKRRGLA

SEQ ID NO: 1141 - protein, 1133 aa, unidentified
  REGION 1..1133: note = Description of Unknown: Cas Enzyme sequence
MAQYIFGLDIGIASVGWAVLDEVRIIDLGVRCFDKAETADKGESLNLVRRDARLMRRRLWRRSARLTQLGRLFKRQGLIGDAQLFKRAPNFLLTASNLQKQVQRSPWQLRVEGLDRLLLPEEWAQVIYHLCKHRGFHWVSKAEQQQAQADDKSEKGKVKKALEQTRLLFTEKGYRTAAEMLLKEFPEAQRNKRGEYKKSLSRVLLDQEMGLLFAAQRGLGNPYAGEAFEAQIRGTGDRKSGLLWQQRPMQNILHMLGKCTFERSEYRAAKASFSAERHVWLTRLNNLRINNKGHIQALDAAQRQAALWLPYLGAEKFTYSHLKDALIKQGLLDKDTRFVGLNYGQDKKEIKKAESEVLVKLQGWHALKKVLLKADQESAWEQISAAAIDGNPTLIDTIAQVLSVYKDDADIEAKLSELPLPGGRNTVDVLLGIRFDKFSNLSLKALQSILPLMAQGMRYDEAAKAIYGDHRQALANTSEKHLLLPPLYENTRHYKSKSDRVGSMRFKDGLDIPRNPVVLRALNQARKVVNALIREYGSPHAVHIEMARDLSRPHQERKDIEKQQHEYKERSNVAKEQFQECFHREATGRELEKYLLYKEQQGKCGYSLQDLDLNRVVNDPSYVEVDHALPYSRSYDDSKTNKILVLKAENQNKGNRTCYEYLSSFPGRENGERWRNFVAFVESNQTYRLTKRNKLLRKNFGKEQSAEFRERNLNDTRYICRFFKNFVENHLQLHEESASKRCVVLNGQLTAFLRARWGFAKVREESDRHHALDAIVIAACSHAMVQRLANYSKRQEVEFLKEGFADPETGEVINVDAARLLEKHFPRPWHHFRDEVLLRLQTNDAEALRQKLATFGTYDEQARQAAKPLFVSRAPKRRGSGAAHKDTVYAKAPSHELPKRVTEKVALSSLTLKDLDRLIDPHRNEKLYAAIKERLEAYAANGGKFDKTGNKAFPVDNPLYKPDQYGQPTGPIVRTVTLYTENMSGLDLRGGLAKNDSMIRVDVFKGKKDGKYHLVPAYVHHLVSGLPNRAIVANKDENEWVEINNDYEFLFALCSNDLVKIQLKKESYIGYFSGCDRATGAINIWAHDRNIAIGKEGLIRGIGVKMAISFEKFHVDVLGRIYPALKEQRRGLA

SEQ ID NO: 1142 - protein, 1116 aa, unidentified
  REGION 1..1116: note = Description of Unknown: Cas Enzyme sequence
MSVKATDSLTIGLDIGIASVGWAVLAPNRIVALGVRAFDKAETAKEGDSLNLVRRMARLMRRRLRRRAWRLKKLARLLKRNGLVDDTQVFQPIHPFSRSLWRLRVEALDRQLSAEEWARVVYHVCKHRGFHWTSRAEEKQAEEDTKGEGGKVKQGLAGTAKLMKEKHYRTAAEMVLAEFPDAQRNKQGDYGKALARTLLGEELALLFERQRKLENPYAGQELEAAILGGGDRKSGLFWAQKPALAGNDLLKMLGKCTFEKTEYRAPKASFTAERHVWLTRLNNLRIVIDGSTRPLNEQERRIALPLPYQQAGDFTYKQLGSALVKAGCVEPDKFKFAGLSYPSEKQKAEDNAKDPEKAALVKLPAWQEIRGTLKKAGLETEWQGMAGAAMDGRPELLDQIAWVLSVFKEDEEVSAELRKLPLPGADKMIDALLTIRFDKFHALSLKALRQIVPQMEAGLRYDEACERAGYHHSQLHKVGEGEEKYLPPFYSGRDRTGRMVFSEDMDIPRNPVVLRALNQARKVVNALVRQYGHPYAVHIEMARDLSKPIDERRRIEKDQAEYRDQNEKDRARFAEHFGQMPKGLEFEKWRLYREQQGKCAYSVEAIDIDRLLEPGYVEVDHALPSSRSFDESKNNKVLVHAKENRDKGNQTPYEYLRGADNSPRWRQFVAFVESTKAYRLAKRSRLLRKVFGVREAEEFRERNLNDTRYICRFFKNYVERYLRLAEGSEAKRCVVVSGMLTSFLRARWGLVKLRSDSDRHHALDAAVVAACSHGMVKRLSDYARCKELDQVREGFVDMETGEIVNPAMYQQLRQHFPDPWPHFRDELEARLKIDDPVELRANLERLGTYSLETLEALRPLFVSRAPQRRNGGAAHKDTIYGQPERLKAQGGVTQKVPLASLSMKDLDSLIDPHRNEKLYAAIRARLEAHGGKGEKAFPPDNPLRKPDRDGKPNGPVVRTVTLVIDKLSGIPVRGGIAKNDSMLRVDVFTKADKFHLVPVYVHHHVKGLPDRAIVAFKAEDEWTLIDDSFDWCFSLYPNDLVRVSQKGKAPILGYYSSCHRGTGNINIWTHDRSQRVGNDGMIEGVGVKTALALEKFHVDVLGNLYPASAEKRHGLA

SEQ ID NO: 1143 - protein, 1129 aa, unidentified
  REGION 1..1129: note = Description of Unknown: Cas Enzyme sequence
MVSSIRGGNMTVKANNPITIGLDIGIASVGWAVLALDRIIDLGVRAFDKAETAKEGDSLNLVRRAARLMRRRLRRRAWRLTKLARLLKREGLIENVHMFRAQLPFHQSLWKLRIDGLDRRLDAEEWARVIYHICKHRGFHWISRAEEKKAEVDSKGEGGKVKQGLAGTAKLMREKGYRTAAEMVLTEFPDAQRNKQGDYGKSLSRVLIAKELAMLFEQQRKLGNTLATEKLQTELLGNDDRKSGLFWAQKPALSGKDLLKMLGHCTFEKAEYRAPKASFTAERHVWLTRLNNLRIVVEGAIRPLNENERRTALSLPYQQAGNFTYKQLRSALVKAGFLPDSFRFMGLRYPSAAQKDESKAKDPETEALAKLPAWQEIRQALKKKGLETEWQSMAGVASAGSPDLLDQIAWVLSVFKEDDEVAIELRKLPLPNAESVIDALLDIRFDKFHALSLKALRQIVPHMEHGLRYDEACEQAGYHHSLVNKIGEGQDKYLPPLYSGRDKDGRMVFNENMDIPRNPVVLRALNQARKVVNALVREYGSPHAVHIEMARDLSKALDERRSIEKEQKEYRDRNDKDKTEFSSQFGIVGNPKGGDFEKWKFYREQQGKCAYSVEAIDLNRLLEPGYVEVDHALPYSRSFDDSKNNKVLVFAKENRDKGNQTPFEYLTRKDGLENGPLWRQFVAFVESNKAYRLAKRSRLLRKDFGGKESGEFRDRNLNDTRYICRFFKNYVEQYLQLAGDSEVKRCVVVSGQLTSLLRARWGLFKMRGDSDRHHALDAAVVAACSHGMVKRMSDYARRKELDQVRKGFVDIETGEVVNPAMYQQLQQHFPDPWPHFRSELEARLKTDDPTALRAQIEPLGTYPPEALEALRPLFVSRAPQRRNGGAAHKDTIYGQRERLQYPGSVTQKMQLTSLTPKDLDQLIDPHRNEKLYAAIRARLEAHGGKGEKAFPPDNPLRKPDHDGNPTGPIVRTVTMVIDKLSGIPVRGGIAKNDAMLRVDVFTKTARFHLVPVYVHHQVKELPNRAIVAFKDEDQWSLIDDSYQFRFSLHPNDLVQVTQKGKKSILGYYASCHRGTGNINIWAHDRSTLTGKNGMIEGIGVKTALALEKFHVDVLGNIYPAPLERRRDLA

SEQ ID NO: 1144 - protein, 1117 aa, unidentified
  REGION 1..1117: note = Description of Unknown: Cas Enzyme sequence
MSVKISGPLTSLTIGLDIGIASVGWAVLAPDRIVALGVRAFDKAETAKEGDSLNLVRRMARLMRRRLHRRAWRLTKLARLLKRQGLIADTQLFQPQHPFSYSLWKLRVEGLDRLLTAEEWARVLYHLCKHRGFHWISRAEEKQVEADSKSEGGKVKQGLAGTAKLMKERGYRSAAEMVLAEFPDAQRNKRGDYSKALSRVLLGKELALLLSRQRELKNPHAGQELETAILGDGDRKSGLFWAQKPALAGKDLLKMLGKCTFEEAEYRAPKASFTAERHVWLTRLNNLRIVVDGSTRPLSPQERSIALPLPYIYASDFTYKQLHAALVKFGLLPESFRFAGLSYPSDAQQAAGKTKDPESAALVKLPAWHEMRSTLKKAGLETEWQGMAGAAIDGRPELLDQIAWVLSVFKEDEEVAVELRKLSLPAVDKMIDALLDIRFDKFHALSLKTLRKIVPHMEAGLRYDEACEKAGYHHSQLYKVGEAEHKYLPPFYSRRDKDGRMVFSEDMDVPRNPVVLRALNQARKVMNALIRQYGAPNSVHIELARDLSKPFDERKKIEKDQAEYREQNEKDRARFAEHFGHLPKGLEFEKWRLYREQQCKCAYSIEPIDLDRLLEPGYVEVDHALPYSRSFDDSKNNKVLALAKENRDKGNRTPYEYLGGAEDTPRWRQFVAFVESSKAYRLAKRSRLLRKDFGEKEAEEFRERNLNDTRYICRFFKNYVERYLKLAEGSDAKRCVVVSGQFTSFLRARWGLIKLRAESDRHHALDAAVIAACSHGMVKRLSDYARRKELDQVREGFPDPTTGEIVNPTMFQQLHQHFPDPWPHFRHELEIRLKIDDPELMRAEITQLGNYPPEALETLRPLFVSRAPQRRNSGAAHKDTIYAQPERLKAQGGVTQKVPLSSLTLKDLDHLIDPHRNEKLYAAIRARLEANGGKGDKAFPATNPLRKPHRDGNPTGPVVRTVTLVIDKLSGIPVRGGISRNDSMLRVDVFTKGGRFHLVPVYVHHRVKGLPNRAIVASKDEGEWTSIDDSFEWKFSLYPNDLMHITLKNEKHFGYYAGCDRSTGTISLWAHDRNQSVGKDGLVRGIGVKTALGIEKSHVDVLGNIYPAPAEKRRGLV

SEQ ID NO: 1145 - protein, 1116 aa, unidentified
  REGION 1..1116: note = Description of Unknown: Cas Enzyme sequence
MSVKATGSLTIGLDIGIASVGWAVLAPDRIVALGVRAFDKAENEKGKPLNLARRMARTTRTRLERRALRLKRLRRLLRDAGLVPSDDRTVFTTPPRLRADPANDPWHLRAEALDRRLTPEEWARVLYHLVKHRGFYSARKSEMAVDADSKDEKTKEKQGLLAGVKRTAQLLGPSEHPRYRTLGELAAKDEAFAPAKRNKAGAYTNSFSRLLLREELRTLFNRQQELGNPKADESLSAQVDELFWHQKPALSGDAMLKLLGRCTFEKDEYRAAKRTWSTERFVWLTRINNLRITHNGERRALSEAERQVAIDLPYVQKTQPISYKHLRKALDKAVGFPDEAGFAGLSYRRDAKKDPEDEKLGECKGWHELRKALERAGLDKSWLRFSQDHALLDAIGTALSIFKTDDELRLELAKLALTDAEMEALLSVSFSDFIQLSIKALHKILPHMEAGKRYDEACEAAGYNHSQPTSGDVRSKLLPPLFREEVRQFGNRKKVVRIPILVKNPVVSRSLNQARKVLNALIREYGSPVAVHIELARDLSKSYEERREIKKGQDRFKDEKVAAVKLFKETFNGREPSARNQDLLKFRLYREQEAQCAYCQKPLEIERLLEIRYVEIDHVLPYSRSFDDTQNNKVLVHDKENREKGGRTPYEYLDGASDSERWHHFEAWVRGHQGLRKAKRERLLRRAFDEREAREFSDRNLTDTRYATRYFSNFTKQNLRFAESAGELPVLTPSGAFTNFLRVHWGLIKSRKQSDLHHALDACVVAAASHKLIKRVSDFHRRDELVQLVDGKFADKVTGEILSTEASVALGLHFPKPWENFRDELLARLSSDPKTESATGAFRQYDAESLAGIKPVWVSRAPKRRNDGALHQETIRSIKPHLGPTTSSKRVALKDLQLFPTKTRKKDQEDAEKVSKKIGELIASIVGANDPRNEKLIATIRMRMLEAKGDGSKAFPDDQPLIKPSSPDRQAPMVRAVKLHSTQNDGVHVRGGAADLGEMLRVEIFNHKNKYLVIPEYAICNEKRIKPAQTPIDADHLFSLAKNDYVRITFGDDIREGYFVMYESDGRLTLRAHDQPQANKTYFRRGITNATKIEKFHVDVLGNLYPARPEKRRGLA

SEQ ID NO: 1146 - protein, 1075 aa, unidentified
  REGION 1..1075: note = Description of Unknown: Cas Enzyme sequence
MEHAHLNFSYTLGLDIGMASVGAAVLACDHIRALHVRTFNAAETAKEGESLNLIRREARLTRRRIRRRAFRLTRLRRLFKRIGLINNLDAQGFTTATSPWTLRAEGLNRRLNPTEWAAAIYHLVKHRGFQSNRKSEVSEDEKAGQMLSGVSANQKRMIANGWRTIGEMAAYDAAFATAKRNKGGAYTHTFARADLESELHQLFAAQRQHANPHTADDFEAAVHELLMARKPTLSGENLLKMVGKCTFEPGEYRAPKASHTAERFVWLTRLNNTRITGMGVTRALSDDERQALINLPFTQTKLTYKQARNAANLAEQERFVGLAYRADKDPESAVLFEAKAFHKLRKAYEDAGLKTEWARDAINPERLDTLAFAQTAYKDDREARECLAQQGVEPAIIEAVLNVSFSDFVRLSLKALRKIIPHMEAGMRYDEAVLAAGYAHHSDLNQADSKTRRIPRISKEDFPNPVVYRALNQARKLVNAIIDEYGAPAAVHIELARDLSKPFDERRDIKKEQDKFRDNKEKNAVKYRELFGQAPKKDQLDKLRLYEEQDGKCAYSLDALDLQRLDEIGYVEIDHALPYSRSFDNGFNNKVLVLTCENRNKGNQTPFEYLGGAHDDPRWHRFETAVRSNKKIRQAKRDRLLRKDFDEKEAISFRERNLTDTRYIARAFKTLVEQHLQLATGLGAKRCVVVSGQLTAFLRARWGLLKVRADGDLHHALDAAVVAACSHSMVKRLSDYSRRKELAEIRTQFVDPVTGEVADIAALRQLEANFPTPWPHFRHELMAWLNPNPALQLEHLPDYPKQYLSFAHPVRVSRAPLRRGTGQAHQETIRSAKQLNEGLSSVKTPLASLKLKDLENIVGFDDPRNEQLINAIRERLQQHGDDGKKAFKDPLYKPSKEGKTAPIVRSVNLATVQKSGLPIRGGIAANGDMLRVDIFTDGKKFYAVPLYVADSVKVLENLPNRAVVAFKPEDEWTVMDEEKGYRFLFSLHPNDWVRVSFKTEAAKEGYFSGLDRATGAISIWVHDRNQAVGKDGLMRGIGIKTALSVQKFHVDLLGRLYPAKPEARQALRRLNKGKG

SEQ ID NO: 1147 - protein, 1120 aa, unidentified
  REGION 1..1120: note = Description of Unknown: Cas Enzyme sequence
MKNFSFDVGMTSLGVAVNKNGKIIHGDVLLIHPEAGSVKAQAERRRLFRTREAHKAREAALESLWQSVGKKPLQRKRFKKTKDANGRKRFVKTAADERLEREFPRKGDNTVYTSCLLRIMLLEGKALDDWQIYKALHAAIQRRGYDSNVPWKTREEKREKSDKDESPEEQVSEFNDKLREMTSDARYHLPAYYDAWKMGLWDAETKKITHIRQPQRSKKKGKDRARGYNPSRELVTSEICRLLDQASEQIPALKEYLTENKRNQLLYGKLHNTGDLHYPSFSKIDGFLGQKYPRFENRIVSKCALITRLNVCKSEKSLAIETGFLLRLVNWRYEREDADEKKSVHSLSGQQISDVFNRCESAWKKKSREYAPEEYAKCFKLTKSRVIKMAERLGGSVKEGHAEIPASVHTGRSRFSQPALYLMKSLILSDKTPKGFGEELSRLVEAMEKENPDAKFGYQIFPDVPYKYIRDDFGFLDKMGDSRDAIYIPDISLAERYGGKDGDADSAVQKVINTCNWPELRHRLGVFDRELGILTEKYGKPDAVHLEFVREDFLNEKRKKEYTARADAGNKAIQAAKEKLKQQNIPINDKNILRCRLYEEQHKQCVYTGDPIDIGQLESYDIDHIFPEEDGGPDAYYNKVLTGANLNRRQKGKRLPCECDFINWPAFGNRVKGLPLGKNKKKLLLASTREEAEELIEKYTGLSGTAHIARLARDIACLRYGWQPGAADRQQRVFVFSGGLTNKVAKKYELYKALGDGSKKYQKDRTDHRHHALDAMVISYLRQWTRDKNKTEFFRFPKGIDADYFRIALSKVYPHYITRVKPAIAEQPKSRSEASKKEFKNISKDPQERGQWYTNKSESGKGTSQHGYIFYTDDKGKVRPKTIHSFRSPYAAVKEVEKKSSEIIGLLYQGKSIFLPSEKQVTGTKLGRNAWLKYGEYKIIKLQKETIILFVEPRPEQTESNGSTSNRYRIARAKLEKIRICNELMHGKSFDLDKFSVSRDQSLTGNYRMGDDRHNMSACIILNTETGEEAEANFFRLVQHLDKNDWGKALKKNDKVAISNIHATYINQVTDDLQPRQKLPKGHYLIKGFSGDKVELAAQEGTVYRIQSNQLKYFDFVRLE

SEQ ID NO: 1148 - protein, 1081 aa, unidentified
  REGION 1..1081: note = Description of Unknown: Cas Enzyme sequence
MAAFKPNPINYILGLDIGIASVGWAMVEIDEEENPIRLIDLGVRVFERAEVPKTGDSLAAARRLARSVRRLTRRRAHRLLRARRLLKREGVLQAADFDENGLIKSLPNTPWQLRAAALDHKLTPLEWSAVLLHLIKHRGYLSQRKNEGETADKELGALLKGVADNAHALQTGDFRTPAELALNKFEKESGHIRNQRGDYSHTFSRKDLQAELNLLFEKQKEFGNPYVSDGLKEGIETLLMTQRPALSGDAVQKMLGHCTFEPAEPKAAKNTYTAERFIWLTKLNNLRILEQGSERPLTATERATLMDEPYRKSKLTYAQARKLLGLEDTTFFKGLRYGKDNAEASTLMEMKAYHTISRALEKEGLKDKKSPLNLSPELQDEIGTAFSLLKTDEDITGRLKDRVQPEILEALLKHISFDKFVQISLKALRRIVPLMEQGKRYDEACAEIYGDHYGKKNTEEEIYLPPIPADEIRNPVVLRALSQARKVINSVVRRYGSPARIHIETAREVGKSFKDRKEIEKRQEENRKDREKAAAKFREYFPNFVGEPKSKDILKLRLYEQQHGKCLYSGKEINLGRLNEKGYVEIDHALPFSRTWDDSFNNKVLVLGSENQNKGNQTPYEYFNGKDNSREWQEFKARVETSRFPRSKKQRILLQKFDEEGFKERNLNDTRYVNRFLCQFVADRMLLTGKGKRRVFASNGQITNLLRGFWGLRKVRAENDRHHALDAVVVACSTVAMQQKITRFVRYKEMNAFDGKTIDKETGEVLHQKTHFPQPWEFFAQEVMIRVFGKPDGNPEFEEADTPEKLRTLLAEKLSSRLEAVHEYVTPLFVSRAPNRKMGGQGHMETVKSAKRLDEGISVLRVPLTQLKLKDLEKMVNREREPKLYEGLKARLEAHKDDPAKAFAEPFYKYDKAGNRTQQVKAVRVEQVQKTGVWVRNHNGIADNATMVRVDVFEKGSKYYLVPIYSWQVAKGILPDRAVVAYADEEDWTVIDESFRFKFVLYPNDVIQVQLKKDSFLGYFSGLDRATGAISLREHDMEKSKGKDGIYRIGVKTALSFQKYQIDELGKEIRLCRLKKRPPVH

SEQ ID NO: 1149 - protein, 1082 aa, unidentified
  REGION 1..1082: note = Description of Unknown: Cas Enzyme sequence
MAAFKPNPINYILGLDIGIASVGWAMVEIDEEENPIRLIDLGVRVFERAEVPKTGDSLAAARRLARSVRRLTRRRAHRLLRARRLLKREGVLQAADFDENGLIKSLPNTPWQLRAAALDRKLTPLEWSAVLLHLIKHRGYLSQRKNEGETADKELGALRAGMKSNTQALKTGNFRTPAELALNKFEKESGHIRNQRGDYSHTFSREDLQAELVLLFEKQKEFGNPHVSDGLKEGIETLLMAQRPALSGDAIQKMLGHCTFEPTEPKAAKNTYTAERFIWLTKLNNLRILEQGSERPLTDTERATLMDEPYRKSKLTYAQVRKLLDLDDTAFFKGLRYGKDNAETSTLMEMKAYHAISRALEKEELKDKKSPLNLSPELQDEIGTAFSLFKTDEDITGSLKDRVQPEILEALLKHISFDKFVQISLKALRRIVPLMEQGKRYDEACAEIYGDHYGKKNTEEEIYLPPIPADEIRNPVVLRALSQARKVINAVVRRYGSPARIHIETAREVGKSFKDRKEIEKRQEENRKDREKAAAKFREYFPNFVGEPKSKDILKLRLYEQQHGKCLYSGKEINLGRLNEKGYVEIDHALPFSRTWDDSFNNKVLVLGSENQNKSNQTPYEYFNGKDNSREWQEFKARVETSRFPRSKKQRILLQKFDEDGFKERNLNDTCYVNRFLCQFITDRMRLTGKGKRRVFASNGQITNLLRGFWGLRKVRAENDRHHALDAVVVACSTVAMQQKITHFVHHKEMNAFDGKTIDKETGEVLHQKTHFPQPWEFFAQEVMLRVFGKPDGKPEFEEADTPEKLRALLAEKLSSRPEAVHEYVTPLFVSRAPNRKMSGQGHMETVKSAKRLNEGISVLRVPLTQLKLKDLEKMVNREREPKLYEALKARLKAHKDDPAKAFAEPFYKYDKAGNRTQQVKAVRIEQVQKTGVWVRNHNGIADNATMVRVDVFEKGGKYYLVPIYSWQVAKGILPDRAVVAYADEEDWTVIDESFRFKFVLYSNDLIKVTAKKNVFFGYFVSLNRATGAIDIRVHDTDNTKGKNGIFQSVGIKTALSFQKYQIDELGKEIRPCRLKKRPPVR

SEQ ID NO: 1150 - protein, 1081 aa, unidentified
  REGION 1..1081: note = Description of Unknown: Cas Enzyme sequence
MAAFKPNPINYILGLDIGIASVGWAMVEIDEEENPIRLIDLGVRVFERAEVPKTGDSLAAARRLARSVRRLTRRRAHRLLRARRLLKREGVLQAADFDENGLIKSLPNTPWQLRAAALDRKLTPLEWSAVLLHLIKHRGYLSQRKNEGETADKELGALRAGMKSNTQALKTGNFRTPAELALNKFEKESGHIRNQRGDYSHTFSREDLQAELVLLFEKQKEFGNPHVSDGLKEGIETLLMAQRPALSGDAIQKMLGHCTFEPTEPKAAKNTYTAERFIWLTKLNNLRILEQGSERPLTDTERTILINQPYKKKLTYAQARKLLGLEDTAFFKGLRYGKDNVETSTLMEMKAYHAISRALEKEELKDKKSPLNLSPELQDEIGTAFSLFKTDEDITGRLKDRVQPEILEALLKHISFDKFVQISLKALRRIVPLMEQGKRYDEACAEIYGDHCGKKNTEEEISLPPIPADEIRNPVVLRALSQARKVINAVVRRYGSPARIHIETAREVGKSFKDRKEIEKRQKENHKDREKAAAKFREYFPNFVGEPKSKDILKLRLYEQQHGKCLYSGKEINLGRLNEKGYVEIDHALPFSRTWDDSFNNKVLVLGSENQNKGNQTPYEYFNGKDNSREWQEFKARVETSRFPRSKKQRILLQKFDEDGFKERNLNDTRYVNRFLCQFVADRMRLTGKGKRRVFASNGQITNLLRGFWGLRKVRAENDRHHALDAVVIACSTVAMQQKITRFVRYKEMNAFDGKTIDKETGEVLHQKTHFPQPWEFFAQEVMIRVFGKPDGKPEFEEADTPEKLRTLLAEKLSSRPEAVHEYVTPLFVSRAPNRKMSGQGHMETVKSAKRLDEGISVLRVPLTQLKLKDLEKMVNREREPKLYEGLKARLEAHKDDPAKAFAEPFYKYDKVGNRTQQVKAVRVEQVQKTGVWVRNHNGIADNATMVRVDVFEKGGKYYLVPIYSWQVAKGILPDRAIIAFKDEEDWQLIDDSFNFKFSLHPNDLIEVITKKARIFGYFASCHRGTGNINIRIHDLDNKVGKNGILEGIGVKTALSFQKYQIDELGKEIRPCRLKKRPSVR

SEQ ID NO: 1151 - protein, 1082 aa, unidentified
  REGION 1..1082: note = Description of Unknown: Cas Enzyme sequence
MAAFKPNPINYILGLDIGISSVGWAMVEIDDAENPIRLIDLGVRVFERAEVPKTGDSLAAARRLARSVRRLTRRRAHRLLRARRLLKREGVLQAADFDENGLIKSLPNIPWQLRAAALDRKLTPLEWSAVLLHLIKHRGYLSQRKNEGETADKELGALLKGVADNAHALQTGDFRTPAELALNKFEKESGHIRNQRGDYSHTFSRKDLQAELVLLFEKQKEFGNPHISDGLKEGIETLLMAQRPALSGDAVQKMLGYCTFEPTEPKAAKNTYTAERFIWLTKLNNLRILEQGSERPLTDTERATLMDEPYRKSKLTYAQARKLLDLDDTAFFKGLRYGKDNTEASTLMEMKAYHAISRALEKEGLKDKKSPLNLSPELQDEIGTAFSLFKTDEDITGRLKDRVQPEILEALLKHINFDKFVQVSLKALRRIVPLMEQGKRYDEACAEIYGDHYGKKNTEEKIYLPPIPADEIHNPVVLRALSQARKVINGVVRRYGSPARIHIETAREVGKSFKDRKEIEKRQEENRKDREKAAAKFREYFPNFVGEPKSKDILKLRLYEQQHGKCLYSGKEINLGRLNEKGYVEIDHALPFSRTWDDSFNNKVLVLGSENQNKGNQTPYEYFNGKDNSREWQEFKARVETSRFPRSKKQRILLQKFDEDGFKERNLNDTRYVNRFLCQFVADHMRLTGKGKRRVFASNGQITNLLRGFWGLRKVRAENDRHHALDAVVVACSTVAMQQKITRFVRYKEMNAFDGKTIDKETGEVLHQKTHFPQPWEFFAQEVMIRVFGKPDGKPEFEEADTPEKLRTLLAEKLSSRPEAVHEYVTPLFVSRAPNWKMSGAHKDTLRSAKRFVKHNEKISVKRVWLTDIKLVDLENMVNYKNGREIELYDALKARLEKYGGNAKQAFDPKDNPFYKKGGQLVKAVRVEKTQESGVLLNKKHAYTIADNGDMVRVDVFCKVDKKGKNQYFIVPIYAWQVAENILPDIDCKGYRIDDSYTFCFSLHKYDLIAFQKDEKSKVEFAYYINCDSSNGRFYLAWHDKGSKEQQFRISTQNLVLMQKYQIDELGKEIRPCRLKKRPPVR

SEQ ID NO: 1152 - protein, 1091 aa, unidentified
  REGION 1..1091: note = Description of Unknown: Cas Enzyme sequence
MTAFKPNPLNYILGLDIGIASVGWTIVEIDDKENPIRLIDLGVRVFERAEVPKTGDSLAAARRSARSIRRLIRRRAHRLLRARRLLKHEDVLKPEDFDENGFIKLLPNTPWQLRAAALDRRLAPLEWAAVLLHLVKHRGYLSQRKNEEQTADKELGALLKGVADNTHALQAGNFRTPAELALNKFEKESGHIRNQRGDYSHTFSRKDLQAELVLLFEKQKKFGNPYVSDDLKNGIENLLMTQRPALSGDAIQKMLGHCTFEPAEPKAAKNTYTAERFIWLAKLNNLRILNQGSERPLTDTERAMLMDEPYKKSKLTYAQVRKLLGLDDTAFFKGLRYGKDNAESATLMEMKAYHAISRALEKEGLKDKKSPLSLSPELQDEIGTAFSLFKTDEDITGRLKGCLQPEILDALLKHISFDKFVQISLKALRRIVPLMEQGKRYDEACAETYGDHYGEKNSEEMLYLPPIPADEIRNPVVLRALSQARKVINAVVRRYGSPARIHIETAREVGKSKDERDKLDRQNNERKNDRDRRIKDIQKYFGFDPKPKDILKLRLYEEQNGKCLYSNLKSEKGKCLYTGEAIELSRLFEDNYVEIDHALPFSRTWDDSLNNKVLVLKASNQNKGNQTPYEWLDGKNNSPKWREFVARVQSCNFPHSKKQRILLQKFDEEGFKERNLNDTRYVNRFLCQFVADHMQLTGKGKRCVFASNGQITNLLRGFWGLHKVRAENDRHHALDAVVVACSTVAMQQRITRFVRYKEMNAFDGKTVDKETGEVLHQKTHFPQPWEFFTQEVMIRVFGKPDGKPEFEEADTPEKLRALLAEKLSSRPEAVHEYVSPLFVSRAPNRKMSGQGHMETVKSAKRLNEGISVLRVPLTQLKLKDLEKMVNREREPKLYEALKARLEAHKDDPAKAFTEPFYKHDKAGNRTQQVKAVRIAQVQKTGVWVRNRNGIADNATMVRVDVFEKGGKYYLVPIYSWQVAKGILPDRAVVAYADEENWTVIDDSFEFKFVLYANDLIKLTAKKNEYLGYFVSLNRATGAIDIRVHDTDSTKGKNGIFQSVGVKTALSFQKYQIDELGKEIRPCRLKKRPPVR

SEQ ID NO: 1153 - protein, 1081 aa, unidentified
  REGION 1..1081: note = Description of Unknown: Cas Enzyme sequence
MTAFKPNPLNYILGLDIGIASVGWATVEIDDKENPIRLIDLGVRVFERAEVPKTGDSLAAARRAARSIRRLIRRRAHRLLRTRRLLKHEGVLKPEDFDENGFIKLLPNTPWQLRAAALDRKLTPLEWAAVLLHLVKHRGYLSQRKNEEQTADKELGDLLKGVADNTHALQTGDFRTPAELALNKFEKESGHIRNQRGDYSHTFSRKDLQAELVLLFEKQKEFGNPYVSDDLKNGIENLLMTQRPALSGDAIQKMLGHCTFEPAEPKAAKNTYTAERFIWLTKLNNLRILNQGSERPLTDTERTTLMDEPYKKSKLTYARVRKLLGLDDTAFFKGLRYGKDNAESTTLMEMKAYHAISRALEKEGLKDKKSPLNLSPELQDEIGTAFSLFKTDEDITGRLKDCLQPEILDALLKHISFDKFVQISLKALRRIVPLMEQGKRYDEACAEIYGDHYGEKNSEEMLYLPPIPADEIRNPVVLRALSQARKVINSVVRRYGSPVRIHIETAREVGKSFKDRKEIEKRQEENRKDREKAAAKFREYFPNFVGEPKSKDILKLRLYEQQHGKCLYSGKEIDLGRLNEKGYVEIDHALPFSRTWDDSFNNKVLVLGSENQNKGNRTPYEYLNGKDNSREWLEFKARVETSRFPHSKKQRILLQKFDEEGFKERNLNDTRYVNRFLCQFVADHMQLTGKGKRRVFASNGQITNLLRGFWGLRKVRVENDRHHALDAVVVACSTVAMQQRITRFVRYKEMNAFDGKTIDEETGEVLHQKTHFPQPWDFFAQEVMIRVFGKPGGKPEFEEADTPEKLRALLAEQVSSRPQAVHEYVAPLFVSRAPNRKMSGQGHMETVKSPKRLDEGMSVLRVPLTQLKLKDLEKMVNREREPKLYEALKARLEAHKDDPAKAFAEPFYKQDKAGNRTQQVKALRIEQVQKTGVWVRNQNGIADNATMVRVDVFEKAGKYYLVPIYSWQVAKGILPDRAVVAYADEENWTVMDESFEFRFALYSNDLIKVQLKKDSFLGYFSGLDRATGAISLREHDLEKSKGKDGMHRIGVKTALSFQKYQIDELGKEIRPCRLKKRPPVR

SEQ ID NO: 1154 - protein, 950 aa, unidentified
  REGION 1..950: note = Description of Unknown: Cas Enzyme sequence
MITGAGFFCISFYINCFPQQKLINNNFDKDAVLKPKKGDKESTWDIWNIRKEALERKLSDDELFRVLYHIAKHRGFFFHTKAEEVQEEDTKTKEGKEKARVKAGLRKIRQKLVDGGWETVGQMFCEEFKQTNKENRRKRNAKDKYINSIHRSLLKDEIKKIFEKQQTLGNRKAAEELKERYIEEILMNEKGIDEERLQKMMGRCEFTGKICAPKEGYAAERFSFFNRINTLELVETENKDGHLPLNDEERKQIEALAYKNTKVTFHQIRKALKLENDLAKRFNLCSYQEKDPEYNKKLTFDIQNGRLQFNGKHKLPIINVDTGEIKMLDAEVKKIFKSKKLWPKAKKVYVYYSDIRKKLNLSDNFRFGRFKKKQDGSVQISELEGYTKSEAELGSKAKYMKQFEDETFVELNGYHKIKKAIESCDEDKWEEFKEDKNKLEIIAEALVYHKSDETRTEYLKEKGIIDEDIINAVLKINMKQVGSYSKEAFEKLLEHMEKGALFYEAKEKAGFGKTEYEKQEILKPYSGFFENNPVVARVISQTKITFYPTGAANEVYIKDCEIDHIIPMSRSFNDSLNNKVLCTQKANQDKRDRLPFEWFEATYGKDSQRWMEFENRVKKVYGMPYAKRRNLVRKSWTEKDKERFLNRNLSDTRYAEKHIANYLRKYFDFSKSQRDDINPLSRIQVRSGGITAFLRHTWGLNKDRGLNDLHHATDALVVACSTYGHVYLVSNLARQIERKGKNWYKHFGRDKFKPWESIREDIQTAVGNVFVSRMPRHTVTAAAHKETVESRTKASRRRVISVNQGYAEMGDMVRADIFVDAAGKNYVVPIYSVDIFRKKPLPNKYITKADAPYDKWPSVKDDDLNFRFSLFKNDLISIDGKMYYVDHIRGTRPEIIVKNIDGAIFSSTKDKKRSIGYRKVNLKKYSVDILGNYKEVKQVKRLGNRFKTGE

SEQ ID NO: 1155 - protein, 1117 aa, unidentified
  REGION 1..1117: note = Description of Unknown: Cas Enzyme sequence
MNKEKVVLGLDIGVGSIGWGLVDIEEQEYVDEKADGTIEKKNRIVDGQIIATGVRTFHVPQDEKGKSLALKRGTARRSRKTTRRRAQRLKQLIKLAKEFNLIKKNFDRDAVLKAKKGDKESTWDIWTIRKEALERKLSDVELFRVLYHIAKHRGSYFHTKAEFLPEEDEKKLKKEQSEEEKEKEKVKKGLRRIRKMLKDSEYKTIGVLFYETFKNERKRNAPDKYEHSIRRELLCDEIIEIFKEQQKRRNNKAKNDLKKRYIDNILMYEEGIDEAKLQKMMGRCEFTGGVCAPKEGYAAERFTLFNRLNTLRLVDTQNKDGDVQLDKNQRDKIEALAYKNTKVTFSQVRNELKLENDLGKRFNLCSYREKDPEYNKKLTCNVKDGHPDFEEKHKLQIVDINTGAITVFDEEIREIFRKRKETYKNAKKLYVYYSNIRKQLNLSGDFRFAGLEGYTKSEAELGGKAKYIKQFEDDTFVELKGYHKIRKAVEKLCGDSKWEELAADTRNLDIIAESLVYHKSDETRTRCLRENGVVDEDIVNAVLTINMKQVDRYSKEALGKLLEYMEQGDLFNEAKEKAGFGKIEYEKQAILKPYNGFFENNPVVARVISQTRKLVNALVRKYQEQYPIDQIHIEVATELASSEKRKAQISQGQRRYREEKESAAQRCGEKGFDPEEGQNLLYFRLAEQQNYFCSYTGTKITLQPTGAANEVYIKDCEIDHIIPMSRSFNDSLNNKVLCTQQANQEKREKIPFEWFEEMYGKDSQEWMEFEKRVIKMYGMPYAKRRNLVRKSWTEKDKEGFLSRNLNDTRYAERHISDYLRKYFDFSKSNRDDIKDVSRIQVRSGGITAFVRHMWGLNKNRGADDLHHAIDALVVACSTYGHVYLVSNLARKMERKGKNWYKHFGRDKFKPWESIREDIQRAVGNVFLSRMPRRTVTGGGHKETVVSKAKASKKRVIEVNLGYVEMGDMVRADVFADAAGKNYVVPIYSVDIFSNKPLPDKYVPDDNSLTYEQWPRVKESNLKFRFSLFKDDLISVNDKMYYVSFVEAGTVNINVKNIDSSIFPDKKDATDPYTKKIGYRPKSKTKKRVLKKYSVDMLGNYKEIRQEKRLGNRFKSGV

SEQ ID NO: 1156 - protein, 1148 aa, unidentified
  REGION 1..1148: note = Description of Unknown: Cas Enzyme sequence
MPKPTDLNESFLKGLVFGFDVGTGSIGYAVRRGKGFLDVGVIICPEDTSKLDTRRGLRRQRRTLRSKKYRRQWLAKELEKLGLPKPKPDIVHDPVALRVKAVNGDKLSLEELHAAIAHLWKRRGYEKNVPWANKEADDTGEKPEEWSSGTLSPDQVQSEFDKSGCEFPCQFLDKRPTQRKRVWPRKLLEKEFRAIANKYPQLAGKADWLLYGDTQEVKKHHVYFKATEAHNPGVLGLRWPRFDNRNPGLDLLKPFDESGCPLHVVRKNKPVFRETQFEQALFNFRVIDRSAGKRVLPDMASLIRLREIYDSSKRKPKKAKKIAETPPDSSQSVEIKITEGVLNKWADEYRHRYQLIEDQPDLVSRTGEGRAKFCTATLRNIKTVLENLSAGQTMDAIQPLLRQPNESKEDAMEQFLIGIRHGLVRHRLTLFLRLLRRLVKEHGTPGFVVVEAVRSLAFSKKKKEEKKSQQKKNRQDRQQVYEKLKDERQSTSKNAILRYRLAKEVGFECPFCRQSFDQDALYNGDADIAHLYPKSLTPCNEFYNLTVAHVRCNRTDMENKIPREAFGSDPLWPAIEENARKRFSGKKLEIFLAQTREEAEQLIESQAPLAATAYISKMVRRLCLIEFDWLGDDGRDPTDKQGNIPSKQFLVTNGEITARFREAWELNEILHPQVPSLSQEEWDKLSPAEKAEHKEARKRRFEKNRGDHRHHALDAMVISCTWPAYAQRVHNATKDWEEKGWWYFDAVKKRLMARHPLFVTYEPMRKATAEWMQRIVGENSVQHHASQSRHKQAYKTSFFSRRPDPANISEHLYLMREKLVDISPKDLRLGKVHPSSLSDYLYAAWVGYLNQLYSYVEKAAQLFVKTLDSQPNLKQAPKEFAKRLEWSDFNVWMQNQSREPVLAAEEASSRITLNPKALPEFRVNNTGGLEVRMPEPERLLKTMPEDFQRRLCFSHYQQWLHVRPDDFRFPSQVKIPIVRVRYKQPVNDNSVAVGPKTIPGWNGEHVYIKRDGYWEVRLMPYACGPGVVPVFVPRWRKDKPFSAYEFDAKAEPLLIIRKDQMLKLERDYSAAYPAGEYLVEVLGEHQVTLAKAHVANTNEARLANDFPATGFKPYWHKLIPALGFQFPKAVKVAEESNEEEEDDESDEK

SEQ ID NO: 1157 - protein, 1079 aa, unidentified
  REGION 1..1079: note = Description of Unknown: Cas Enzyme sequence
MQTNYLPYTLGLDIGMASVGAALLLPDQQHILALHVRTFDKAETAKEGESLNKIRRDARLTRRRIRRRAHRLVRLTRLMKRQGLIEQASPAAFALTDISPWDLRAEGLDRLLEPKEWASVLYHLVKHRGFQSNRKSEAKTDEKAGQMLSGVGRNQALLQETGYRTMGELAARHETFKEAKRNKGGAYTHTFARADLEAELNLLFKRQRALGNHYASEEIQSAAKGLLLARQPVLSGANLLKMIGKCTFEKKEDRAPKASYRAERFVWLGKLNNLKIVGSGDARPLTQSERHIIIDLPFTQTRLTFKQVRKALGLEAHQRFNLLSYRPDPKGKDKDPEDTAFFEAKYFHTLRKAYASVDLKPEWQRDALDPDRLDALAYGITCYKDDTEARDWMTAQGIEAPVMEAVLTESFDQFIRLSQKALKAILPYMEAGQRYDEAAKSAGYHHSQPEIFDKQTYLPPPDNDVIRNPVVYRALNQARKLVNAIVREYGPPTAVHIELARDLSRPHDERRRIEREQKEYRAEKEKAAQRFIDDVEREPKRDELLKMRLYHEQSSQCPYCQDALNINRMFDQSEVYAQIDHVLPYSRSFDDSLNNKVVVHTKCNQDKGNQTPYEYFDGESDNERWQRFMAWVQGTKSIRQAKRNRLLRINFGESEASEFRDRNLNDTRYICKEFKRMIETHLQWHPESDADNRCVVLAGQLTSLLRARWGLIKLRAEGDLHHALDAAVIASTSRGLVKRMADYSRRKELELVRNRYIDPATGEVLDIDALRQLEDHFPEPWPHFRRELLARLSSNPAQQLDGLPGYDEHLRTSIPPVRVSRAPTRRGLGAAHQETIRSIGKEGKLLADGQSAIKTPLASLTLKDLDNIVEQRDTALINVIRERLTAFGGDGKKAFGPNQPRLRKPSKNPENAPIIRSVKLLATQKSGIPIRGGIANNGAMLRVDIFTKSDSFHAVPVYAADAVKTELPNRAVMAYKPEDEWTVMDENYQFLFSLHPNDWVTVKLKNEIKEGYFSGLDRATGAVSLWTHDKNQSIGSTGQWRGIGIKTALTVEKYHVDFLGRLHRVHNEERQPITRKHPR

SEQ ID NO: 1158 - protein, 1060 aa, unidentified
  REGION 1..1060: note = Description of Unknown: Cas Enzyme sequence
MIRLGLDIGTSSIGWWLYQIENDKPVAVIDGGVRIFPDGRVAKTGQSLAVARREARAARRRRDRYLRRRVVLMERLAAAGLMPADPAAAKKLELLDPYAIRAQGLDEELPLTHLGRALFHLNQRRGFKSNRKTDGADNEAGKIKMGTARLEQAMMAAGARTYGEFLHRRRAKADKPHRTPSVRTRLTVAKRDNAEKEEAGYDFYPDRKHLEEEFNKLWKTQARYHPELTDDLRETLFETIFYQRPLKAPEVGLCLLTDERRLPKAHPMTQRRVLYETVNALRITSDGRAKKPLSIEDRDKIIHALDNKSHTKNLSGMKLALKALGKVVGLQPNQRFTLETAARDSIACDPVRASLSHPDRFGGRWSTFDTEQQWRIIQKLREESDPDAMVAWLKEEWGLDDTHAAATASAPLPEGYSRLGESATRNILEHLKSDVVPYSEAVARCGYHHSDERTGEVIDSLPYYGEVLQRHVIPGSGREEDDDITRYGRITNPTVHIGLNQLRRLVNRITEVHGKPDQIVVELARELKQSDKQKAEIQRTIKKNTEAAIRRSEKLAELGQRNTGANRMILRLWEDLGEDCLKRFCPYTGKRISAEMLFDGSCDVDHILPYSRTMDDSFANRTLCLREANREKRDRTPYEAWGHDEDRWTIIQANLKNLRENKRWRFAPDAMERFEGETNFTDRSLNDTAYLSRISKAYLEALYDGGDGKSHVWVVPGRLTEMLRRVWDLNSLLPDHNRAAKAKNRHDHRHHAIDAAVIAATDRGLIKQMADIARQKENEGANDKARGTEPPWDGFRNDIAARVNTITVSHRADHGLGPQRKAGQTSGQLHNDTAYGLTGENKGNVPLVVTRKPLDSLTPAMIDKIRDPYLQNALLFATQDKAGKDFDKAVQEFTAKEGPYQGIRRVRIIEPIEVLEMKDKTGTSYKGYKPDSNHCYEIWQLPNKKYKAQVITTFEAHQNLSPRRPHPAAKRIERIFKKDMVALEHPELGFMICYVQKFSEAHGLYLSGNVESNADARNRDKNDKFKFIQMSAGPLMKAGFRRVFVDEIGRIRDPGPHEKI

SEQ ID NO: 1159 - protein, 1055 aa, unidentified
  REGION 1..1055: note = Description of Unknown: Cas Enzyme sequence
MLYSLGLDIGITSVGWSVLDLDNKRIEALGVRLFPGAENPKDGSSLAAPRREARSTRRRLRRKRQRLSDIRKLIISSGILTQKQLDEIFSIPSTYTPWELRAQGLDRVLSPAEWSRVLFHIAKHRGFKSNRTISQDEKSAKATEDGKAKEGMKSNSALLVNGNEGKGYRTVGEMVENDQKFAAHKRNKSGDYSNTITRSDLENEIKILFDSQRGFGNKFALLQIEEKYLEIFSRQLPFASGEILERMTGFCTLEPTCKRAPKAAWTSERFVLLSKILNLRVRVNGRKIELGIDQQRIIADLAYKNAKVTYKQIRNAFDADDDWYFENIPISKKAGNPEDAVFIELKAFHLFRKTITKALGDDYWNTLINTTPVVLDVLAFALTFRKTDDEIKEYLKVKHIDENLIKAVMPLNFSEVLNLSLEAMTKLIPFMENGDRYDQACEKAGYCHYNPLAETERSLKLQLPDQDEIRNPVVYRAIAQTRKVVNAIVKKYGSPRNVQIELARDLSKSKEERNKIEKEQSDSRNQKSRLSEEFEENFKHRPNGAELEKYRLWKEQGGYCPYSGVYIDPKIAFESNDGNYAEIDHIIPYSRCFDDSLTNKVLVIGSENRNKKEHTPYEYFGESGDEWDRFVANVDMYVTNRKRAERLKRRDFDDKDGQEMKDRNLGDTRWITKFVAGWIERNLLFADPENKKPVNCINGRATATLRRQWGVNALKNRQGSDLHHALDACVIAAATPSMIKAISDYSRKREMCLLREESPENKKSRFTEPWPHFRKEIEARLADDPAAKISEFGLTNYSAEELARLKPIFVSRKPDRKTHGASHQETIRSAKYIEDGKTAVRTKLLSIKLADLENMVGKERDTVLYNALKTRLMEFGDDPKKAFKEEFRKPTKDGSPGPVVRSIKLLSPGISGVSICNGIASNGGMVRVDVYVKKGKYYLIPYYVDDLAKGLIKNKAIIAYKDEASWENIDSNYSFVFSLYKNDLIRIIDNKGKEIIGYYLSCHRGTGAIEVLHQAGGCSWSGIGVKTAKLFEKYNVDVLGNYYKVKREKPLHELA

SEQ ID NO: 1160 - protein, 1495 aa, unidentified
  REGION 1..1495: note = Description of Unknown: Cas Enzyme sequence
MSSKPTDPLTFGFDIGIASVGWCVLGESHIVDLGVRCFDSGEDSDGKPHNQTRREKRVARNRLHMRRWRLDQLLRLFCDVGIISRPDPRLLMSPPQIRGEPDTSSPWQLRAQGLKEKLEPIEWARVLYYFVKHRSFEFFRKSEINSTTDKDVEADKAGATDETQGAQGEAATEKDKKKLKAALSGTTTLLEKYRKRTQNPNLTVGALAVWLSKDKYEADAPQPDEEDRKSFRESLRNKGGNYRHSFFRAALRQELQELFAAQAEYGNPCTILDLPADSEYLRYMLDNTKLTPERNIPVGGESRPVGRTFQQAVFDLFDLQHPPLYGDQIREMVGECELIEGEPRAPKNAFSSERATWLEKLNHLRVRRNGKEEPLSQDERKVLVNLPYEHTKVTLKLVRETLMANAGFSASWREASFNVASYQAKPANDGAWILIVQHGEEPVSLAKWADTEKRKKNLKEAKKQLTGGSMTFAVLREQLELADSDRFIYRIKETSIVPREQEPQARIPFSQQGDGILASGQSYRYIQSDGKPKALSKAAWKAVATLSHSTATLADWRTLIAKFKDMEGAWQFEHSATKEDAVEASAESQTLVPLQFEDAQAVEADHKLVELKGWHAMRLALAEKFPDRWASLQVAYKKPINPEGLSAAKHIDDIATILTVSQTDHEVEEKLSALNYVKAEIEALQTIGFSKFRNLSFCALRKILPYLEDRHVYSEACKLAGLSHSEKNHQRDRYLPPLETFVYQRYRHGKLTGHVEKRYKELRNPVVARSFNQARLVFNALVAKHGSPAYVHVETARDLARSKKLRDEIKRQQETNGKRIESIRNDLKNRLGCEPTPTQILKMRFYGEQKGQCLYTGKSLEPFIDSMLTEDSKDVEIDHIWPRSKTFDNSLDNRVLVIAGANQNKRNQIPYEFFINGPGGEQGWREYEKRVLDCKGISAEKQRRLLSKTLEDADEFRARNLVDTRYATRMFANMLRERILFAGSVTPEELETISPDDDGKTRWNRYQRVRVRTPQGRLVDFLRGKWGLARLKDREKSDLHHALDACIIAACSPAVIQRVNNYFAEEEKEPGRHSFKRNSDGTYTHRTTKKTFSEEEARAQGLYLPAPWDRFHRDVRNALGKVFISRRPKRKSAGEVHDANPKGIRYLPVPLVELTEEMLTDECLREVAGRRRENYEALRMALQATNGDAQMAFADGYEIQGKHGKLKRIYGIAMPLWSLPDDYLKQQNKALTKENARRRKEEDAKPLSENLSKTARKTVPLTSLTQKMLTEAELGSTFYHRNRELIEALKAQLGDKKAKVAFAQPFQPLPGKKGKKRPVIRSIRLPDSHGSGILVRGGIAGMGDSICTEVYWTGSSYFFRPRYQADKEATFGVEDSPKGASHLFNLRIDEPIEVVLEDGEIIPDNNLPGYFVGYEGDGRITIRTHDRPGKGRRKKEKAPDESESEEIADKPDKEDTKDNSLWRFSVSGIKQLRKFRVNALGNRKEIHAHLKHGLA

SEQ ID NO: 1161 - protein, 1643 aa, unidentified
  REGION 1..1643: note = Description of Unknown: Cas Enzyme sequence
MSDKIWSFDLGKASIGLAVRSKNNTHFDEKESLIIPAELGKRGPSTKSDTPAARYRSWVTRSHRKIRKAWLDELWVKAGQPVPQKKQLLCIGAHCLWPRQGSRALEEDKKRRSVKGRGGKWTVVTEADPILLSEAIADGGIECANSCLLRIFLHRGGLLADGSKMSVRQIYKALYSANRKRGQQAVPWKNDSKRAAQDDAKAKQEADEKAAANRKWQQFIGKAQNAKYQLPCYYDALHLKLWRPSGDEVLVAPHERPESTRQIAFPGERVEAEIFLLASVAAKLLPALDQAAVAWMATYKAEVLARVGNVNAYRQQKGREPMKLPGFNGGATNFAELFTYGPGGKPALGADARALASFDPKLRRELGLRPGHTDDLKAAVGQIVPRFDNRLRQECALLPKCADMEVKAFNKKGFNACRNTTDEDLKRARDAGDQADDAALLPAQVTFLMKLKNLWVAEKFGERRQRKLTPQEVNEVYKARSKDHEYWMRPGMWKKDFCERWSVLPVYAEGKKKAEDKSLASTEEAKASSKNTDYIIEPPNTSGRSRFSRPALRLLKELILSGNKPSEFKQRLLNRESELLAKTKIEVVTVDEWLRKTEPCKHEKTGDDYRVFVKQAESRSYVLEKQLDIFDRMKPEVSKDLKQAESEESWEDMFIPSRRADFELSGTEATPELRKNAIQQLIGSQNNPIVRHRLQSFWDQLIRLEGKHGVPAFVAIELVRDNLENSWLGGKAKDKIKQARDGNESARTNARGKLADLKIRVTERNILRYQLWESQGGECLYGREVKKGQCLYLETGLPISDLESYEVDHIVPRALGGPDAFSNYVLTTKETNERKGDRTPWQWFRDNGFEGWDTYCNRVEARVKVEKKGLGFRKGRLLRSSQAEKLVERYTPLAETAWIARTAMVIANLHFGWTNGYDSNGDMRVYAFTGGLTARVRRQYLLDSLLGASGDLDHQITEALHELNSMGKAGLSDAERQEKELPVREQLEKARKQSEKDRSDQRHHALDAMVLNFLAMQPVVRDSKREEEFRFEVLGDNPCFSSEDAKRVGALRGQIEQSQKAYKKLREQAKADLPADDIRRLGKEMETLQRDITHSRKAISKLWQKRNWYVVREAFRRELHGAADASSTAVLPKHLHYPKSGLDSLFYRGTWIWVEDEKKAEAATIDTYAEAFVVAQKALPLSEFPYLSDRDGRRVFDLRHADRHAQALAPHKDYPDLKAIRRGIRSFIKTKPDEAAWLAWAASAEAPQGIKPKKGESNVPAFKVYKLEEKRTRRQRLFDLGVSSEEVRVWDAGQFELNVKDLVIRPQRPKKGEPPPNDELQPDLELQEKLLGMKDTFAAFFAANPPDPGSQPRQPSARREFEAKKEAWNQSWIAFQKQHGLDKQVCKRLDPDKVTDRPFSTPSLLSVLLSSIKRFDPETAMKQFKGLTDPWTRFQLRAFVRLQPSQSEWKEFCDSFVQVERDELRAFLDAAESRSAADFIKFYSELGAKFQNRSRIEFVQQVMGAPDGYVDVSKDGSGIYAKGGNQGYLIYKKTTLSADGQTEIKFGARAVLGHERIKDARMRLLAETGVTLLDKKLWRTNMLLELPNEAVSGASTTSAGFYYFGSISNEASMTLKPLAGGDTLPGRMVDALLAAGLRRFNYS

SEQ ID NO: 1162 - protein, 1115 aa, unidentified
  REGION 1..1115: note = Description of Unknown: Cas Enzyme sequence
MQPYRLSLDLGSTSLGWCVLELDRSMPPKPKGIRALGVRIFTDGRSPKDESSLAVGRRIARQMRRRRDRTLVRRKRLMAALIRFGLMPVDRGERKALETRDPLDLRVRGLSERLEPHELGRALFHINQRRGFKVMRGAGDAEEAGKIRSAIDRLTIQMDETGAPTLGAFFDWLRANGRSARARLVGRGAKAEYPFYPERRMLESEFDQLWAAQKRHHPDLLTEDRRTTLRDRIFHQRPLQPPKIGKCSLIPEDPRAPRALPSAQRYRLYTELANLRIVAPDHSEQPLTVEQRDAILRAAKAKPTKKALSFDDVRKTLKLASGMTFSIESERRPGLTTDETSAVLADKKRFGPRWAQLTLAEQDELVERLLSETNEGALLDWLAVRWGLTPEATVLVADAPLPDFHLNIGRKALAGLLPVLETESRPTETGANRGANRPIRYDEAVPVAFPGQHHSDRRPGERLAKLPYYAEALERHVAFGSGDPKDPLEKRLGRLANPTVHIGLNQLRLVVNAVIERYGPPQEIVVELARDLKQTKEARDRAEKEHTANQRKNEERKALLLSVNHPINARNLLKLRLWEEQGDVVRRCPYTGDPIGLQLLLSDKVEIDHILPFSQCLDDSAANKVVCLTEANREKRNRTPFDAFGGDPARWARILGCVEDLPKNKRQRFAEDALQRWDKEGGFQARQITDTQYLSRLAREYLGHVCDPNRVRVSPGRLTAQLRRRWGVDSILRDHNRQGGDAPVDKGAVKNRDNHLHHALDAAVIGCIDQGMVQAVARAASNAEQAGIERLMEDLPDPWDGFRDELAARARTVIVSHRPEHGVGGRLHEDTAYGPTLESERALGYNLVYRKMLDGLTEKEIARIRAPDLRTAMQERVAFHKAGPERLDVKQAVVKAAEDLAATAPWVGIRRVRLLTKEANPIWLTGPDGAPYKGLIAGDIHHIDLLALPDGRWTGRATTLFEANRDALPDGRAAPCQPQDGERFVMRLHKGDLVKLEHDGRPRVMRVARLEPANGRVRMVEHQQAGELDKRHAKANTLDELIEKQGEAAVKAMAKPFDEVDPFRWLIISYDVLRRRKARRVTVDPLGRLRDPGFPKWAAAPALTLPAPSDEDADP

SEQ ID NO: 1163 - protein, 1011 aa, unidentified
  REGION 1..1011: note = Description of Unknown: Cas Enzyme sequence
MTLLIDNGLMPADMQARKALEHLDPYRLRADALDQRLEAHELGRALFHLNQRRGFKSNRIADSDDSDKSATRDGMRHLKRALDDCGARTLGEFLASQHQRDRFGRRVSQDGKTAVPQSVRFRPSTTGSKNLWDFYPSRDLIADELVKIWNAQRTYHHCLTTELFNKLERLIVNQRPLKKPLVGRCTLRPELQLVRQHGLELDLGERAPKAHPSFQRFRILQDVAQLRIMRPGVHERPLSLQERDMIAACLMERSGSTIPFEKLRSAAKLPEDARFNYELAGRSGLQSDQTAAKLGSRKAFGKLWRALSRERQIEVVERMLAVEESDVLETWLCREHGLNKAESEAVSGMRLPQGHGAFGRGVLTDLVVVMERESRQAMDPDTGEVYDRSLTYDEATATLDFHHSDLRPTEKSARLPYYGKALVRHVIPKPDAPEGSQESIGRVPNPTVHIGLNQVRGLINALIDEYGAPKTIAVELARELKLNKTRKNQIQRENRENERKNNERRERLTSLGVADTHDARLRLRLFDELPASERVCVFTGAPLSIERLYDGSTEIEHILPHSRTLDDNFMNKVLCTREANRNKANRAPAEVWSGDDLQEIVERAERLFPKKKAWRFQPDAMRRFEVEGGFLARHLIDSQHMARLAKTYLEHVCDDVRVSPGRLTAMLRAKWGLNSLLPDHNFADANQPKNRRDHRHHVIDAFVVACTDLGLLNRIARESGRAEALNLDRLFPHDSFPVPYDGYREDLAARLNTIVVSHKPDHGLSPKTQANVHVTSGQLHEETAYGIVNEQIDGKQYNLVARKPIDALTCGEINRVRDAGLRAELQGVADEAERTGQKLHEALANFGRHRNIRRVRILKTEQSVRIVRHGAGFTKAYAPGGNHCVEIFELPNGEWSGQGITIFDANQPGYVPAWRSKHLDARLVMRVHNGDLIEADFGGGRRIARVYRLEPSANRLRLAGHNEAGSLDNRHKDPNDPLRWIFGSWTTLKKGQARRVRVDMLGRVAAVEDRL

SEQ ID NO: 1164 - protein, 1053 aa, unidentified
  REGION 1..1053: note = Description of Unknown: Cas Enzyme sequence
MPVKQKRPEPGYTLGLDIGIASVGWCLVGTGRIIDLGVRAFDKAETEKGEPLNAERREKRLSRRRLRRRAIRLLRARRLFKREGLIPEATAECLNTPAEAGTAGSWELRAAGLDRKLEPDEWARALYHLIKHRGFRSNRKSEIADDEEAGKLTAAVQSTENLLRASGYRTAAELAVRDPAFAGHKRNKAGDYTHSFARGVLLEELKRLFACQREHGNPHAGTAFEDAVRALFETQRPALTKEGMQKLLGRCAFERNPPEFRAPKRCHSVERFVWLSKLNNLRILENGERRPLHSGERDAALRLPFERKSEKVTYKSLRAALKKACGFPDTARFAGLSYRQEAKNPEEATLMDCQGWHALRKAYENAGLQREWQRLAGDGGRLDAAGHALTVLKTDVEIGECLAANGFSEAEIQALLPIGFRDFIQLSLKALGKLLPHLEQGKRYDEAVREAYGDHSRPRTFEKSRLLPPIDKNEIRNPVVLRALNQARKVVNAIVREYGPPERVHIELARDLSRPWEERDKIRKAQERYRDAKEADIRRFEDEFGFKPRPKDQDLLKWRLYREQDGKCAYSLEPLSPSGDIAEIFRGNRTQIDHILPYSRSFDDSLNNKVLVLTRENQNKANRTPYEYLDGAGDTPNWRRFEGWVRSNGKFREAKRQRLLRKHFGESEAEEFRERNLNDTRYIARYFKNLVENHLQLAESGENQRCVVLSGQLTAFLRARWGLLKNRGESDLHHAMDAAVIAACSHGLVKRLSDWSRRGELEAVRGGYVDPATGEVFDRKILERLEASFPQPWSGFREDLLDRLSPNPRGSGVRPVLVSRAVKRRGGGEIHKAAIASRKAAAGKVKIKVPLQKLTLDKLANAVEPERNRALIAALRTRLAEFGGDAGKAFSVEFRKPSGAGKIAPVVRSIAIWETRLSGVHVRHGIAEMGEMIRVDVYKQGKRYHLVPRYAAKHYFTPVKPPDECAQFCFSLCKNDLMKIEFDHEVTIGYFVMYESDGRLTLRAHDQPRPDKKFFRRSVAGASSITKYHVDILGRYFKIKREERHELAQRDRR

SEQ ID NO: 1165 - protein, 1130 aa, unidentified
  REGION 1..1130: note = Description of Unknown: Cas Enzyme sequence
MNDKKNLGPLTFGFDIGIASVGWAVLSPTRIVDLGVRCFDKAETAKEGKSLNLARRSARLMRRRLRRRAWRLTKLGRLLKREGLVADTKVFLLPSATQVSPWQLRKEGLDRALGPEEWARVMYHLCKHRGFHWVSRAEERKAEGDTKGEGGKVKQGLAGTAKLMKEKGYRTAAEMVLAEFPEAQRNKRGDYTKSLSRVLLDNELKQLFERQREYGNPHADEKLEAAIRGDGSRKIGIFWSQKPALAGSNLIEMLGRCTFEKQEHRAPKASFTAERHVWLTRLNNLRIIMDGRTRGLSEAEHAFVLNLPYQQAGDFTYKQLRAALIKAGLLPEAFVFAGLAYPSKSQRDEGKAKDPESVALVKLPAWQELRTTLKKADLESEWQQISCAALEGNPEILDQIGWTLSVFKDDDEVVKELSKLNLPGGERASTALLDIRFDKFHALSLKALRKIVPHMERGLRYDEACEKVGYHHSQLHKLGQGNRKYLPPLYKSRDKNGRMVFNDELGDIPRNPVVLRSLNQARKVLNALVARYGSPSAVNIEMARDLSRPLLGKKGVNGKYIEGRKDIEAAQLEFRERNEKDKQTFVTEFSVVGAAKGGEFEKWKLYREQQGKCAYSIQGIDLNRLLEPGYVEIDHALPYSRSFDDSKSNKVLVLAAENRNKGNRTPYEYLDGEHHSERWRQFVGFVESNKAYRQAKRSRLLRKDFGKEQAEEFRERNLNDTRYICRFFKNQVEQFLKLADGSESKRCVVLSGQLTAFLRARWGLLKVRDESDRHHALDAVVVAACTHRMVKRMSDYARRKELDQVAEGFVDIETGEIINPAMFQQLHEHFPDPWPHFRYEVQMRLKIDDPEQLRSDLLRLGNYAEEDVRAVRPLFVSRAPQRRNSGAAHKETIYGQPERLKAKGGVTEKVALTAVTMKDLDRLIDPYRNEKLYAAIRKRLEEFGGKADKAFAASNPLHKPDKEGNPTGPIVRTVTLVIDKLSGVPVRGGIAKNDTMLRVDVFTKAGKFHLVPVYVHHKVTGLPNRAIVAFKDEDEWTAIDDSFEFLFSLYPNDLVTITQKGKAPVRGYYASCHRGTGAFSLWAHDRASSVGKGGQIEGIGIKTALAVQKYNVDVLGTTYAAPLEQRRGLA

SEQ ID NO: 1166 - protein, 1065 aa, unidentified
  REGION 1..1065: note = Description of Unknown: Cas Enzyme sequence
MRLGLDIGTNSIGWWLYKTENGGISSVLDGGVRIFSDGRDPKSKASLAVDRRAARAQRRRRDRYLRRKAALMKRMAEVGLMPPDPAAAKELERLDPYTLRTEGLDQALPLAHFGRALFHLNQRRGFKSNRKTDRGDNESGKIKDATARLDQAMMAKGARTYGEFLHMRRSAATDARKVPSVRTRLSIAQRDNSEKAEPGYDFYPDRRHLSEEFEKLWSAQAAHHPDTLTDDLRDEIRVIIFHQRPLKTPVVGMCLFTDERRIPSAHPLNQRRILLETVNALRIAERGAPARGLSHEERDQIVHALDNKKHTKSLAGMALKLKALGKVIGLRSEQSFTLETANRDAITCDPVRASLSHPDRFGPRWSTLDSAAQWDVVSRIRAVQSDAEHHDLVQWLETTHGLDRVHAEGAANAPLPEGYGRLGLTATKRILAALKADVIPYSAAVAACGWHHSDGRTGEVLDELPYYGHILDRHVIPGTYDENDDDITRFGRITNPTVHIGLNQLRRLVNRIITVYGKPDEIVVELARDLKLSEDKKREVQRKIKDNTDAAIARGVKLEEIGVPNNGANRMRLRLWESLGDDVMTRNCPYSGQRINIGMVFDGSCDVDHILPYSRTLDDGFANRTLCLKEFNRQKTNKTPWEAWGDTDQWGTIAANLKNLPENKAWRFAPDAMERFEGENDFSERALKDTQYLSRIARAYLDALYDGGDHKRHVYAVPGRMTEMLRRHWGLNSLLPDKDGAVKAKNRTDHRHHAIDAAVVAATDHSLINRISKAARRDEENGNAAEDVARTTQEPWDGFRADIRAQLAKITVSHRADHGRIDREGRKTGHDSTTGQLHNDTAYGIIDDQTVVSSAPLLSLKPGDIELTTKGKNLRDPYLQRKLALVCKGKDGKDLEEALRKFSANEGPYQGIRHVRLIESLQASARVEIADANGKPVKAYKGDSNYCYEIWRLPDGKPKAQVITTYEAHGETLHRPHPAAKRLLRVFKRDMVAIERGGARIICYVQKFNQGGTLFLAPHTESNADARNRDRDDPFKFIQMSAGPLLKAKIRRVFVDEMGRLQDPG

SEQ ID NO: 1167 - protein, 1117 aa, unidentified
  REGION 1..1117: note = Description of Unknown: Cas Enzyme sequence
MSDKPTGSLTFGFDIGIASVGWCVLGEKHIVDLGVRCFDKAETAKEGESLNLARRTARLMRRRLRRRAWRLTKLARLLKREGLIDNTQSIRQPATKSPWQLRVEGLDRKLAPEEWARALYHLCKHRGFYWISKAEEKKAEADGTGEGGKVKKGLVDTKRRMSEKNYRSVAEMVLSEFPEAQRNKQGEYTKALSRLLLGEELVLLFERQREYGNPHATPDLEMRIAGSGDRKSGLFWEQKPPLSGNDLLKMLGRCTFEKNEYRAPKASFTAERHVWLTRLNNLRVVVDGNARPLNEAERRIALPLPYSQASDLTYKQLKSALVKAGLLPEDVKFAGLNYLAQQTEGKAKDPETERLTKLPAWQELRKILKEKGLETEWQSIAGAATGGQPELLDQIAWVLSVYKDGDEVEQELRKLPLSGGEKMIEALSEISFDKFHNLSLKALRKIVPHMEAGLRYDEACEKAEYHHSQLFKTGEGQQKYLPPFYSGRDKDGRMVFDDKEDIPRNPVVLRSLNQARKVLNALVSRYGSPSAVHIEMARDLSRPMDERNKIKKAQEEFRDKNEKAKSDFADEFNMPAKSREFEKFLLYREQQGKCAYSLKPLSIDRVLHDPGYAEVDHILPYSRSYDDSKNNKTLVLACENRNKGNRTPYEYLTSFEGGENGERWRSFAAWVEGNKSYRLAKRSRLLRKNFGEKESGEFKDRNLNDTRYICKFFKNYVERHLQLAEGSDSKRCVVLSGQLTAFLRARWGLSKVRSDSDRHHALDAAVVAACSHALVKRLSDHSRRKELEQARDVVDAETGEILDPELLSKLERHFPKPWEYFREELLLRLNTDDPALLKSEAEHYGYPLEILENLRPLFVSRAPQRRNSGAAHKETIYSQPERLKSTGGVTQKVSLTSLTLKDMDNLIDPHRNEKLYAAIRARLEANNGKGDKAFPPDNPLRKPDRDGNPTGPIVRTVTMVIDKLSGIPVRGGIAKNDTMLRADVFRHKKDKKYHLVPVYVHHTVAKELPNRAVVAFKDESEWTLIDEENFDFCFSLYPNDLIRITQKNKPPITAYYGSCHRGTGNLNIWLHDRNTANTKDGALEGIGVKTAKSLEKFHVDTLGNIYPAPPEQRRGLA

SEQ ID NO: 1168 - protein, 1117 aa, unidentified
  REGION 1..1117: note = Description of Unknown: Cas Enzyme sequence
MSVKARDAFTIGLDIGIASVGWAVLAPDRIVALGVRAFDKAETAKEGDPLNLVRRTARLTRRRLRRRAWRLTKLARLLRRQGVIDNIQIFQPQHPFSHSLWQLRVEGLDRQLNTEEWARVIYHLCKHRGFHWTSRAEEKKAEADVKSEGGKVKQGLAATARLMKERNYRSAAEMVLREFPEAQRNKRGDYGKALSRVLLGGELALLFRRQRELGNLHAGSELEAAILGNGDRKNSLFWLQKPPLSGNDLLKMLGKCTFEKGEYRAPKASFTAERHVWLTRLNNLRIVAGGSTRPLNEPERRIALPLPYQQAGDFTYKQLGSALVKAGCIEPDKFKFAGLSYPSEKQKAEGSAKDPEKAALVKLPAWQELRLTLKKSGLETEWQGMASAAMEGHPELLDQIAWVLSVFKEDEEVSTELRKLALPSAEKMVEALLDIRFDRFHALSLKVLRQIVPRMENGLRYDEACEKTGYHHSQLHKVGEGEYKYLPSFYSNRDKTGRMVFSQDMDIPRNPVVLRALNQARKVVNALVRQYGSPAAVHIEMARNLSKPFDERRKIEKEQTEYRERNEKDRNLFAEHFGQTPKGLEFEKWRLYREQQSKCAYSITPIDIERLLEPGYVEIDHALPYSRSFDDSKNNKVLVHAKENRDKGNRTPYEYLGGAEDSPRWRQFVAFVESTKAYRLAKRSRLLRKEFDKQAAEEFRERNLNDTRYICRFFKTYVERYLKLAEGSDAKRCVVVSGQLTAFLRARWGLIKLRSESDRHHALDAAVVAACSHGMVKRLSDYARCKELDQVREGFIDVETGEIINSAMFQQLRQHFPDPWSHFRDELTARLKTDDPAQLRSEIERLGSYPPDALDSLRPLFVSRPPQRRNVGAAHKETIYAQPERLKLQGGVTQKVPLASLTLKDLGNLIDPHRNGKLYAAIRARLEEHGGKGNKAFPPDNPLHKPDRDGKPTGPIVRTVTLVIDKLSGIPVRGGIAKKDSLLRVDVFTKKNQFYLVPAYAHDKVEKVLPNYTADGETQVDNSFDFLFSMHPNDLVRVTLKGNESILGYFKGYGGPPNPYNITLLIHDRNTKSHKRANEKGEIPSIGVKTALAVEKFHVDVLGNLYPARQENRGGLA

SEQ ID NO: 1169 - protein, 1113 aa, unidentified
  REGION 1..1113: note = Description of Unknown: Cas Enzyme sequence
MADNTQVPLTFGFDIGIASVGWCVLGESRIIDLGVRAFDKAETAKEGDSLNLVRRSARLMRRRLRRRAWRLTKLARLLRREGLIENARMFQAPHPISQSPWELRVAGLDRQLNNEEWARALYHLCKHRGFHWISRAEEKKAEADSKGEGGKVKQGLAGTKKRMEEKGYRSAAEMVLAEFPDAQRNKQGDYGKALSRVLLGQELGLLFKRQRELGSPHAGPELEVAVLGNGDRKSGLFWTQKPALAGGDLLKMLGKCTFEKSEYRAPKASFTAERHVWLTRLNNLRIVVDGTTRPLNEEERRTALPLPYSQAGDFTYKQLRSALVKAGALPDSFRFASFSYAQQPDGKAKDPETAVLVKLPAWQEMRLTLKKAGLETEWQGMAGAATSGQPELLDRIAWVLSVFKDDEEVAAELRKLPLPAAEKMIDALLDIRFDKFHALSLKALRKIVPQMETGLRYDEACAAAGYHHSQLHKVGEGEHKYLPPFYSGRDKDGRMVFSEDLDVPRNPVVLRAINQARKVLNALVRTYGSPTAVHIEMARDLSRPLDERRKVEKEQTEYRERNDKDKSLFAENFGQMPKGLEFEKWRLYREQQGKCAYSLEPLDLNRLLEPGYVEVDHALPYSRSFDDSKNNKVLALAKENRDKGNRTPYEYLGGAEDSPRWHQFAAIVEGSKAYRLAKRSRLLRKNFGNEEAEEFRERNLNDTRYICRFFKNYVESHLQLAEGSETKRCVVLSGQMTSFLRARWGLVKLRGDSDRHHALDAAVVAACSHGMVKRLSDYARRKELEKVREGFVDMATGEIVNPAMFQQLHQHFPDPWPHFRQELEARMNIDDPAELRAKMEALGVYPPEALETLRPLFVSRAPQRRNSGAAHKDTIYGQPERLKAQGGVTQKVSLASLTLKDIDKLIDPHRNEKLYAAIRVRLEAHGGKGDKAFPSANPLRKPDRDGNPTGPVVRTVTMVIDKLSGIPVRGGIAKNDSMLRVDVFAKAGKFHLVPVYVHHAVAKDLPNRAIVAFKDEDEWTLVDDGFNFLFSLHPNDLIRVSQKGKTPILGYYASCHRGTGNLNIWAHDRNLQVGKEGQIEGIGVKTALALEKFHVDTLGNIFSAPLESRLGLA

SEQ ID NO: 1170 - protein, 1095 aa, unidentified
  REGION 1..1095: note = Description of Unknown: Cas Enzyme sequence
MDSKTQEALTFGFDIGIASVGWCVLGENRIVDLGVRCFDAAETADKGESLNLARRTARLMRRRLRRRVWRLTKLARLLKRAGLIADVAVLKQPPGKGCKTPNVWQLRVQGLDRKLEPEEWARVLYHIVKHRGFHWLSRAEEKKAEADKKEGGKVKQGLSDTQRRMAEKGYRSAAEMVLAEFPDAQRNKAGDYSKALSRALLADELALLFQRQRELGNPHAGEELEIAILGKGDRKSGLLWEQKPPLAGADLLKMLGRCTLECRGGPDGKGEYRAPKASFTAERHVWLTRLNNLRIVVDGVTRPLNEEERRIALPLPYQQAGDLSYKQLRAALTKAGHGGFQFAGLAEDKEKDTLVKLPAWQTLRKTLKEAGLEPEWRGMASAALDGDARLLDDIAYVLSVFKDGAEVEAELRKLSLPGGEKMIEALAGISFDKFHNLSLKALRKIVPHMEAGLRYDEACQEAGYHHSQPNQKGSGKTKYLPPFYAGRDKDGRMVFAEGLDVPKNPVVLRALNQARKVLNALVRRYGSPSFVHIEMARDLSRPLDERRKIAKAQEEYREKNEKDKVDFEAEHGIRAKSREFEKFQLYREQQGKCAYSLKPLDLHRVLFEPGYAEVDHALPYSRSFDDSKNNKVLALTEENRNKGNRTPYEYLTSFGGEEGERWRQFVAFVEANKNYRLAKRQRLLRKDFTGKAANEFRERNLNDTRYIGRFFKNYVEDHLQLKVGADGTVAKRCVVLNGQTTAFLRARWGLLKVREKSDRHHALDAAVVAACSHGMVKRLADYARTRELANIRGGFPDPETGEILDPGAFRQLAVHFPEPWPHFREELQARLKLDDPGELRARLEAFGTYPPEALAAVRPLFVSRAPQRRNGGAIHEETIRSAKRINDKVSYVKVPLQKLKLARLGDIVGATYSRNAPLIALLRERLEKYGDDGTKAFAEPVFKPSKNGKGSLVKSVKLASTQKSGIRVRGGVAEFGEMHHVDVFKCGNRYHFEPVYRARPESYINHPRIPDGAEFLFALSKNDYVRLCLDGVSYEGYFVMYESDGRMTLRAHDQPKPDKMYFRKRVANATNIQKFHVDILGNLYPARAEKRRGLA

SEQ ID NO: 1171 - protein, 1113 aa, unidentified
  REGION 1..1113: note = Description of Unknown: Cas Enzyme sequence
MAGNTQEALTFGFDIGIASVGWCVLGENRIVDLGVRCFDKAETAKEGESLNLGRRTARLMRRRLRRRVWRLVKLARLLKRSGLNCDPHRPSTISPWKLRVEGLDRRLSDDEWARVIYHLCKHRGFHWISRAEEKKAESDKQEGGKVKKGLSDTQRRMSEKGYRSAAEMVLAEFPEAQRNKQGDYGKALSRGLLSEELALLFLRQRELGNPHAGAELEAVILGNGDRKNGLFWEQKPPLAGADLLKMLGKCTFERDEYRAPKASFTAERHVWLTRLNNLRIVADGITRPLNEAERRIAMPLPYGYANAKLDYKQLRSALTKKTGLDNFNFAGVAEDKEKDPLVKLPGWEALSKTLKDKGLETEWEGMAGAAIGGDPTQLDDIARVLSVFKDGAEVETELRKLNLPGGAKMIEALVEISFDKFHALSLKALRKIVPHMEAGLRYDEACAAAGYHHSSQLRQDNDDKARYLPPLYSGRDKDGRMVFNGELDVPRNPVVLRALNQARKVLNALVRTYGSPAAVHIEMARDLSRPLDERNKVKKAQDEYRERNEKDKAAFVAEYGMAARSREFEKFQLYREQQGKCAYSLKTLDLHRVLHDIGYAEVDHALPYSRSFDDGKNNKVLVLTEENRNKGIRTAYEYLTSFPGGENGERWRNYVAFVETNKSYRLAKRTRLLRKDFGDKAAEEFRERNLNDTRYICRFFKNYVESHLKLAPKVGADEAADADTNKRCVVLNGQTTAFLRARWGLLKVRGDSDRHHALDATVVAACSHAMVKRLGDYARTKKLAKVRDGFPDPETGEILDPAKFQQLHAHFPDPWPHFRQELEARLNIDDPEELRGRLETLDTYPPEALAAVRPLFVSRAPQRRNGGAAHKDTIYSQPERLKPQGSVTQKVPLSSLKLTDLDRLIDPHRNEKLYAAIRARLEAHKGKGDKAFPPDNPLRKPDRDGDPTGPIVRTVTMVIDKLSGIPVRGGIAKNDTMLRVDVFRHKKDGKFHLVPVYVHHTVSKELPNRAIVAFKDEDEWTRIDDQQFDFCFALYPNDFVRVSLKSEVLQGYYAGCDRSTGNTGLWAHDRNQSVGKDGFIRTGVKTAVALEKFHVDVLGNLYPAPPEQRRGLA

SEQ ID NO: 1172 - protein, 1181 aa, unidentified
  REGION 1..1181: note = Description of Unknown: Cas Enzyme sequence
MESKSSPGPLTFGLDIGIASVGWAVFAPNRIVALGIRAFDKAETAKEGDSLNLVRRNARLMRRRLHRRAERLAKLARLLKRQGVIADAEFFQPKNVFSYSLWQLRVNGLDRPLNAEEWARVIYHICKHRGFHWTSRAEEKKAEGDTKGEGGKVKQGLAGTARLMQDKNYRSIAEMVLSEFPDAQRNKHGDYGKALSRTMLGEELALLFKRQRELGNPHAGPDLEVAILGSGNRKSGLFWVQKPALSGNDLLKMLGKCTFEKDQYRAPKASFTAERHVWLTRLNNLRVVVDGSTRPLNEQERRLALPLPYQQAGDLTYKQLRSALVKAGYLPDNFRFAGLAYPSAAQQAEGKAKDPESAALTKLPAWQELRLTLKKAGLDTEWQRVAGAAIDGRPELLDQIAWVLSVYKDDDEVSANLRELTLPGGDKAVDALLEIRFAKFHSLSIKALRKIVPHMEAGMRYDEACEKAGYHHSQLFKIGEGEQKYLPPFYSGRDKTGRMILSKDMDVPRNPVVLRALNQARKVVNALVHEYGPPHAVHIEMARDLSRRIEERSKISRAQDEYRERNEKDKGLFAEHFGQMPKGVEFEKWRLYREQQGKCAYSVEPIDINRLLEPGYVEVDHALPKSRSFDDSKNNKVLVHARENRDKGNQTPYEYLRGAEDSPRWRQFVAFVESTKAYRLAKRSRLLCKDFGTKEAEEFRERNLNDTRYICRFFKNYVERYLLLYEKSETKRCVVVNGMLTSFLRARWGLLKVRGDNDRHHALDAAVVAACSHSMVQRLSNYARRKELDQVREGFVDAETGEIVNPAMFQQLREHFPDPWPRFRDELEARLKIENPAALRAKMEELGTYPAEALERLRPIFVSRAPQRRNSGAAHMDTIYTKPRAGHVLMVEDKEAKKLTKGDGKMIFRPATADEKAGMAIGRISVTDKDSKGNYKLTLEKLNDIVDPHRNKRMIDSLYQWVMSRDRCEEEAKAIEASLGRGKEKRKPSDAERSELERLRALPRKPLKDDPENGPFTGPIIRSVKVNAGKMSGIQIRNGLAAQESLVRVDVFSKNGQFYLVPLYVADTIRENLPNHTADGETQIDNSFDFRFSLHPNDLTKVTLRGKGSILGYFRGYGGPPNPYNVTLAIHDRDKNGHERANEKGEISSIGVKTALALEKFHVDVLGNIFPARPESRHGLA

SEQ ID NO: 1173 - protein, 1117 aa, unidentified
  REGION 1..1117: note = Description of Unknown: Cas Enzyme sequence
MADKSLRNLGPLTFGFDIGIASVGWCVLGENRIIDLGVRRFDKAETAKEGEPLNLARRTARLMRRRLRRRAWRLTKLARLLKGAGIVNDAKLLHTPMMQSPWKLRVEGLDRKLNAEEWAHVLYHLCKHRGFHWISRAEEKKAEGDGGEGGKVKKGLADTKRRMTEKNYRSAAEMVLAEFPEAQRNKQGDYGKALSRVLLAEELTLLFKRQREFGNPHATPELETKILGNGDRKSGLFWEQKPPLSGVDLLKMLGRCTFEKDEYRAPKASFTAERHVWLTRLNNLRIVVDGNARPLNEAERQVALPLPYQQTGDFSYRQLKNALVKAGLVPENAKFAGLSYPTQQAEGKAKDPESERLIKLPGWQQLRKTLKDAELETEWQGIATQPELLDQVARVLSVFKDGSEVEQELRKLNLPGGEETKKRMIEALGEISFDKFHNLSLKALYKIVPHMEAGLRYDEAVAKIPEYGHHSQLFKAGEGRHKYLPPFYSGRDKDGRMVFDDKADIPRNPVVLRSLNQARKVLNALVRLYGSPAAVHIEMARDLSRPMEERNKIKKAQDEYRDRNEKAKVDFETEFHMAAKSREFEKFQLYREQQGKCAYSLEPLDLDRVLHDPGYAEVDHALPYSRSYDDGKNNKVLVLARENRNKGNQTPYEYLDGAGDSQRWRNFVAYVEGNKSYRLAKRSRLLRKNFGQEESKDFMERNLNDTRYICKFFKNYVERHLLLAESSEHKRCVVLSGQLTAFLRTRWGFNKVRGDSDRHHALDAAVVAACSHALVKRLSDYSRRKELEQAGNAIDMETGEIRDPALLAKLEQHFPKPWEHFREELLLRLNQDDPKLLKDEAARYGYPPEALESIRPLFVSCAPQRRNGGAAHKDTIYAQPERLKAEGGVTQKVPLSSLTLKDLDKLIDPHRNEKLYAAIRARLEAHGGKGDKAFPPDNPLRKPDREGNPTGPIVRTVTMVIDKLSGIPVRGGIAKNDTMLRVDVFRHKKDGKYHLVPVYVHHTVAKELPNRAIVAFKDEEEWTPIDEANFDFCFALHPNDLIRITQKNKSPIVGYYGSCHRGTGNLNIWLHDRSTASTKDGAIEGLGVKTAIALEKFHVDSLGNIYPAPPEKRRGLA

SEQ ID NO: 1174 - protein, 1111 aa, unidentified
  REGION 1..1111: note = Description of Unknown: Cas Enzyme sequence
MADKGIAPFTFGFDIGIASVGWCVLGDTRIIDLGVRCFDKAETAKEGESLNLARRMARLMRRRLRRRAWRLTKLARLLKRTGLIADVQQLHQPPDASPWRLRVDGLDRRLNDEEWARVIYHLCKHRGFHWISRAEEKKAEGDAKGEGGRVKKGLADTQRRMIEKGYRSAAEMVTAEFPEAQRNKQGDYGKALSRILLGEELALLFKHQRELGNPSAGAELEAAMLGCGDRRSGLFWEQKPPLAGADLLNMLGKCTFEKSEYRAPKASFTAERHVWLTRLNNLRIVVDGKTRGLNEVERRIALPLPYGYADAKLSYKQVRAALTKKADLSNFNFAGIAEDKEKDTLVKLPAWEALSKALKERNLETEWESLAGKAAGGDPIQLDEIARVLSIYKDGDEVMVELRKLDLPGGEKMVEALSEIGFDKFHALSLKALRKIVPHMESGMRYDEACAKAGYHHSQLHEAGTGSQTYLPPLYSGRDKNGRMVFSEELDVPRNPVVLRALNQARKVLNALIRKYGSPTAVHIEMARDLSRPLDERNKVKKAQDEYRERNEKDKAAFEAEFDMPAKSREFEKFQLYREQQGKCAYSLKPLDLDRVLRDTGYAEVDHALPYSRSYDNSKNNKVLVHAKENRDKGNRTAYEYLTSFSGGENGDRWRNYGVFVETNKSYRLAKRTRLLRKDFGGKATEEFRERNLNDTRYVCRFFKNYIERYLKLADGPDGTVAKRCVVLNGQTTAFLRARWGLLKTRGASDRHHALDAAVVAACSHSMVKRLGDYSRTKELSKVRDGFPDPETGEIVDPVKFQQLITHFPDPWPHFRTELESRLQIDDKAELAGQLEKFGTYSPEALDAARPLFVSRAPQRRNGGAAHKDTIYAQPERLKAAGGVTQKVPLTSLTLKDIDKLIDPHRNEKLYAAIRSRLEAHGGKGDKAFPPGNPLRKPDRDGNPTGPIVRTVTMVIDKLSGISIRGGIAKNDTMLRVDVFRHKKDHRFHLVPVYVHHAVARELPNRAIVAFKDEEDWTTVDKNFDFSFSLYPNDFIRIAQKNKQPISGYYASCHRGTGNLNLWSHDRNQKAGKDGQFEGLGVKTAVALEKFHVDILGNLYPAPKEERRGLA

SEQ ID NO: 1175 - protein, 1117 aa, unidentified
  REGION 1..1117: note = Description of Unknown: Cas Enzyme sequence
MEDKSSIVPLIFGFDIGIASVGWAVLAPDRIVALGVRAFDKAETAKEGDSLNLVRRTARLMRHRLHRRALRLAKVARLLKRHGVIEDVRLFLPEHPYLHPIWQLRIAGLDRLLSAEEWARVIYHLCKHRGFHWISRAEEKKAAADTKGEGGKVKQGLAGTAKLMQEKSYRSAAEMVLSEFPDAQRNKQGEYGKALARTLLGEELALLFKRQREFGNPHARPDLEIAVLGTGDRKTGLFWEQKPALAGDDLLKMLGKCTFERTEYRAPKASFTAERHVWLTRLNNLRIVVDGRTRPLHEPERRLVLPLPYLQASDFTHKQLRSALVKAGHLPDTFRFAGLAYPSAAQQVNEKAKDPETAALSKLPAWQGLRVTLKKAGLESEWQSLSRAAIDGRPESLDQIAWVLSVYKDDDEISAKLGDLALPGGEKTVDALLDIRFDKFHALSIKALRRIVPHMETGFRYDEACEKAGYHHSQLYKAGEGEQRYLPPFYSGRDKKGRMVFSEDMDIPRNPVVLRALNQARKVMNALVRQHGSPHAVHIEMARDLSRPIDERNKIRKAQDEYRERNEKDKGLFAENFGQAPKGLEFEKWRLYREQQCKCAYSVEPIDINRLLEPGYVEIDHALPYSRSFDDSKNNKVLVHAKENRDKGNQTPYEYLRGAEDSARWRRFTAFVESNKSYRLAKRSRLLRKEFGAKESEEFRERNLNDTRYICRFFKNFVERYLQLAESSEEKRCVVVSGMLTSFLRVRWGLIKTRGDSDRHHALDAVVVAACSHSMVQRLSNYARRKELDQIREGFVDGETGEIVNLAMFQQLREHFPDPWPHFRDELEARLKIDDPSLMRGEMERRGTYPLDALASLRPLFVSRAPQRRNGGAAHKETIYAQPERLKAQGGVTQRVPLSSLTLKDLGNLIDPHRNERLYAAIRARLEAHGGKGDKAFPPGNPLRKPDRNGDPTGPVVRSVNMVIDKLSGIPVRGGVAKNDSMLRVDVFTKAGKFHLVPLYVHHRVAKTLPNRAIVAFKDETEWTSIDESFKFCFSLYPNDLVRIQQKGKQPILGYFGSCHRGTGNINIWAHDRDQKVGKHGMIEGIGVKTALTLEKFNVDVLGSIFSANTEARRGLA

SEQ ID NO: 1176 - protein, 1154 aa, unidentified
  REGION 1..1154: note = Description of Unknown: Cas Enzyme sequence
MAVKGFGPLIFGFDIGIASVGWCVLGESRIVDLGVRCFDKAETAEKGESLNLVRRVARLMRRRLRRRAWRLTKLARLLKRAGLITDLQQLRQPLAISPWHLRVAGLDRLLSHEEWARVIYHLCKHRGFHWNSRAEEKKAEDDSKGEGGRVKKGLADTQQWMSEKSYRSAAEMVLEEFPESQRNKQGDYSKALSRKLLGEELGLLFKRQKELGNSLASHELQIAIVGNGDRKSGLFWEQKPPLAGADLLKMLGKCTFEKAEYRAPKASFSAERHVWLTRLNNLRIVVDGATRSLNDEERRTALPLPYKQVGDFTYKQLRAALTKAGQLPNNFKFVGLNYPYGTKAEETKTKDPELDWLVKLSAWQKLRNTLKDKNLETEWESIAGAAGCGDPTLLDEIARVLSIYKDGDEVAAELRKLALPGGEKMIEALSEVSFDKFHALSLKALRKIVPLMEGGLRYDQACAKVGYHHSQLHEPGRGSQTYLPPLYSGRDKYGRMVFSEDLDVPRNPVVLRALNQARKVLNALVRTYGSPKAVHIEMARDLSRPLDERNKIKKAQDEYRERNEKDKEAFAQEFKIPAKSREFEKFQLYREQQAKCAYSLRPFEVDRVLSDTGYSEVDHVLPYSRSYDNSKNNKVLVHAKENREKGNRTAYEYLTSFPGGENGERWQNYVAFVETNRSYRLAKRTRLLRKDFGVKAAEEFRERNLNDTRYICRFFKNYVESHLKLSDGTDGTTAKRCVVLNGQTTAFLRTRWGLLKARSDSDRHHALDAAVVAACSHRMIKRLGDYARNKELSKVNNGFQDPETGEIIDVVKFKQLQAHFPAPWPHFSAELKARLQLDEKAELHRQLAAFGTYSDRDLDASRPLFVSRAPQRRSGGAVHMDTIYGKPRRGHVLMVEIRERNRKLRRRATTQEIEGMVIERVGMFATADKGKKFRLTTDRLADIVGFERNARMVHALGLWLAARGDSPKQPGTREFPRKPRNGDPQNGPFTGPEIKAIKLNGGKMSGIEVRGGIAQNERLIRLDAFRKDRRYFLVPLYVFHRVARELPIKTADGSISVDESYEFLFSIYQNDLVEVRSGDGPVIRGYFRSYGGPPNPSNITLALHDRSAKGHPRANSKGEITSIGVRTALSLIKLNVDVLGNIYPAPREERRGLA

SEQ ID NO: 1177 - protein, 1110 aa, unidentified
  REGION 1..1110: note = Description of Unknown: Cas Enzyme sequence
MTGKAFGSLTFGFDIGIASVGWCVLGEDRIVDLGVRCFDKAETAKEGESLNLARRTARLMRRRLRRRAWRLTKLARLLRREGLIADAKLLQVASSKSPWRLRLAGLDCKLDADEWARAIYHLCKHRGFHWISRAEEKKAEGDAKGESGRVKKGLSDTQKRMNEMGYRSAAEMVLAEFPDAQRNKQGDYGKALSRVLLADEMALLFRRQRELGNPHADESLQARILGNGDRKSGLFWEQKPPLAGADLLKMLGKCTFERDEYRAPKASFTAERHVWLTRLNNLRIVVDGTTRGLNEDERRIAMPLPYGYANAKLDYKQLRAALTKAGLSHFNFAGIAEDKEKDTLAKLPAWEALSKALKGKGLETEWQSMAGAATGGDPTLLDEIARVLSVYKDGAEVETELRKLNLPGGQPMIDALGEISFDKFHALSLKALRKIVPHMESGMRYDEACVAAGYHHSQLHEAGTGGHKYLPTFYTRRDKDGRMVFDEELDVPRNPVVLRALNQARKVLNALVRTYGSPSAVHIEMARDLSRPLDERNKVKKAQEEYRERNEKDKAAFAAEYGIAAKSREFEKFQLYREQQGKCAYSLKPLDLHRVLHDIGYAEVDHALPYSRSYDDGKNNKVLVLTEENRNKGNRTAYEYLTSFPGGENGERWRTFAAWVESNKSCRLAKRTRLLRKDFGEKAAEEFKERNLNDTRYICKFFKNYVERHLQLKVGADGTAAKRCVVLSGQTTAFLRARWGLLKVRSASDRHHALDAAVVAACSHGMVKRLGDYARTKELSKIRDGFPDPETGEIVDPAMFQQLHAHFPDPWPHFRQELETRLGIDDVAELRAQLAMFNTYPTETLEALRPLFVSRAPQRRNGGAAHKDTIYAQPERLKEQGGVTQKVPLASLKLTDIDKLIDPHRNEKLYAAIRARLEAHGGKGDKAFPTDNPLRKPDREGNPTGPIVRTVTMVIDKLSGIPIRGGIAKNDTMLRVDVFRHRKNGKFHLVPVYVHHAVAQELPNRAVVAFKDEGEWTLIDDGFDFQFSLHPNDFIRITQKNKAPILGYYSSCHRGTGNLNLWAHDRSQKIGKDGQIEGIGVKTAVALEKFHVDVLGNIYPAPPEQRRGLA

SEQ ID NO: 1178 - protein, 1051 aa, unidentified
  REGION 1..1051: note = Description of Unknown: Cas Enzyme sequence
MAWRLALDMGTNSLGWAAFALNASGQPIELKDSGVRIFSDGREPSSKDRVGESLAVERRLARGARRNRDRRIRRKQQLMARLIQLGLMPEDKKSRKALETLSPYELRAAAVERPLTAHELGRALFHIGQRRGFLSNRKSDGDDEETGKIKPKISELRQTLGDQTLGQWMNDRLKRKKSIRFRGEDGDLYADRAMYLDEFDRIRAIQAPHHDLSPADWDDLRNGNKGQAFDGIFYQRKLKSVDKGRCEFFIEEFRAHKDLPIAHAFRILQEVGNLQYYDENQQKHELSHDQREILIQKLTAQKTLSFSKIKLLKNPDGLPLFPRECLFNLENGPRDKLNGNATAVEMRKPDMLGSLWDDLTADQQNDLIELLHDADEDEQLTKDLMAGFSFTAEQAKAVSKFKLSSTTTHLSRKFMTRCAAIMRENNLGYDAAVREVYDDDGVFFHHSKYDVDVLLERLPYYGELLKGSVIGAKPAEYNAQDNPEQHYGKINNPTVHVALNQTRKLINRLMDRFGPPAEIHVELVRDLKKTAKARDDIAKQNKQFAKANDGRAVLFRELNNGQDPSGLDLKKIRLWEELGSDQLTRHCPFSGKVISATMLFNGEAEIEHILPFSRTLDNGTANLTVAIRQANRLKGNRTPYEAFAHGQHADQGMIWHDIAERAKALPKNKRWRFDADAMDRFEQEGGFLARQLTDNAYISKLTKRYLSHICDQNKIATIPGGLTAMMRGKWHLNSLLGDHNYKERNDHRHHAIDAFVVGLTDRGMLKRVADNTKRGADGLNHIDLPDITPLRHQLRDRLPDMLISFKPDHGTNGKMYKETAYGIVLPEKQDPDLKGYNLVTRKKLVVLNEKEIGAIRNRGWRNRVEQHIYEAKAAGVKLDKNGLAKVLADFGRDNNIKTIRILVSNQSATKIPSAPFKAYAPDSFVCVDIWQVPKGKAGKWKKGEVDWKGAFWSFADCKGVTPDKNDGKIDDKAIHPAAKFITRLFKNDMVELEYNGDLKIMRVGGFSTTNNKIDLRPQFDTDGKRQYISINVLKNNFIRKLHLHEDGSRKG

SEQ ID NO: 1179 - protein, 1193 aa, unidentified
  REGION 1..1193: note = Description of Unknown: Cas Enzyme sequence
MKTGYIWAFDLGKGSIGEAVRQGGIFPHAESLLMPAELARRGPASLSGTPANRYRAMKTREAHHERERWLETVWRTAGLTPLIPREVWENPQTGKWELKRKGDFQLEREFAPKLGEKTKDGAPSDAAGAEICYTSCLLRIRLLQGDSQLNKWQIFKALRAALQCRGYGPVPWATKEARKLGKTPKELQEEEDKKLQQVDARYRDALGKWPEFKRSVPRQFHFPCFYDASKIGLWNASDPSKLLQRANHLADSTRNVRFDRADVRDELIKLGNQAAEILPELRTAFTYWQKDGWKFRHPNGKELTYPVRAKTFGEFLCDGPAGKPDETSFEAFLNQRRDVKVQRGSYEEWMAALGQKTPSFDNRILNNCVLIPRFHVCKVDVRLKTKKDENKNDKLTGEIFQESLLASEVTFLLKLKNLLVADGQRKLTAGEIQFIFNYAHRQLKELQLVTPGGELIKNWPGKVADCFALSKSEWGGKKSLSKLALRPMPGHEEVKAPKTSGRSAYSRVALRILKELILSGKAPSVFHAQLLQRDADLLRRLGSGPDRPLALFNDSVAKDEKQRARENNESCKHGVLVSELNFLCQMRKDNAVADSWENIFVPSQTLDALQQRHTDDGKLDADAAIRELLGTINDPIVRHRLGVFATRLKKLQHGDKKEEIPGYGVPDVIVLEFVREDFMGEEAVKKYQRFLNERADERKAAREEAGKLGLESRSSGLRYELFKAQGCICLYTGKSLSETSLDEYEIDHIVPRSLGGPDAAVNYVLTFHDVNHTKEKGKLTPFALLNGKEGWDAYLNRVKACATALRNKKVQLLTRQDAPELVQRYTALAETAWISKLAQTIATLHFGWTNGYDEKREKRVIVVSGGLTARVRRKYSLDKLLYTDTTDLEVLAKKVKNRADKRHHALDAMVLTFIPQWTRDPSKEGFFRFPSEFQDSKGREDYERIRKIFQDSLAKTTPKHIAFERPVLADTIYARRDNNTTIVQKSPLRELAYKQEQMKLVFDLKYAASQIEAVRDARIRQELKIKLAEQPNQAEWERFCETFRQKRKDGSLGARIIRVALNRDEDPAEFADLSKDHTGAFRTKKKEHRGQFIYLDGKGRPHVRAVRVFESLAAVKAGVSELGKEIQVVGFFQSMCLVELEKPVVHGSTVLQPGKYQLNTIKKDGRAQLTSASGIKSPEIGLVKLLPAGFKRI

SEQ ID NO: 1180 - protein, 1100 aa, unidentified
  REGION 1..1100: note = Description of Unknown: Cas Enzyme sequence
MRWRLGLDMGTNSIGWVVIALNNDNKPISLRDMGVRIFPDGRKPATNGRVGESCAVERRTARGMRRNRDRRINRKKYLARLLTKYGLLPFSGTGENKQLFGNLKNTKGPNPYELRARAAEKAVQPYELGRALFHLGQRRGFKSNRKTGAEEDGQFYGKIHNLRDELAGQTLGAYLWKEVQRGKPVRFRGEENGFYPDRKMYEDEFTAIRERQESHHSLTSEEWDNLHDAIFHQNPLKDVERGKCRFYTKEDRAYSGLPIAQKYRIIQDINNLEWIEQTGTGIIYHKLSDEQRLAIFNKLHQQVANLKWDAIRKLKGKDGSNLFPDDCKFNFESSRPSGFVGNKPEIDLAKAFGDRWQEWSEAEQNDIAEYLYEAEEEDAILNKAAEWGVDESTAKAVAKVKLPQRTMSVSRKFMEDIVPIMRETGKRYDEAIKELKNEYGQPLNHTPLDEGIIDDELPYYGQVIEGSTLGAHPEVEENAETDDTRDAVEYKYGRINNPTVHVALNQLRKLVNRLIKAYGHPEQIHIELSRDLKKSKKERDEINAEISANERENQRRAKIFQDLHNGQEPSALDLKKIKLWEELGKDEFTRKCVFSGETISAAALFNGEAEIEHILPWSRTLDDSMSNLTVSLRHANRIKKNDTPYEARLRFAALGWAWEDIVRRAANLPDSKRWRFTEDAMSRFEKENGFIARQLNDNAYISKVAKRYLGRICNPDNIVSSPGRLTALLRGKWHLNTLLNDHNHKQRNDHRHHAIDALVVGLTERSVLNEISRQSGRGADDRMRIVVPDLPIDREEVRQKLEEVVVSHKRDHTKNQKFFKDGAYGFVNQNARDKEMPDHNLVITKELTSLSETEILCIRDKVLRSAIKDFVNRELCVDLELAARHSKGLKTEEEKTLQKQYKSILKKSLPMCLHRFGYEVWPAQKAKKRKGENSPDMRPPLKRVRILVSNQSVKSIPSAPYKGYVPDSYVCCDIYRVPKGEKGNWKKKQYEWKGEFRSHIDMLKPPKDLNQWKPHPAAKHVMRLYKNDMVSLNENGKETYMRVASFSATNNKLDLRPHTEAVGAQKKYVSINTLQDKGLKKVKLTEDGKIEPFHHGRTSR

SEQ ID NO: 1181 - protein, 1074 aa, unidentified
  REGION 1..1074: note = Description of Unknown: Cas Enzyme sequence
MRLGLDIGTNSIGWWLYSTEERDIVDVIDGGVRIFSDGRDPKSKASLAVDRRAARAQRRRRDRYLRRKAALMKRMAQAGLMPTDPGEAKALELLDPYRLRAEGLDRELQLTQFGRALFHLNQRRGFKSNRKTDRGDNESGKIKDATARLDLEMMRRNARTYGEFLHMRRATATDPKRVPTVRTRLSVAARDNAEKEEAGYDFYPDRRHLSKEFEKLWAAQAVFHPDILTDELRDEIALIIFHQRPLKTPEVGLCLFTDEKRIPSAHPLNQRRILVETVNALRVAARGEPARALSMEERDQILHALDNKKHTKSLSGMSLKLKALGKLIGLRADQHFTLETANRDAIACDPVRASLSDSRRFGSRWSRLDAEVQWQVIERIRAVQSEAEHHALVEWLKTTHGLDREQAEGVADAPLPEGYGRLGLKATTRILAALEADVIPYSEAVARCGWHHSDERTGKVLTELPYYGAILERHVIPGTYNEKDDDVTRYGRITNPTVHIGLNQLRRLVNRVITVYGKPDEIVVELARDLKLSEDQKLDVQRDIKKNTEAAIRRGKKLKELGVPNTGANRMVLRLWEDLGEDVMTRNCPYSGQRISAAMLFDGSCDVDHILPYSRTLDDGFANRTLCLKELNRQKTNKTPWEAWGETDQWEAIATNLKHLPKNKAWRFAPDAMERFEGENDFSARALKDTQYLSRIAQAYLNALYDGGDGKSHVWTVPGRLTEMLRRHWGLNSLLPDKEGAAKAKNRSDHRHHAIDAAVVGATDRKLIKRISEMAKRDEIAGAEEVARSVAPPWEEFRTDIAEQVQRIIVSHRADHGRIDSATRKSGRDSTTGQLHNDTAYGLADGDTVVSRKPLISLKPNDIAISKRGANIRDADLQRHLARVTRGLEGKAFELALSEFANSPRLPDQSDNPYFGLRRVRLEETLQESARVSVADRNGKPFKAYKGDSNHCYEIWRMPDGKLKSQVITTFEAHKTGPARKPHPAAKRLLRVFKRDMVAIERDGENIIGYVQSLHVANGLFIAPHSQANADARNRDKADPFRFIQMSAGPLIKSNARRVHVDEMGRLRDPGPRT

SEQ ID NO: 1182 - protein, 1068 aa, unidentified
  REGION 1..1068: note = Description of Unknown: Cas Enzyme sequence
MRLGLDIGTNSIGWWLYATENGAITEVIDGGVRIFSDGRDPKSKASLAVDRRVARAQRRRRDRYLRRKAALMKRMAEVGLMPADPTEAKVLELLDPYALRAQGLDQALPLTQFGRALFHLNQRRGFKSNRKADRGDNESGKIKDATARLDQAMMVKRARTYGEFLHMRRASAPDERQVPTVRTRLSIAKRDNAEKEEAGYDFYPDRRHLAEEFDKLWAAQAAHHPVTLTDDLRDEIQTIIFHQRPLKAPKVGLCLFTDEPRLPSAHPLNQRRILVETVNALRIAARGEPARALTREERNQILHALDNKAHTKSLSGMSMKLAALGKVIKLRKGQSFTLETANRDAIACDPVRASLSHPDRFGPRWSGLESAAQWEVVRHIRDVQSEAEHDTLVTWLMTTHALDRDHAEATAHAPLPEGYGRMGLTATTHILAALEADVIPYSAAVAACGWHHSDGRTGEALEALPYYGQILDRHVIPGSNIERDDDVTRYGRITNPTVHIGLNQVRRVVNQIITVYGKPDEIFVELARDLKLSEDQKRDVQRDIKKNTEAAIERGKKLEEMGIPNTGANRLRLRLWEDLGPPIGPRCCPYSGQAISASMVFDGSCDIDHILPYSRTLDDGFANRTLCLREFNRQKTNKTPWEAWGNTPSWDAIAANLKNLPPNKAWRFAPDAMERFEGENDFTDRALKDTQYLARIARTYLDALYDGGDRQRHVYVVPGRMTEMLRRHWGLNSCLPDKDGAVKAKNRTDHRHHAIDAAVVAAIDYGLISRISKAAGRDEESGKGAEDIARSTPEPWDGFRDDIRAQLDKIFVSHRADHGRIDREGRKLGRDSTTGRLHNDTAYGIVDDQTVVSRTPLLSLKPGDIAVTNSGKNIRDPHLQGLLFKAAQGKEGKALEAALQEFAARTGPYQGIRHVRLIESLQASARVEIPDALGTSFKAYKGDSNYCYEIWRMPDGKPKAQVITTFEAHSDSARRPHPAAKRLLKVFKRDMVAIDREGERMICYVQSMHVANGLYLAPHTEANADARNRDKTDRFKFLQMAAGPLLKAKIRRVYVDEIGRLRDPGPAV

SEQ ID NO: 1183 - protein, 1091 aa, unidentified
  REGION 1..1091: note = Description of Unknown: Cas Enzyme sequence
MQQQEYILGLDIGIASAAAVLLGENRIIDIFVRTFEKAETADRGESLNKVRREAGVVRRRLRRRASRLSNLRRLMVDAGLIDSPSPGEFQKLPKEAGPEIPKELWSPWELRAEGLDRKLEPKEWASILYHIVKRRGFHSNRKSETISGEETEKTVGEMLAGIQSSQLVIKQYRTIGEAFDKDPLFQGAKRNKDGEYKRTVSRIDLEAELRKLFDVQRSLGNPHADEAFEDAVHELLMQRRPALSGNALLAMVGNCTFETDEKRAPKASFLAERFVWLTKLNNLRIFQNGRIRPLDDQERNKIIELPFTQARLTYQQVRRILDLDVHATFSGVQYNNKKAKKSANPEDATFFEATAFHRIRRAYETSELGERWNQDRHNAALLDDIAFAMTCFKEDSESKEYLQKKGVNEAVIDAVLSVSFEKFISLSQRALQKIVPFMEQGKRYDEAVIEAGYEHHSQFKKQITTGYIPKPDKDVIRNPVVFRAINQCRKLVNAIVKKYGPPKEIRIELSRDLSRAKDERDDITRKQKAFQVEKESVRKRFEETHGRKLNNKDLLKARFYEEQDCKCAYSLKPIVVNRLFEPGYVEIDHVLPLSRSFDDSMNNKVLVLISENQNKGNRTPFEYLGGKNDSDQWRDFHSWVSTNKKLRRAKQNRLLRTEFINSANEFRARHLNDTRYIAREFKQMLETYLRWSDSTDKQDRCVVVNGQIISLLRARWGLLKVREEGDLHHALDAAVVAACNRSFIKRMTEYSKRKELAMVKSGYVDPETGEVINPTALEMLKEQFPVPYPSFREELLARLSPDPGVHKSMPGYTNEEWQAVKPIRVSRPPSRRGLGEAHEATIRSIGRGGKLLEEGKSSKKTSLRDLTKASIENIVGKDRDKVLFSAISERMKKHGYDAKKAFATPLYKTLTGEPDAEGRAPLIRSVKVLNPSQKSGILVRGGIADNGSMIRLDIFTKANRFFAVPIYASDVAKGALPNRAVVSGKPESEWLVLDDSYTFLFTLHPNDWLRVQRKHDVVEGYYSGFDRWTGAVHIRAHDRNPRFGKDGLRRGIGIRTVDVLAKFHVDIFGNLHPARNEVRAPLQRPKGKDRR

SEQ ID NO: 1184 - protein, 1115 aa, unidentified
  REGION 1..1115: note = Description of Unknown: Cas Enzyme sequence
VEGNTRNLTYGFDIGIASVGWAVLAPDHIVALGVRAFDKAETAKEGESLNLARRNARLMRRRLYRRAWRQTKVARLLKREGLIADAQFFHNQLPAPVSPWHLRVEGLDRLLSPEEWARVIYHLCKHRGFHWINRAEEKKAGEDTKGEGGKVKQGLAATSRMMQEKGYRTAAKMVISEFPDAQRNKQGSYDKALSRALLAQELEILFQRQRELGNPHTGDAFQVAILGNGDRKSGLFWSQKPALSGENLLKMLGRCTFEKNEYRAPKASFTAERHVWLTRLNNLRIVVDGVTRPLNENERRIALPLPYNQAGDLTHKQLRAALIKAGAIDNNFRFAKFPYAQSADGKTKDPESAVLVKLPAWQELRKTLKDKGLETEWQTIAGTALAGNPELLDRIAWVLSVYKDDNEVERELGKLGLPGNKPMIDALGEIRFDKFSNLSLKALRKIVPHMESGMRYDEACETAGYHHSQLFKLGEGEEHYLPPFYSGRDKDGRMVFKDDTDIPRNPVVLRALNQARKVINALVRKYGSPASVHIEMARDLSKPFDERRYIKKEQDEYQKRNQEDRTRFTEHYGQAPKGQEFEKWRLYREQQGKCAYSIEPIDLNRLLEPGYVEIDHALPYSRSFDDSKNNKVLVLAKENRDKGNATPYEYLDGANNSERWQRFVAYVEGNKAYRLAKRTRLLRKNFGTEDAKDFRERNLNDTRYISKFFKNYVERYLKLADDSESKRCVVLSGQLTAFLRARWGLMKIRSDSDRHHALDAAVVAACSHSMVKRLSDYARRKELEAVREGFADLETGEIVNPAMYQQLHEHFPDPWPQFRHEMKIRLGLDEDIKDDATKLKAAMESLGTYQSEELDALKPLFVSRAPQRRNSGAAHKDTIYAQPKCLKDQGGVTQKVPLSSLTLKDIDNLIDPHRNEKLYAAIRKRLEAHGGKGDKAFPASNPLRKPDKNGDPTGPIVRAVTLVIDKLSGIPVRGGIAKNDSMLRVDVFTKGGKFHLVPVYVHHRVKGLPSRAIVAFKDESEWTPIDDSFDFCFSLHPNDLVRVTLKKESHLGYYSSCNRSTGAVNLWSHDRNKDIGKDGLIESIGVKTAVALEKFHVDVLGNIYPAPPEIRRDLA

SEQ ID NO: 1185 - protein, 1044 aa, unidentified
  REGION 1..1044: note = Description of Unknown: Cas Enzyme sequence
MYAPSIKPKPQKEGESLNKIRRDARLIRRRIRRRAHRLVRLARLMKRYGLIEAATPESFALPDVSPWTLRAEGLDRLLEPKEWASVLYHLVKHRGFQSNRKSEAKADEKAGQMLSGVSRNQALLKETGYRTMGELAAKHETFTDAKRNKGGAYTHTFARADLEAELALLFERQNAFGCRIASADFYAAVHDLLLARQPTLSGANLLKMIGKCTFEKSEFRAPKASYRAERFVWLGKLNNLKIVGGGDARSLTDAERRIIIDLPFTQAKLTFKQVRKALALEAHQRFNLLSYRFDPKGRDKDPEESTLFEAKYFHTLRKAYEAAGLKAEWQRDAIHSDRLDALAYAITCYKDDTEARDWMAAQGIESQIIEAVLGDSFDQFIQLSQKALKAILPHMEAGQRYDEAVKSAGYNHSQPDAATEKRKTLPAPDKDIIRNPVVYRALNQARKLVNAIIAEYGPPAAVHIELARDLSKPWDERKKIEREQKEFQVEKEKAFADFEDRFNFRPKGPDLQKWRLFREQLDQCPYCQQALEVDRLFEPGYAQVDHALPYSRSFDDSMNNKVAVHTKCNQDKGNRTPYEAFDGASGSDHWQRFEAWVQSNKAIRQAKRNRLLRVNFGAEEAEEFRDRNLNDTRYICKEFKRMVETHLAWHPDSTADNRCVVLSGQLTSLLRKHWGLIKVRSEGDLHHALDAAVIAATSRSLIKRMSDYSRRKELATLRTNIPDPESGEIIDVAALRQIEEHFPMPWPYFCDELLARLSANPSQQLECITSYDEAMRNSIQPVRVSRAPTRRGLGAAHEETIRSMGKAGKLLAGGQSAIKTPLASLTLKDLDNIAEQRDTALIEAIRERLTAFGGDGKKAFAPNQPPLRKPSGEGKAAPIIRSVKLLATQKSGIHIRGGIAKNGAMLRADIFTKAGKFHAVPVYVSDAIKAELPNRAVIQAKPEEEWTVMDETYQFLFSLHPNDWVTIRLKNEVREGYYAGINRATGNIDLWLHDRNQTLAKNGMLEGNGIKTALAVEKYHVDLLGGLHRVHHEERQPIHRKRGR

SEQ ID NO: 1186 - protein, 1151 aa, unidentified
  REGION 1..1151: note = Description of Unknown: Cas Enzyme sequence
VKGNNKNLTFGFDIGIASVGWAVLTPDRIVALGVRAFDKAETAKEGESLNLARRSARLMRRRLYRRAWRQTKVARLLKREGLITDARLFHDQRPAPVSPWQLRVDGLDRLLAPEEWARVIYHLCKHRGFHWISRAEAKKADEDTKGEGGKVKQGLAATTNKMRAKGYRTAAEMVLAEFPDAQRNKQGDYGKALSRILLAEEVGLLFERQRTLGNPHTGEDFQSAMLGNGDHKSGIFWLQKPALSGAGLLKMLGRCTLERDEYRTPKASFTAERHVWLTRLNNLRIVVDGETRPLNTREREIALPLPYQRAGDFKHEYLRAALTKAGVLDASFRFAKFTYAQTQEGKEKDPESEVLVKLPAWQEIRKQLKDKGLETEWQGMAGAALAGNPNLLDQIPWVLSVYKDDTEVELELGKIGLPGGQAMIDALCELRFDKFSALSLKALRRIVPHMETGLRYDEACVVAGYHHSQFNKPDTEKERYLPPFYENRRGKGPGQEGRMIFSERVERDISGGIPRNPVVLRALNQARKVMNALIREYGSPASVHVEMARDLSRPMNERSKVKKMQDEYRERNDRIKATFATEFGIPAKSREFEKFQLYTEQYGKCAYSLEALDLHRVLHDIGYAEVDHVLPYSRSYDDSKNNKVLVLAKENRNKGNATPYEYLGGASDSERWRRFAAWVEGNKSYRLAKRTRLLRKNFGEEEAEGFRERNLNDTRYICKFFKNYVERYLKLADESESKRCVVLSGQLTAFLRARWGLTKIRSDSDRHHAMDAVVVAACSHGMVKRLSDYSRRRELESVRDGFVDPATGEIVSPAMFDQLERHFPTPWNTFRHELETRLLTDESAQLRADIERLGTHAPEMLDALKPLFVSRAPQRRNGGAAHKDTIYAQPDRLKMQGGVTQKIPLANLTLADFGEPGNDAKPCRLIDPHRNEKLYAAIRARLEAHGGKGDKAFPASNPLRKPDRDGNPTGPIVRTVTKVIDKQSGIPIRGGMAKNDTMLRVDVFTKGGKFHLVPVYVHHRVKGLPDRAIVAFKDEAEWTLIDESFAFCFSLYSNDLIKVTQRSGEKIYGYYRSCHSGTAAINIALHDRYAFGEKTTSLAFHRKNPSKPIPNDKLGLIEGVGVKLAANIEKFHVDVLGNLYPAPPEKRRDLA

SEQ ID NO: 1187 - protein, 1112 aa, unidentified
  REGION 1..1112: note = Description of Unknown: Cas Enzyme sequence
MLSYTLGLDIGIASVGWCVLGEHCIIDLGVRAFDKAETAKEGDSLNLVRRSARLMRHRLGHRAWRLKKLARLFKRRNLIDDTRLFSPQHPFPYSIWKLRAEGLDRMLNREEWARVIYHLCKHRGFHWANLAEENQADTDSKSEGGKVKQGLAGTKKLMAEKNYRSAAEMVLAEFPEAQRNKQGEYTKALSRALLGDELAALFKSQRELGNPYASLELEADILGNGDRKSGLLWAQKPALAGADLLKMLGKCSFEKDHFRAPKASFTAERHVWLTRLNNLRIVVDGTTRSLSPQERALALPLPYQQASELTYKQLGSALVKAGLLDKDTFKFTGLSYPSEKQKTEGKAKDPETATLVKIPAWQELRATLKKAGLETEWEGMAGAACYGEPEILDKIAVVLSVYKDDDEVRHELEKLPLPSPGKMVVALLGIRFDKFHALSLKALRQIVPHMETGLRYDEACVAAGYHHSQLYKLGEGELKYLPSFYAGRDKDGRMVFSEDADIPRNPVVLRALNQSRKVVNAIIQLYGAPMAVHIEMARDLSKPFEERGKIKREQDEFRERNEKDRNDFAQHFDLISSPKGSDFEKWRLYREQMGKCPYSMEAIMLERLLEPGYVEVDHALPYSRSFDDSKNNKVLALTRENRNKGNRTPYEYLGGAEDSQRWCQFVAFVETTKAYRLAKRSRLLRKDFSSKEAEEFRERNLNDTRYICRFFKNYVERHLQLAESSEAKRCVVVSGQLTSLLRARWGLIKVRSDSDRHHALDAAVVAVCSHSMVKRMADHARRKELNQVRDGFVDVVTGEIINPAMHEHLREHFPAPWPHFRHELEARLKIDDPTLLNAEMAQLGTYPSEVLESIRPLFVSRAPQRRNGGAAHKETIYAQPERLKAQGGVTQKVPLSSLTLKDLDKLVDAHRNQKLYTAIRERLEAHGGKADKAFPPSNPLRKPDRNGGATGPIVRTVTMVIDKLSGIPVRGGIAKNDSMLRVDVFTKAGKFHLVPVYVHHRVTGLPNRAIVAFKDEDEWTLIDDSFGWCFSIYPNDLVRVKLKSESHLGYYSGCNRSTAAINLWSHDRNRTIGKDGMVQSIGVKTALSLEKFHVGILGNIHPAKPESRRGLA

SEQ ID NO: 1188 - protein, 1110 aa, unidentified
  REGION 1..1110: note = Description of Unknown: Cas Enzyme sequence
MTGNRYTLGLDIGIASVGWCVLGTDRIIDLGVRAFDKAETAKEGDSLNLVRRSARLMRRRLRRRAWRLTKLARLLKRQGLIGSAQLFQSQQAFQNSLWQLRVNGLDRLLTSEEWARVIYHLCKHRGFHWTSRAEEKQADGDSKGESGKVKQGLAGTAKLMKEKGYRSAAEMVLAEFPNAQRNKQGDYGKALSRILLGDELNQLFQKQCEFGNPYADTALKEAILGNGDHKSGLFWAQKPALAGNDLLKMLGKCTFEKAEFRAPKASFTAERHVWLTRLNNLRIVIDGTTRPLNEQERRAALPLPYQQAGDLTYKQLRSTLIKAGALSESARFASLAYPSETQKTEGKTKDPEAQTLVKLPGWQELRLTLKKAELETEWQGMAGAAMDGRPELLDQIAWVLSIFKDDDEVIRGLHKLPLPTMNKMVDVLLNIRFDKFHALSLKALCQIVPHMENGLRYDEACVQAGYHHSQLHKAGEGELKYLPPFYQGRDKDGRMLFHEDADVPRNPVVLRALNQARKVVNAIVRRYGQPLAVHIEMARDLSRPFDERSKVKKEQDEYRSRNEKDKAEFAIQFDLIGSPKGGDFEKWRLYREQQGKCAYSIAPIDLNRLLEPGYIEVDHALPYSRSFDDSKNNKVMVLAKENRDKGNRTPFEYLGGAEDSQRWRNFVAFVETNKTYRLAKRSRLLRKDFGKKEAEEFRERNLNDTRYICRFFKNYVERYLQLAADSEAKRCVVLSGQMTAFLRTRWGLNKVRSDSDRHHALDATVVAACSHSMVKRLSDYARRKELNQVREGFVDIATGEIVNPAMFQQLREHFPDPWPQFHHELEARLKIDNPALLSEEMARLGTYPPEALAAMRSLFVSRAPQRRNSGAAHKDTIYAQPERLKAQGGVTQKVPLTSLTLKDLDKLVDPHRNGKLYSAIRARLEANGCKGDKAFPASNPLRKPDRDGNPTGPVVRTVTMVIDKLSGIPVRGGIAKNDSMLRVDVFTKAGKFHLVPVYVHHAVAKTLPNRAVVGKKDESQWTVIDDNHVFQFSLYPNDLFQLTVDRESVFGYFNGININDCGLKYFPHDQKNVESLKKKGVSTAAEFKKFHVDVLGNIYPAQWEARRGLA

SEQ ID NO: 1189 - protein, 1078 aa, unidentified
  REGION 1..1078: note = Description of Unknown: Cas Enzyme sequence
MQKENRPYTLGLDIGMASVGAALLLPEKQRILALYVRTFDKAETAKEGESLNKIRRDARLIRRRIRRRAHRLVRLARLMKRYGLIEAATPESFALPDVSPWTLRAEGLDRLLEPKEWASVLYHLVKHRGFQSNRKSEAKADEKAGQMLSGVSRNQALLKETGYRTMGELAAKHETFTDAKRNKGGAYTHTFARADLEAELALLFERQNAFGCRIASADFYAAVHDLLLARQPTLSGANLLKMIGKCTFEKSEFRAPKASYRAERFVWLGKLNNLKIVGGGDARSLTDAERRIIIDLPFTQAKLTFKQVRKALDLEAHQRFNLLSYRFDPKGRDKDPEESTLFEAKYFHTLRKAYEAAGLKAEWQRDAIHSDRLDALAYAITCYKDDTEARDWMAAQGIESQIIEAVLGDSFDQFIQLSQKALKAILPHMEAGQRYDEAVKSAGYNHSQPDAATEKRKTLPAPDKDIIRNPVVYRALNQARKLVNAIITEYGPPAAVHIELARDLSKPWDERKKIEREQKEFQVEKEKAFADFEDRFNFRPKGPDLQKWRLFREQLDQCPYCQQALEVDRLFEPGYAQVDHALPYSRSFDDSMNNKVAVHTKCNQDKGNRTPYEAFDGASGSDHWQRFEAWVQSNKAIRQAKRNRLLRVNFGAEEAEEFRDRNLNDTRYICKEFKRMVETHLAWHPDSTADNRCVVLSGQLTSLLRKHWGLIKVRSEGDLHHALDAAVIAATSRSLIKRMSDYSRREELEQVRNRYIDPETGEVLDLSALRQIEADFPKPWPHFRDELLARLSANPSQQLERITSYDEAMRNSVQPVRVSRAPTRRGLGAAHQETIRSMGKAGKLLAGGQSAIKTPLASLTLKDLDNIAEQRDTALIEAIRERLTAFGGDGKKAFAPNQPPLRKPSAAGKAAPIIRSVKLLATQKSGIPIRGGIANNGAMLRADIFTKAGKFHAVPVYVADAIKAELPNRAVIAFKPEEEWTVMDETYQFLFSLHPNDWVTIKLKGETKEGYFSGLDRATGAVSLWLHDRNQTLGTTGQWRGIGIKTALAVEKYHVDLLGGLHRVHHEEPQPIHRKRGR

SEQ ID NO: 1190 - protein, 1127 aa, unidentified
  REGION 1..1127: note = Description of Unknown: Cas Enzyme sequence
MSATYTIGLDIGIASVGWCVLGEAHILNLGVRAFDKAETAKEGESLNLVRRNARLMRRRLFRRAWRLKKLTRLLKSEGLIADTKAFQPEHAFTHPLWQLRVDGLDCRLNNEEWARVIYHLCKHRGFHWISRAEARQAEGDSKSEGGRVKQGLAGTAALMAGKGYRSAAEMVINEFVKPQLDNGGLIKTDKQGNPIPTGAARNKQGEYAKALSRELLARELALLFEKQREFGNPHASSALQTAILGNGDKKSGLFWQQKPALAGADLLKMLGTCTFERGEYRAPKACFTAERHVWLTRLNNLRIVTDGVTRQLTEQERQLCLPLPYQQAGDLTYKQLGTALTKAGLLEAGSFKFTGLAYATEAQKAEGKAKDPESATLIKIPAWQELRQTLSKAGLDDEWKTLSGDALCGQTEIFDQIAWVLSVHKDDDEVRAELANLALPNRDALIDALLNIRFDKFHALSLKALRAIVPPMEKGLRYDEACVEAGYHHSQLHKVGEGEHKYLPPLYAGRDKNGRMRFAEDADIPRNPVVLRSLNQARKVVNAIIRRYGSPTAVHIEMARDLTKPLKGHWNSQGKFIEGRQDIQKEQLEFQARNQRDKEQFIELFGHPPKGLEFEKWRLYREQNGQCVYSQRPLAPSGNVAEIFLEGSTEIDHALPYSRSFDDSKNNKVLVLTRENRDKGNRTPYEYLGGAENSERWQRYVAFVEANKAYRLAKRTRLLRKDFGTKEAEEFRERNLNDTRYICRFFKNYVEQHLKLAEGSEAKRCVVVSGQLTNFLRARWGLLKVRSDSDRHHALDAAVVAACSHSMVQRLSNYSRTRELEQVRDGFVDIETGEIVNPAMNRQLHEHFPDPWPYFRHELEARLKIDSPELLREEMARLGSYREEELAALKPLFVSRAVQRRGSGAIHEETIRSSKRIANNQSHVRVSLQKLKLASLSNIVGAGDPRNASLIDLLQKRLIEFNDDAKRAFAEPIFKPSRDGDGPQVKTVKLISTQKGGMKVRGGVAELGDMLHVDVFRDGKRILIEPAYMAHNSARIAPSSIPDSAEFLFSLTKNDLVAVTLGDVTYQGYFVMYESDGRLTLRAHDQPKPDKDYFRKSVASAKRIQKFHVDTLGNIYPAPSEKRRGLA

SEQ ID NO: 1191 - protein, 1111 aa, unidentified
  REGION 1..1111: note = Description of Unknown: Cas Enzyme sequence
VEGNNKNLTFGFDIGVASVGWAVLAPDRIVALGVRAFDKAETAKEGESLNLARRSARLMRRRLYRRAWRQTKVARLLKREGLIADVQLLRDQHRTPASPWQLRVDGLDRLLSAEEWARVIYHLCKHRGFHWISRAEEKKAGEDTKSEGGKVKQGLADTKRRMNDKGHRTAAEMVLAEFPDAQRNKQGSYDKALSRVLLAEELETLFSRQRALGNPHASEPMQAELLGGGDCRSGLFWMQKPALSGDNLLKMLGRCTFEKSEYRAPKASFTAERHVWLTRLNNLRIVVDGATRALNEQERRVALPLPYNQAGDLTHKQLRAALLKAGVLDESFRFARFPYAQSADGKAKDPETTVLVKLPAWQELRKLLKDKGLETEWQSIAGAAQAGDPELLDRIAWVLSVYKDDAEVERELGKLSLPGGKAMIDALSEIRFDKFSSLSLKALRKIVPHMEAGMRYDEACDVAGYHHSQLFKSSEGGERYLPPFYSGRDGNGRMVFNDDLDIPRNPVVLRALNQARKVANALIREHGSPTSVHIEMARELSKPFDERRDIKKEQDEYQKRNQEDKARFAEHFGQMPKGQEFEKWRLYREQQGKCAYSVATIDLERLLEPGYVEIDHALPYSRSFDDSKNNKVLVLAKENRDKGNATPYEYLDGASDSERWRHFVAYVEGNKAYRLAKRTRLLRKNFGAEEAKDFRERNLNDTRYICKFFKNYVERYLKLADGSESKRCVVLSGQLTAFLRARWGLIKIRSDSDRHHAMDAVVVAACSHGLVKRLSDYSRRKELEAVRDGFADLETGEIVDLAMHRQLKEHFPDPWPGFRHELEARMFLDDPLHLRTAVEGLGSYPPDALDTLKPIFVSRAPQRRNSGAAHKDTIYAQPARFKTQGGVTQKVPLASLGLKDLDTLIDPHRNEKLYRAIRERLEAHGGKGDKAFPASNPLRKPDREGNPTGPIVRTVTKVIDKQSGIPIRGGLAKNDTMLRVDVFTKGGKFHLVPVYVHHRVKGLPNRAIVAFKDEADWTLMDESFEFCFSLHPNDLVRVSQKGKQPILGYYSSCHRGTGNINVWAHDRSERVGKNGMTEGIGVKTALSLEKFHVDVLGNLYPAPAETRRDLA

SEQ ID NO: 1192 - protein, 1102 aa, unidentified
  REGION 1..1102: note = Description of Unknown: Cas Enzyme sequence
LNSELQIVSATYTIGLDIGIASVGWCVLGENHIVTLGVRAFDKAETAKEGESLNLARRNARLMRRRLFRRAWRLKKLSRLLKSEGLIADTKVFQPEHAFTRPLWHLRVDGLDRRLNDEEWGRVIYHLCKHRGFHWISRAEAKQAEGDSKSEGGKVKQGLAGTAKLMAEKGYRSAAEMVLGEFPDAQRNKQGEYTKALAREVLAKELALLFEKQRRFDNPHASHSLETAILGNGDKKSGLFWQQKPALAGADLLKMLGTCTFEKDEYRAPKASFTAERHVWLTRLNNLRIVTDGITRQLSEQERQVCLPLPYQQAGDLTYKQLGTALSKAGLLEVGSFKFTSLTYPNEAQKVEGKAKDPESATLVKIPAWQELRQTLTKAGLDDEWKKLSGDALCGQPEIFDKIAWMLSVYKDDDEVRAELARLDLPNLQAMTEALLNIRFDKFHALSLKALRAIVPHMEMGLRYDEACVEAGYHHSQLHKVGEGEHKYLPPLYAGRDKDGRMLFTEDADIPRNPVVLRALNQARKVVNAIIRRYGSPAAVHIEMARDLSRPFDERNKIKKEQEEYQARNQRDRDQFIELFGHPPKGLEFEKWRLYREQNGQCAYSQKPLAASGNVAEIFLEGSTEIDHALPYSRSFDDSKNNKVLVLTRENRDKGNRTPYEYLGGTENSERWQRYVAFVEANKAYRLAKRTRLLRKDFGTKEAEEFRERNLNDTRYICRFFKNYVEQHLKLAEGSEAKRCVVVSGQLTNFLRARWGLLKVRSDSDRHHALDAAVVAACSHSMVQRLSNYSRTRELEQVRDGFVDIETGVIVNPAMHQQLREHFPDPWPYFRHELEARLKIDSPELLREEMARLGSYSEEELATLKPLFVSRAVQRRGSGAIHEETIRSSKRIANNQSHVRVSLQKLKLASLSNIVGADDPRNASLIDLLQKRLIEFKDDAKRAFAEPIFKPSRDGDGPRVKTVKLISTQKGGMKVRGGVAELGDMLHVDVFRDGKRILIEPAYMAHNSARIAPSSIPDSAEFLFSLTKNDLVAVTLGDVTYQGYFVMYESDGRLTLRAHDQPKPDKDYFRKSVASAKRIQKFHVDTLGNIYPAPPEKRRGLA

SEQ ID NO: 1193 - protein, 1116 aa, unidentified
  REGION 1..1116: note = Description of Unknown: Cas Enzyme sequence
VNDKPFGQPLTFGFDIGVASVGWAVLAPNRIVGLGVRAFDKAETAKEGQSLNLARRNARLMRRRLRRRAWRLKKLARALKRHGVIDDPHLFDPQHPYAPSLWWVRVEGLDRQLNPEEWARVLFHLCKHRGFHWISRAEEKKAESDGKGEGGKVKQGLAATARLMRDKGYRTAAEMVLTEFPEAQRNKQGDYGKALSRELLSDELSLLFQRQRVLGNPHASAGLEAEILGSGDRKSGLFWLQKPALSGAALLKMLGRCTFERAEYRAPKASFTAERHVWLTRLNNLRLFVNGRTRPLNDEERRIALPLPYLQVSDFKYRQLRAELVKQAGLPDNVRFAGLAYPSDAEKADGKAKDPEEATLVKLPAWHEVRLALKRAGLETEWEGMAAAAIDGRAELLDRIAYVLSVFKDDTEVEAELRKLQLPRADTMIDALLDLRFDKFHSLSLKALRGIVPHMEQGLRYDEACERAGYKHSQPQSIATGEHKYLPPFYAKRDKDGKMVFNEDLDVPRNPVVLRALNQARKVVNALVREHGSPHEVRIELARDLSRPLDERRQIEKEQHEYRARNERDRAVFAEHFGREPRGVEFEKWRLYREQQGKCAYSVTPIEIGRLLEEGYVEIDHALPYSRSFDDSKNNKVLVHAAENRNKGNRTPYEYLGGADDSARWRQFVAFVESSKAYRQAKRSRLLRRNFDADDAKEFRERNLNDTRYICRFFKNFIEQHLKLADESERKRCVVVSGQLTAFLRARWGLLKIREESDRHHALDAAVVAACTHAMVKRLSDYARTRELEHVRGGFVDMETGEIVEPAAFVRLERHFPQPWTDFRYELEMRLKEDDPVKLRAAMEALGTYPQASVAVLRPLFVSRAPQRRNGGAAHKDTIYGQPERLKAQGSVTQKVALASLTIKDLDRLIDPHRNEKLYAAIRARLEAHGGKGEKAFPPGDPLRKPDRDGNPTGPIVRTVTMVIDKLSGIPVRGGVAKNDTMLRVDVFTKDRKFHLVPVYVHHRVKGLPDRAIVAFKDEDEWTVIDDSFEFIFSLCPNDLVRVHQKGKQPFLGYYASCHRGTGSINIWAHDRNALVGKDGLLEGIGVKTAISLDKLHVDTLGNVYPAPPEVRRGLA

SEQ ID NO: 1194 - protein, 1262 aa, unidentified
  REGION 1..1262: note = Description of Unknown: Cas Enzyme sequence
LIKNPAPYILGLDIGTNSIGWAVVDCNLTEDNHQGIYAGFEPVSLRALNARIFQEMVEAKTQVPKNQKRRTARGARNRRTYYQKRRRDLINALIENGLLPRDYLKNLAKERVLNGIDRRFAERKLNKTWSRTWSEQEKSYSSPYAMRYFALKETLEPYELGRLLLHLQRRRGYRSNRGAKYVELIEKLNLTLEDEEHDNKQTSSEEKSEEKKEPRKVLDAISQLDDKLGGRTIGQFIWEESQATGIPPQRITLFRYEKNKEPKGETLTERLQYRAKREMHETEFDKIWEEQKKYHDFPPEMESAIKKAIFHQRPLQSQKGKVGSCNIYPNKKRAAVMRLEFQEFRTLQVINNIKVDGQPLTDEQRQALLSMADDPEHLNQKGRISWSKVKSTPEINKKSLNYGRGEDGKSEKAGLPGNRTIQAISKSIGYDRWKQMDKKKQTLLIEDLLSINNKRALYDRLVNHWKFEPWDGQKSEALDLAMNEELEAGYGKHSLKAINALLPHMRNGRDYYAAVEKIGEIESITPSIQTTDSTYLLPVKAVPNIANPIVQKALYEMRRVINSIIKRYGKPAIIRIEMAREMKASKKHRAELAAQQQENLRLKLEAEKEILEHLKNPNIALRKLRGGRSKVKDGDIKKYIMWHNEQDEQCPYSGKPISFNQLFSGATDIDHILPYTGYRENHMNTVVCLLKENQNKGKRTPFQTWGADSDRWDQIEKFAKEKYKYKGKLYSKQLKILEKNYKPEEIDDFVERQLNDTRYIATATKAMLKHYGVPIDVNNGAATSQLRGRWGLNEILPRDPDADIRRTTPDDGIQRYDKKIEHKSERKKALKSRRDHRHHAIDAFIVAMTDRAMLKEMVDAHQKKQEQSHDQTRQQTREDRTKETRLKLPKTWKDGDVDDLHHLLKQKLNATVVSHMVKRKVWGTLHDETRYGKSHFNQELDIEGMGESDLKKVIKIAETGSDSNQDWIADENLRSVLLQWATETLKKKPSDRSLPCYRNKEWKKINYQTPCITIRKEISGELLSGLAETWSPGSGTWIAEESIHNHLYQWLDKNKLVGKTAKEITKCLKNFPPCLPNRHGKPVSMYRVRMARAMSNSYTKIAGCYMEPGSNHHFVLFHNGKQGKEKKRKIHMVTMLEVAQRASAREMIIDKTPSPEWEGEWYYELALCVNDMVVCEDLSIFDGKSNDGKSNFATEHKETPWFRVQKMSSNSEDKVDMTLRHHSISGTDTKWGEWRIASLNKIACRKVQIGNLGLLPDDPQDH

SEQ ID NO: 1195 - protein, 1062 aa, unidentified
  REGION 1..1062: note = Description of Unknown: Cas Enzyme sequence
MSKTDINEVQGYTLGLDIGIASVGAAVLGSDRIEGLYVRTFDKAETDKEGEPLNKIRREARSTRRRLQRRAHRLLRLRRLFKREGLLTSAQPELLKTRISPWQLRAEGLDRLLGNTEWAAVLHHIVKHRGFQSTRKSERQEDEKVGQMLAGVGRNQKLMQEGGYRTVGEMAACHPEFSQAKRNKGGSYTNTFARADLEHELQRLFASQRQHGNAFASSELEERVHQLLMQRRPALSGDALMKMVGRCTFEPQEFRAPKASHSAERFVWLTRLNNLRLNNLGQVRELTPQERELLIDLPFRQARLTYKQVRSKLELSDSTKFVGLLYSGRDAKDPEGATLFEAKAFHVLRKVYEKAGLKTEWARDSQNPQRLNQIAYALTAYKEDDEATAYLKKHGLEDAIISALLFESFSEFVRLSVKAIDKILPFMQEGKRYDEAVILAGYAHHSQLAASAKSDRIPRFSRDFVTNPVVARALNQARKVVNAIIQKHGMPQAIHIELARDLSRNFKERKEIEREQLKFRNTKQEDISRFEQEFGFTPRGVDFLKWRLYREQDAKCAYSLMPLDTHRLFEPGYTEIDHALPYSRSFNDGLSNKVLVLTKENRDKGNQTPFEYLGGAQESERWRAFAAWVSSNHKFRDAKKRNLLRRDFGQEAMEEFKERNLNDTRYITRAFKQLVEAHLPLPKGGCVTVSGQLTAFLRTRWGLLKVREDGDKHHALDAAVVAACSRSLVKRLSDYSKRGELEQVRSNYTDPVTGEIIDVMALRKLEERFPQPWEGFREELIGRLSDTPVHYLERLSHYTAEQAQQVEPIRVSRAPTRRGLGQAHQETIRSAKHLEQGLSAVRTPLQNLKIKDLENMVGYDDPRNQSFIAALRERLEKFGDDGKKAFAEPFYKPTKSGLPGPEVRAVKLFAVQKSGLPVREGIAANGDMLRIDVFSKNNRYFVVPLYVADVVKPELPSRAVVAGKPEEEWDEMDDSYQFLFSLYPNDWIEIELKNKTWCGYYAGLDRSTGAVHIWSHDRNQEVGSKGLIRSIGIKTAKNVRKYHVDILGRAHLAKPEVRKPLA

SEQ ID NO: 1196 - protein, 1072 aa, unidentified
  REGION 1..1072: note = Description of Unknown: Cas Enzyme sequence
MSKSGTPHQPYTLGLDIGIASVGAALLGKKRIIGLHVRTFDRAETAKEGESLNKIRRDSRLTRRRLQRWSHRLLRLRRLLKRHDLITTTDTSALPSSFSPWELRAKGLDRKLDPSEWATVLYHLVKHRGFHSNRKSEIKTDEKSGEMLSGVNQNRQLLEQSGLRTMGELAARHVAFIDAKRNKGGSYTHTFSRIDIEAELLSLFARQRELNNPYATQALEENVHTLLMQRRPALSGQNLLKMVGHCTFEQGEFRAPKASYSAEHFVWLTKLNNLRISGLGETRCLSEEERQRVLPIPFDKAKLTYKQVRTILSLPEQMRFVGLRYPRASESSRNPEDGTLFEAKAFHTLRKAYEGAGLKLEWQRDRQNPDKLDDIAYALTVFKEDVEAREWLARKNVDPVIIEAVLNESFSDFVRLSNKALRNILPHMETGKRYDEAVQLAGYNHHSQLPPPGKTRYIPRFSKQFITNPVVSRALNQARKLVNAIVREYGPPDAVHIELARDLSRPFDERRKIQKQQDEYQKTKAGDILAFEENFRFTPKGVHLAKWRLYREQGGKCAYSLAPMDIGRLFEDGYAEIDHALPYSRSFNDGMNNKVLVLTAENRNKGNQTPYEYLGGENDSRQWHTFVTWVNSNKSYRETKRRNLLRKDFGSEAAREFRERHLTDTRYIAKEFMHMVETHLLLSDESDKQRCVVVSGQLTAYLRARWGLLKVRENGDLHHALDAAVVAACSHGMVKRLADYSRKGELKYARSHHVDPESGEVIDIAALRALDKHFPQPWDYFHKELRAWISNDPATNLAGLPNYGEEDLQALQPVRVSRAPTRRGLGAAHQETIRSAKYLDEGKSTVKTPLEKLKLKDLPNIVGYEDPRNRQFIEAIERRLKDYGDDGKKAFKDPLYKPSNNGAKAPMVRSIKLFTVQKSGMPVRGGVANNGDMVRIDIFTDGKKYHAVPLYVADAVKGELPNRAVVASKPEDKWTPLDDNHQFLFSLYPNDWVSVVVKPNEAPREGYYAGLDRATGAISLWAHDRNQSVGKDGLIRSIGIKTAQSLQKYHVDLLGRLHKVHRETRKPLTPKG

SEQ ID NO: 1197 - protein, 1143 aa, unidentified
  REGION 1..1143: note = Description of Unknown: Cas Enzyme sequence
MTSKHKNLGPLTFGLDIGIASVGWAVLGENRIIDLGVRCFDAAETAKEGESLNLVRRSARLLRRRLRRRAWRLTKLARLLKREGVIAEANLFKCKIEKNTPVPKSSWQLRVDALDRPLTAEEWARVIYHLCKHRGFHWISRAEEKAAEGDTKSEGGKVKQGLAGTKRLMHEKNYRSAAEMVLAEFPEAQRNKQGDYSKALSRILLGDELKALFEHQRKLGNTYATEKLEAAILGNGDKKSGLFWAQNPALAGSDLLKMLGHCTFEKTEYRAPKASFTAERHVWLTRLNNLRIVVDGTTRPLNEAERRIALLMPYQQAGDFTYKQLRTALTKAGFLPESFRYTGLSYASGQKADEKTKDPESATLVKFPAWQELRKTLEKKELASEWQKISTDALDGKPQQLDDIAWVLSVYKDDDEVKAELLKLNLPNAEKMIDALLDIRFDKFSNLSLKALRQIVPFMEQGQRYDEAVANIPEYGHHSQLHKVGAGEHKYLPPFYKERDKTGRMVFNDDMDIPRNPVVLRALNQARKVVNALIKKYGSPHEVHIEMARDLSRPLDERRDIEKLQKEFQVEKEKGLEHFISVVKREPKRDELLKMRLFRQQLDQCPYCQSELNIHRMFGDSDDMYTQVDHVLPYSRSFDDSMNNKVVVHTKCNQDKGNRTPFEYLDGKDNSERWRQFVGFVEGNKSYRLAKRSRLLRKDFGDKEAKEFRERNLNDTRYICKFFKNYVEQYLQLHEDSEAKRCVVLSGQMTSFLRARWGLVKVRSDSDRHHALDAAVVAACNHSMVKRLSDYSRRKELEQVREGFVDVDTGEIVNPAMFQQVQEHFPNPWPHFRDEVKLRLSMDDPALLRSEMEKFGTYSPEALQALHPLFVSRAPQRRNSGAAHQESIRSIGKENRLIDAGTSAIKTLLTKLKYRDIENIVGWNDPRNAAWVDELRGRLEPHKSEDTKQNKCAGAKAFATGQPKLYKPSAENKVAPEIRSVKLLSTQKGGVLLRGGVADQASMLRVDVFEKGGKHYLIPVYQSDRLKKVELLNRAATAAKPRDEWTLIDETYSFKFTLNKNDAVLLKNRDREYFGYFAGLNVATAAIDIASHDNNANINLGKTWQGTWPGNGLKTGILRFEKFNVDVLGNRYPAPPEKRRDLA

SEQ ID NO: 1198 - protein, 1069 aa, unidentified
  REGION 1..1069: note = Description of Unknown: Cas Enzyme sequence
MSPTIRQPYILGLDIGIASVGAALLGNDHILGLHVRTFDRAETADKGESLNKIRRDARLVRRRLYRRVQRLLRLRRLFKRRGMIREADTSAFATPVSPWDLRAEGLDRRLDDQEWAAVLYHIVKHRGFQSNRKSEAKADEKAGQMLSGVNANKVLLQESGYRTMGELAARHASFAEAKRNKGGSYSHTFSRADLESELHLLFASQRELGNPHADAEFESVVHSLLMQRKPTLSGANLLKMVGYCTFEPNEYRAPKTSHTAERFVWLTKLNNLRISGLGETRALDEAERQLLLNKPFTQTKLTYKQVRSALELPEQYRFVGLRYPRATDSAKDPEDATLFEAKAFHSLRKAYEGAGLKGDWQRDSVNPDRLDALAYALTAFKDDDEARAWLSQQGIEARIIEAVLEVSFSEFIRLSIKALRNILPHMEAGLRYDEAVQAAGYAHHSQLPTTQKSHYIPRFGKNFIANPVVARALNQARKLVNAIVREYGPPSAVHIELARDLSKPFDERRKIEKEQKEYRENKEMDIADFEERFGFKPRKDWLTKWRLYREQGAKCAYSLDALELERLFEDGYAEIDHALPYSRSFNDGMNNKVLALTTENRNKGNQTPYEYLDGKNESAGWRAFVAWVEGNKNYREAKRRNLLRKDFGAEAAMEFRERHLTDTRYIAREFKRMMETHLQLADGNESRCVVVSGQLTAYLRARWGLIKVREDGDLHHALDAAVVAACSHSMVKRLSDYSRRGELEYARGIHVDPETGEALDLDALRKLDAHFPTPWPYFRDEVIARLSPSPAEGLAKLDYYTDEMLKAIQPVRVSRAPRRRGLGEAHEAKIRSAKYLSNNKSSLRKPIEEIKIKDLPNIVGYDDPRNRPLIEAIEQRLRAHGDDGKKAFKEPLYKPSAPGKQAPLIRTVSLLDTQKSGIPIRGGIANNGDMLRVDIFTDGKRFHAVPLYVADAVKAELPNRAVVAYKPEEEWTVMDNNYSFMFSLYSNDWISVSLKGEQNIFDGYFAGLDRSTGAVSIWSHDRKQSVGKDGLFRGVGIKTALSVEKFHVDFLGRLHKVHEEVRKPLKGLR

SEQ ID NO: 1199 - protein, 1534 aa, unidentified
  REGION 1..1534: note = Description of Unknown: Cas Enzyme sequence
MTSKQDNLGALTFGLDIGIASVGWAVLAQDKIVDMGVRAFDAAEDKDGKPNNQTRRGARVSRNRYDMRTWRLKKLTRLFRDVGMLTKPEIKHLFSAQHEENVKHVSPWQLRAEGLSRPLTKQEWAQVIFHVIKHRGFKFFSKSEDPTKSGNDDEDITDSAAKAERDGLRDGLTYTSKLLEKYPQFQTLGQAAHQLANAQQDKNEIYRDSKGNELNAKDCEEFQNAYRNKGKSYRHAFRRDDLKAELNALFDAQHKQGNPYTELALPDGVEHLTEIAVSSETRHVESTFRSQVFALLELQHPPISIEQMDAMIGDCELESEARNGIGKAERRAAKHTFSNERATWLQTLNNLRIKRDGKETALTEQERNILLNLPYTQAKLTFKQAREILREQTGFPAHWREASFTKLSYRNKRKDDGSWINIVATDGTRTTLGKYIKDEKERKDINKKLKLRLETGTMTFAELRQLYKLAEGETFECQRKNEEIIPSALEDQYPISFDELDNKKAFIKMMPAKTKSAKKLPPKAIKALESLRAKPGVTLADLHIAIEQVEEMERGWQFEKSQKDIQPIRPEDEAKTEIPIEYEDAQKAEEETLIELKGWHKFKLALENSHLEWWASLQAAWREPQSDAGKSAAYQLDGIAEVLTKAQTDADVEKVLAPLRLDRTKLESLEGVRFKQYRNLSLKALRNILPFLEQGKSYKEACDRARYQPVTPPPRTRHLPPLETYLYERVRHGRAKGFRKTGYKEQRYKDLTNPVVARAFNQARLVLNALIGRYDQSPAYVHVELARDIARPLKGKWSNGRYIEGRLDVQKKQEENRNKRQLARNNFAETHKISNPSEFQILKERLYHEQQCKCLYTLEELDLDRVVRDENYAQVDHIWPRSLTFDNSMENLVLVHAHANQDKGNHIPYDYINRHPLFGNAEAQRAEHWRKVAAHVMACKGMSDNKQKRLLATELDADEFLARNIVDTRYATRLFARMVRDRLLFDGQTEDKIEDIDPSESGKSRLDKFHKTRVRTPQGGVVNFLRRRWLGDIKDREAGDKHHAMDACIIAACTPELIHRVNSWFSNQEKVPSRFKKMDDGKYADKGTGEIISKDEARERGLYLPAPWDELSPGKFRNEFLEKYETVFVSRAIRKKRNVELHGANPMALRYYPVNLYELTLEMLDEKQLPPNLPESRLSLIEAIRNHLLSNNGDAVAAFKDGFLTGNKKEKEKLIHTIPLPLISLPEDYLKRTRKQLGKSNKENFKDTAKKNVPLNLLSLKKLSEEELGSAFYHRNSRMIEAIKAQLNKYNDDAEKAFAEPFYPFGKDRTFIKSIRLPVPCSSGIHVRGGAANLGDALYTEMYKHEGAYWFRARYKVSQENSFGLPVMPKGAQHICNFTKNDFVRIKHPNLAYCYREVGRLKDSYGNTLIHVEAVFGSGTFEGYWNYYEPSNDRPVVQLHDGSPFFLLEDGKILDKESLTLIAKPKEKKKSKTKTKEEEVVEYFEFCETPQESPLKFSLVNDIKRKVGDAAIIEKIKVNILGSIQEGQGSNDLA

SEQ ID NO: 1200 - protein, 1116 aa, unidentified
  REGION 1..1116: note = Description of Unknown: Cas Enzyme sequence
MSYNHDIMRDKILPSKSKKQKNTEPLTFGLDIGIASVGWAVLSPERIIDLGVRAFDKAETTDGKPLNLARRTARLARRRLRRRASRLIKLAELLKHEGLINNARIFKEQKPFHKSLWQLRVEGLERKLDAEEWARVIYHLCKHRGFHWTSRAEEKAADSDSKGEGGKVKDGLAGTEKLMREKNYRTVAEMVLAEFPKAQRNKQGDYSKALSRILLAKELALLFQHQRELDNVFASKAIEEKILGNDDKKTSFFWEQKPALSGKDLLKMLGNCTFEKTEYRAPKASFTAERHVWLTRLNNLRVIDKGIVRGLNEQERQIALLLPYQQAGDLSYKQLRAALVKSDCLPDSFLFIGLAYPGGKQEAEGKTKNPETAALVKLPAWQQLRTALKKAGMEMEWQSMAAAALEGKPELLDQIACVLSIYKEDDEVTNELRKLPLPDPERMINALLDIRFDKFHALSLKVLYQIVPHMESGSRYDEACARAGYHHSRLQKASKIDKYLPPLYVGRDENGCMVPNDDFNIPRNPVVLRALNQARKVVNALIRKYGSPHGMRIEMARDLSRPWDERKKIQKTQEEFRNRNEKDKALFATEFNSIAALNGKNFEKWQLYREQQGKCAYSIEPLDIHRLFEQGYVEIDHALPRSRSFDYSKNNKVLVFAKENQNKGNRTPYEYLGGAENSDRWRQYVAFVESNKSYRLAKRSRLLRKNFGEKEAKEFRDRNLNDTRYICRFFKNYVEQYLQLATDSEKKRCVVLSGQLTSFLRARWGLSKSRVESDRHHALDAAVVAACSHDMVRHLSDYSRRKELSRASKDFVDPATGEAVNLALLKQLREHFPEPWPHFRDELLARLQINDPGLLREKIELLGIYPQDTLHALRPLFVSRAVKRRTGGETHKAQIFSVKNNDPTKAIERVPLRSLTLAKLERMVGKHDPRNKALYEVLKDRLNSFGNDPDKAFGPQQPKLVKPSKVGDKAPEIRSIRVEVTQNSGLMLRGGIADLGNMMWVDIFRHETQGYSVVPRYQASVDKIRGVLENRTGYTFCFSLTKNDFVEINIGGETVRGYFVLYESDGRMRLRMHDQPQLEKYFFRKSITSAKSITKFHVDILGCIYPASPEKPHDLA

SEQ ID NO: 1201 - protein, 1130 aa, unidentified
  REGION 1..1130: note = Description of Unknown: Cas Enzyme sequence
MTGKLNLGPLTFGLDIGIASVGWTVLGENRIIDLGVRCFDKAETAKEGESLNLARRTARLMRRRLRRRAWRLTKLARLLKRNGLISDVNVLKQPPAKGFKTPNLWQLRVEALDRKLDSEEWARVIYHLCKHRGFHWISRAEEKAAEGDSKGEGGKVKKGLSGTKKRMQEKNYRSAAEMVMGEFPDAQRNKQGDYDKALSRALLADELKMLFQQQRALGNAHTSEQLETAILGNGDKKSGLFWAQKPALSGKDLLKMLGYCTFEKTEYRAPKSSFTAERHVWLTRLNNLRIVVDGKTRSLTEAERQIALPLPYQQASDFSYKQLRNALVKAGLSDEFKFAGLAYPSERQKNEEKAKNPEDEKLVKLPAWQTLRKLLKDAQLENEWSQLSTDALGGKPQLLDKIAEVLSVYKEDAEAEAELRKLNLPNHNKLIETLLNIRFDKFSNLSLKALYNILPHMESGLRYDEACIKAGYHHSQLHPAGSGEYTYLPPFYSGRDKDGRMEFNEEMDIPRNPVVLRALNQARKVVNALIRKYGPPHTVNIEMARDLSRNFDERRNIKKAQDEFRDRNDKDKAAFASEFGIVGAVKGKDFEKYQLYREQQGKCAYSLEAMDIHRLFEQGYVEIDHALPYSRSFDDSKNNRVLVLARENRNKGNQTPYEYLGGAENSPRWQNFVGFVNSTKTYRQAKRNRLLKRDFGENEAASFRDRNLNDTRYICKFFKNYVERHLKLHEESSAKRCVVLSGQMTAFLRARWGLLKVRSDSDRHHALDATVVAAANHSMVKRLSDYSRRKELEKVREGFVDAETGEIMNPAMFDKLELHFPTPWPHFRNELEARLKIDDPALLRAEMERLGSYPQEALEELHPLFVSRAPQRRNGGAAHKDTVYAQPKRLESQGGVTQKVSLSSLTLKDLGEKIDGEWVDCKLIDPHRNEKLYAAIRARLEAYGGKGDKAFTSDNPLRKPDRDGNPTGPIVRTVTMVIDKLSGIPIRGGIAKNDTMLRVDVFTKAGKFHLVPVYVHHRVTGLPNRAIVQAKDEVDWTVINESFTFQFSLYPNDLLRISQKGKEQIIGYYSGCDRATGNLAVWSHDRNQQVGKDGLIRGIGVKTALNIEKFNVDALGNLYPAPPETRRELA

SEQ ID NO: 1202 - protein, 1084 aa, unidentified
  REGION 1..1084: note = Description of Unknown: Cas Enzyme sequence
MKYSIGLDCGISSVGFAVMELDSNDEPCRIINLGSRIFDKAENPKDGSSLALPRREARGTRRRIRRHQHRLERIRYLLVERNVLTQIELGELFSGNLQDIYQLRTEALDRKVSNKELARILINLAQRRGFKSNRKSEALDKEAGKLLNAVENNQQILIENHYRTVGEMFYKDKKFSQFKRNKAESYNNTVSRSMVESEIHQIFSAQRELGNSAATEELEEKYTEIVLSQRPFDLGPGKGNKNSPSKYSGSQIEKMVGKCTLIKGEQRAAKATYSFQLFTLWQNINNIKIVSFNGEKVKLTDEERKKIFDLCHKSPSVTYEKIRKELALSADCIFVGLPYGDKSIEEVEKKRKFEYLKAYHQIRKALDKMKKGYISSLSVEELDAIGEAFSFHRDDSNVVEYLRSKNVREEIYDCLLENISGFAKFGHISVKACKMLLPYLEKGMTYDKACDAAGLDFKSHVSEKSLYLKSNSEELEDIKNPVVRRAVSQTVKVVNSIIRSQGHSPVYINIELARDLSKTLQERKKIESRMKENREKNEKIVELLKSDFNINYPTGMDIVKLKLWREQDGICPYTQKSIAYDKLFDNGYTDVDHIIPYSICFDDSYNNKVLTFSSENRQKRNRLPLEYLQGQSAENFKVWVNSSVKNFKKKQNLLKESFTEEDRKEFKSRNLNDTKYLSRVLYNYINDTLLFEEYKGGRSRHVTAVNGAVTSYMRKRWGIEKIRENGDLHHAVDACVIACITQGTINKVTNYSKFKELRYSNDIVVSSEGEVVDSFPLPYREFRKELDIRTFDDPVRVLREVRLTNYSSEDIESVKPCFVSRMPSHKNTGAAHKDTIRSGKKEGYTITKTSLCDLKIGKDGEILNYYNREDDRLLYDAIKFRLLEFGGDGKKAFPPDFQFHKPKSDGTPGPVVKKVKIVERSSLNLPVRSGVAANGSMIRIDVFKVEGEGFYFVPIYVPDTAKPTLPNKACVAHKDYADWKEMSDNDFLFSLYPNDLVKITANKDMKMSLIHNDSTLPPEKYGNELMMYFIRANISAASILIENHDGSYRLEGLGIKTLRNIEKYVVDPIGNISKVNKEKRMYFK

SEQ ID NO: 1203 - protein, 1101 aa, unidentified
  REGION 1..1101: note = Description of Unknown: Cas Enzyme sequence
MKYGIGLDCGIASVGYCVMELDFNDEPRRIVKLGSRIFDTAEVPKTGASLAAPRREARGMRRRVRRHQHRLDRIKHLLVEKNIISQAELETLYNGQLSDVYELRVKALDEPVGNCEFARILIHLAQRRGFKSNKRNDGKDKEAGKLLKATESNEALLEQKGYRTVGEMFLKDEKFAEHKRNKGEDYSNTVLRSMIEAEIKAIFEAQRSFGMTFASEEIETIYADIALSQRPFDLGPAKGPENSPSPYHDMLGENLVGQCTFYPEEKHAAKATYSFQLFNLLQKINHIYPLTDFGAKYSLSDEERLSIKNLCFRKKAVNYADIRKLLGISYDYKFNCISYSGKEVEKIKQKLENQDQQALIDEIEKKAKFEYLNNYHQMKKALGDVFNALSEDDLDALGRIFTVFTDKDRIKEELELTDIPKSLHESIYEYMPYFKGYGHISVKACKEIIPFLEKGMTYDKACEAAGIDFRAHSNTEKHELLPPAEDALADIPNPVVKRAVTQTRKVINAIIREMGNSPAYINIELARELPKSKKERDEIDQHNNENRAANERIKNEITEHFGIVNPTGLDIVKLKLYHEQNGICPYTQKTFEYDRLLEPGYVDVDHIIPYSKCFDDSYSNKILTFSSENRQKSNRIPMEYIPESKKSDYQVWVANNIRNPRKKQNLLKAKLTPEDTEGFKARNLNDTQYLSRVLYNYINDNLLFDDYKNKTKKVRAVKGAVTAYMRKRWGIAKVREDGDLHHAADAAVIACVTDGMIQKIRSYSDSQEMNNYAVNTDTGEVIDKLPMPYRDFRNELQKRLESENLDELKLYLSKLPNYSKEALDDVKLCFVSRAPKHKATGAAHMGILRSYSGDGYAVSKKKLCDLKLDKNGEIEGCDFWKNDDRLLYNALREVLTKFRDNKEAIPKNFEFHKPKSDGSDGPIVRSVKCREKVSQYVPLNTENDLAQKTGAGNGSMIRIDVFYVENDGYYFVPIYVADTKKKELPNLACVQGKKGWKPMDDKDFVFSLYPNDLIKVEAKKNMVFSVAQKGSSLQPKIERTTMLVYYSTANISTASIFVITHDGAYEKDGLGIKSLKNIEKYTVDPLGNVHKVGKEKRMRFN

SEQ ID NO: 1204 - protein, 1186 aa, unidentified
  REGION 1..1186: note = Description of Unknown: Cas Enzyme sequence
MSGKQKNLGPLTFGLDIGIASVGWAVLGENRIIDLGVRCFDKAETAREGESLNLARRTARLMRRRLRRRAWRLTKLARLLKREGVISDVNLFKQPPMKGTPAARPWQLRVDALDCKLEAEEWARVIYHLCKHRGFHWISRAEEKAAEGDSKGEGGKVKQGLAGTAKLMQEKGYRTAAEMVLKEFPDAQRNKHGDYSKALSRVLLADELKKLFEHQREKFKNPQASVGLEAAILGNGDKKSGLFWKQEPALSGEALLKMLGKCTFEKSEYRAPKASFTAERHVWLTRLNNLRIVVDGKTRPLTDEERRIALPLPYQLASDFSYKQLRKALTRAGLSEDIRFAGLAYPSERQKSEEKAKDPEDEKLVKLPGWQELHKTLKDAGLENEWQKISTDALTGKPQLLDQIARVLSVYKEDDEVVRELGELELPNKEKMVDALLTVRFDKFSNLSLKALYNILPHMEAGLRYDEACEKAGYHHSQLHKVGTGIHKYLPPFYSGRDKDGRMKFDENMDIPRNPVVLRALNQARKVVNALIREYGSPHEVHIEMARDLSRPFDERRDVKKAQDEYRERNEKYKVAFASEFKIVGTVKGKEFEKYQLYREQQGKCAYSIEPMDIHRLFELGYVEIDHALPRSRSFDFSKNNIVLVLARENRNKGNMTPYEYLDGKSNSERWRQFVGYVEGNKSYRLAKRSRLLRKDFGENESREFRDRNLNDTRYICRFFKNYVEQYLQLHQDSEAKRCVVLSGQMTAFLRARWGLIKVRGDSDRHHALDAVVVAACSHGMVKRLSDYSRRKELDQVREGFVDVETGEIVNPAMFQKLQHHFPEPWPHFRDELMARLFEDAPALLRVKMEGLGTYPPEALEALRPLFVSRAPQRRNSGAAHMDTIYTKPRDGHVLMVEDKEAKKNAKENAEKILRPATAEEKASMAIARIGVTDKDSKGNYKLTLEKLKDIIDPRRNARMIEALRQWIASRDEREKTAKEIEASFGRGKEKRKPTDAENADLERLRALPRKPLQADPNSGPFTGPIIRAVKVNAGKTTGISVRGGIATNDTMLRVDVFTKVGKFHLVPVYVHHLVTGLPNRAVVAFKDEEKWTVIDESFAFCFSLYPNDLVRVQQKNKAPILGYYSSCHRGTGNINIWAHDRNQQVGKDGMIEGIGVKTALSIEKYNVDVLGNIYPAPPEKRRDLA

SEQ ID NO: 1205 - protein, 1148 aa, unidentified
  REGION 1..1148: note = Description of Unknown: Cas Enzyme sequence
MNNNNNFGQLTFGFDIGIASVGWAVLNERRVVDLGVRCFDKAETAKEGESLNLARRTARLMRRRLRRRAWRLTKVARLLKRHGLINDVTIFKPEHPFTVSLWELRKQALDRTLNAEEWARVIYHLCKHRGFHWVSKAEEKKAEADTAGESGKVKQGLAATARLMKEKGYRTAAEMVLAEFPQAQRNKQGEYSKALSRALLSEEFSMLFAAQRAMNNPYASSELEIKLLDRKTGLFWAQKPALAGEALLKMLGKCTFEKSEYRAPKASFTAERHVWLTRLNNLRVVMDGITRPLNEAERQFTLSLPYNQASDLTYKQLKAAMVKQGLWPETARFTGLSYPSLNQLKEGKAKDPETATLIKIPAFQELRKTLKDAGLETEWQGMVNAAMSGDASLLDQIAWVLSIYKDDEEVERELKALNLPSKTNMVEVLQGIRFDKFSNLSLKALRKIVPHMERGLRYDEACIEAGYHHSQLIKPDDEKLHYLPPFYSARDKTGKLIFNENIDVPRNPVVLRALNQARKVMNALIKKYGSPHQVNIEMARDLSRPLDERRKIKDAQEDFRDRNKIARDKFNETFNASGDLKGRDFEKWQLYEEQECKCAYSRETLDIHRLFEMGYVEIDHALPYSRSFDDSKNNRVLVLARENRNKGNQTPYEYLDGKNNSERWHQFEVSVNSNKAYRQAKRSRLLRKEFGKEDSAEFRDRNLNDTRYICRFFKNYVEQFLQLADTSEAKRCVVLSGQMTAFLRARWGLTKVRADSDRHHALDAAVVAACSHGMVKRLSDYSRRKELEKVSEGFVDVTTGEIANPAMYQQLKEHFPDPWPHFRQELEARRLVDDWLLMKAELANLGTYSEDELESVKPLFVSRAPQRRNSGAAHKETIYGQTERLRKMGSVTQKVVVTNLSLKDLGEVIDGERVNCKLIDPHRNEKLYAAIAIWLQGKDEREKRAKEIEASAGRGKEKRALTMDERAEIERLRALPRKPMNDGSAGPIVRTVTMVIDKLSGISIRHGVAKNDTMLRVDVFTKANKFHLVPVYVHHAVAKTLPDRAVVAFKDEDEWTLIDESFDFCFSLYPNDFVKVTLKSEIQTGYYSGCDRATGAINVWAQDRNASVGKSGLIRGIGVKTALAVEKFNVDVLGNIYPVLKEERRGLA

SEQ ID NO: 1206 - protein, 1122 aa, unidentified
  REGION 1..1122: note = Description of Unknown: Cas Enzyme sequence
MKKILSLDLGITSIGYSVIIEEEIQRYSLLDYGVSMFDKPTDKDGNSKKLLHSQAISAKKLHQLRKERKKNLAKLFEKYNLASAAKLLGQEKKNIYIHKWQLRAKKVFEEKLSVEEIFTIFYHIAKHRGYKSLDSGDLLEELCVDLGIELEQKKEKKDDEKGKIKQALNNIESLRQEYPEKTVAQIIYDVELQKEQPVFRNHDNYNYMIRREHINDEIVTIISKQKEFGNFENIDSEAFIADLIAVIDDQKESTNDMSLFGKCEYYPKEYVAHQYSLLSDIFKMYQAVANITFNKEKIKISKEQIRLIAEDFLNKIKKGKSVKELKYKDVRKVLNLDDSIKIFNKEDSYQRAGKKVENTITKFHFVDTLFKIDKSFIEDIFSADESYALMREIFDVIHKEKSPKRIYEQLKDKVSSEAVIIDLIRYKKGSSLNISSYAMMKFLPYFEEGMTLDAIKEKLNLNRKEDYSEYKKGIKYLHISTYEKDDSLEINNHPVKYVVSAALRVVKHLHAKHGAFDEIKVESTRELSLNDKVKKEIEKVNKEREKEIEKIVSDKEYQTIAQDYGKNIHKYARKILMWEAQERFDIYSGQSIGLDDIFSNRVDIDHIIPQSLGGLYVQHNLVLVHRDENLQKSNQLPMNYIEDKEAYINRVEHLFSEHKINWKKRKNLLATNLDEIYKDTFESKDLRATSYIEALTANILKRYYPFTDEKKSADGSAVRHVQGRATSNIRKVLDVKTKSRESNIHHAVDALLIGVTNHSWLQKLSNTFRENFGKIDDEARQNIKKTLPYIDGVEVKDIVKEIEQNYNSLGEDSIFYKDIWGRVKTVSFWVSKKPMSSKAHKDTIYADKGDGIFTVRESIIAKFINLKITPTTSPEDFMKKFHKEILEKMYLYKTNPNDVICKIVEQRAEEIKELLWSFEFLDAKNKEEMQEAKAKLENLVHRELFDNNGNVIRKVKFYQTNLTGFKVRGGLATKEKTFIGFRAIKKGEKLEYERIDVSNFEKIKKSNDGSFKVYKNDIVFFIFDEENFKGGKIVSFLEDKTIASFSNPRFPAAIKFQPDSFCIIGKDSNGKPKKSSSKQYKLGKAKGIIKLKIDILGNIESYQVLGNAKSKLLDEIKSIVSH

SEQ ID NO: 1207 - protein, 1117 aa, unidentified
  REGION 1..1117: note = Description of Unknown: Cas Enzyme sequence
MKKILSFDLGITSIGYSVLTEDEAQKYSLLDYGVSMFDKPTDKDGNSKKLLHAQALSTKKLYKLRKERKKNLALLFEKYALAKASKLLEQEKKNLYMYKWQLRAKKVFEERLSIGEIFTILYHIAKHRGYKSLDSGDLLEELCVELGIKIDVKKEKKDDEKGKIKQALSTIESLRKEYPKKTVAQIIYEVELQKERPVFRNHDNYNYMIRREHINDEIATIIRKQKEFGNFENIDSEVFIVDIIAAIDDQKESTNDMSLFGKCEYYPKEHVAHQYSLLSDIFKMYQAVANITFNKEKIKITKEQIRLLTEDFLNKIKKGKSVKELKYKDVRKILKLDESVKIFNKEDSYQRAGKKVEHTITKFHFVDNLSKIDKSFIEDIFNADESYVLMREIFDVIHKEKSPKRIYEQLKSKVSSEAVIIDLIRYKKGSSLNISSYAMAKFLPYFEEGMTLDAIKEKLDLGRKEDYSVYKKGIKYLHISTYEKDDDLEINNHPVKYVVSAVLRVVKHLHAKHGTFDEIKVESTRELSLNDKVKKEIDKANKAREKEIEKIISNDEYQKIAKEYGKNIHKYARKILMWEAQERFDVYSGKSIGIDDIFSNRVDVDHIVPQSLGGLYVQHNLVLVHRDENLQKSNQLPMNYITDKEAYINRVEHLFSEHKINWKKRKNLLASNLDEIYKDTFESKDLRATSYIEALTANILKRYYPFIDEKKSVDGSAVRHIQGRATANIRKVLGVKTKSRESNIHHGVDALLIGVTNPSWLQKLSNIFRENFGKIDDEARKNIKKALPYIDGVEVKDIVKEIEQKYNSYGEDSIFYKDIWGKAKTVNFWVSKKPMISKVHKDTIYADKGNGIFTVRESIIAKFINLKITPTTFPEDFMKKFHKEILEKMYLYKTNSNDVICKIVQQRAEEIKELLWSFEFLDVKNKEEMQEAKANLESLVHRELFDNNGNVVRKVKFYQTNLTGFKVRGGLATKEKTFIGFRAFKKDKKLEYKRIDVSNFEKIKKSNDGSFKVYKNDIVFFVFDEEKYKGGKIVSFLEDKKMAAFSNPKYPANIQAQPESFLTIFKGKANSHKQVSVGKAKGIIKLKVDILGNIESYQVLGNAKSKLLDEIKSIVSH

SEQ ID NO: 1208 - protein, 1109 aa, unidentified
  REGION 1..1109: note = Description of Unknown: Cas Enzyme sequence
MKKILSLDLGITSIGYSVLDELENDRYSLIDYGVSMLDSPFIDDRKRISKKLLHAQSKSSKKLFNLRKIRKQKLALLFEKYDLEKSEQLLEQEKANTYINKWQLRCEKAFNEKLKVGELFTIFYALAKHRGYKSLDSDDLLEELIRELNLEVKNNSKKKDDDEKGKIKKALRTVEALKEKYPNKTIAQIIYEEERKGANPTFRNHDNYNYMIRREYINEEIKRIVLSQKSFGFFKDNFSVDDFILELVKTIDDQKESTNNLSLFGKCEYFKEEKVAHQYSLLSDIYKMYESVSNITFNKEKNKITPQQIKLIADDFFEKIKKGKSFSEIKYKDIKIILKLDENTKIFNKDDGRIVKFHFLSNLSKIDNSFIKKAFEKEDKYQILQEVFDVLEFEKAPKKIYEQLKGLVDNKTIIDLIKYKNGNSLNISAYAMIKFIPYFEQGLTLSDIKKKLNIKESEDYSKFKKGIKYLYVSQFEKDNDNLEINNHSVKYVVSATLRLVKHLHSTYGAFDEIRVESTRELSQNEETRRNIEKANRALEKQIDEVLLNKEYQEIANQYGKNLRKYARKILMYEKQERRDIYTGEGIEFKKIFTNEVDIDHIVPQSLGGLSVKNNFVLAHRDSNVRKSNQLPSNFVSDKQAFINRVEYLYKENKINWKKRKNLLANNLDEIFKDTFESKSLRATSYIEALTAQLLKRYYPFVNEKKQVDGSAVRHIQGRATSNIRKVLNVKTKVRDTNIHHAIDAILIGLTNESWLQKLSNTFRENVGVIDDEARAKIKKEIPLIESIEPKELVSRIEKNYNSFGEDSIFYKDIFGKTKTVNFWISKKSTSSKVHKDTIYSKKEDGIFTMRESILNKFVSLKVTPKTTSVKFMEEFNKNILQKMYLFKTNPKDVICLVVQNRAEDIKNMLDSFEGIDAKNKELMSEAKQKLEGLIHGNLVDNNGNIIRKVKFYQTNLTGFDVRGGLATMEKTFIGFRAIFENGKLSYKRIDVINFKQMNNKNDGSFKVYKNDSVFFVYLDKTMKGGKIVSFLENKKIAAFSNPKFPSAYKFQPNSFCKDKSHTGAKQHSVGSAIGIIKLNLDILGNIKSYQVLGNAKSEFLETIKGIVNG

SEQ ID NO: 1209 - protein, 1122 aa, unidentified
  REGION 1..1122: note = Description of Unknown: Cas Enzyme sequence
MKKILSLDLGITSIGYSVIEEFGNDRYSLIDYGVSMFDKATDKDGNSKKLLHSASTSTSKLYDLRKKRKKDLAQLFHNFGLGDKNSLLSQEKQNIYKNKWYLRCHKAFKEKLNINELFTIFYTLAKHRGYKSLDSSDLLEELCEKLNIPLETKTKKDDERGKIKKALKTIEELKQNSTKTVAQIIYEIELKKENPTFRNHDNYNYMIRREYIDQEIEKIIKTQKDFGLFDDKFDIDNFIEKLKDIITYQNPSTNDMRLFGNCEYYEDEKAAHQYSVISDIFKMYESVSNITFNTKPSIKITKEQINKIADDFFTKIKKGKNIADIKYKDIRKILALSDDTKIFNKDDSYISKGKKVEHTIIKFHFVNNLSKFDNSFIVENLNSLENLKEIFEVLQFEKDPTAIYEKLKDKIEDKQTIINLIKHKSGNSLNISAKAMVEFIPYFKDGLTTDKIKEKLELNRCEDYSKFYKGIKYLNIRQFEQDDNLDINNHPVKYVVSATLRVIKYLHIVCGTFDEIRVESTRELSQNEETKKAIEKANKELEKQINDIVQNKEYQNIAQHYGKNLQKYARKILLYEAQNRRDIYTGEGIEFEDIFTKKVDIDHIVPQSVGGLSVKHNLVLVFRDTNIQKSNQLPMNFVKDKQDFINRVEHLFSEHKINWKKRKNLLATNLDEIYKDTFESKSLRATSYIEALTAQILKRYYPFKDKEKQENGKAVSYIQGRATSNIRKILKVKTKTRDTNIHHAIDAILIGLTNQSWLQKLSNTFRENFGKIDEEARANIKKDMPIFEIIIDDEVKYLEPKELVELIEKNYNYDGENSIFYKDIWGKIKSVNFWVSKKPMVSKIHKDTIYSKKDDGIYTVRENIINHFINLKITPKTSSKKFEEEFNKKILNKMYLFKTNPKDAVCKAIIKRANDIKTLLDSFIDIDTKDKEAMNNAKTKLDELIHKDIPDNNGKPIRKIKFYQTNLTGFDVRGGLATKEKTFIGFKAQIINGKLNYTRIDVANIDKIKKENDNSFKVYKNDLVFFIYTDGTNKGGKIVSFLEDKRIAAFSNPRFPSSIGFQPHFFVTIFNGKANSHKQHSLNKAIGIIKLNLDILGNIKSYQKIGSCESELLEFIKKVIKD

SEQ ID NO: 1210 - protein, 1118 aa, unidentified
  REGION 1..1118: note = Description of Unknown: Cas Enzyme sequence
MKNILSLDLGITSVGYSILKQLDTDKYSLVDYGVSMFDKPYDEKNNSKKILHSEVTSFKKLNDLKKERKRNLALLFEEFGLGDKDYFLYQEKQNVYKNKWHIRAKKAFCERLKVEELFTILYSIAKRRGYKSLETSDLLEELCKELEIPFEEDKKTKNNEEKGKIKSALKRVEELKERYPQKTVAAIIYEEELKNPTPVFRNHDNYRYMIRREDINDEIKKIVLAQKEFGLFDKDFDVDKFIKRLIKTIDDQKESTNNKDLLANCEFYKEHKVAHQYSLITDIFKMYQAVSNITFNSKPEIKITKEQIKLIADDFFKKVRKGKKIDSIKFKDVRKILNLPDDIKIFNKEDFSVKNGKKQDNYIIKFHFVNNLSKIDNTFILKAFEKENPYEELKEIFDTLGFEKSPKIIYENLKNKIDNKTIVELIKNKTGSSTRISSYAMVKFIPYFEQGYTLDDIKKELGLIRNEDYSKFQKGIKYLSVSQFENDDSLLINNHPVKSIVSAALRVTKHLHVKHGPFDEIKVESARELSQNEETRKAIDKANKELEKQIDNIMENEEYQEIAQRYGRNLRKYARKILMWLEQDKLDIYTGKNIGISEIFSNTVDIDHIVPQSLGGLSVKHNLVLTHKDSNLKKSNQLPINFVEDKNAFENRVEHLFRERKINWKKKVNLLATTFDETFKDTFESKELRATSYVEALTAQVLKRYYPFPNEKKQKDGSAVRHIQGRATSNIRKLLHVKTKVRDTNIHHAVDAILIGLTNQSWLQKLSNTFRENFGKIDDEARANIKKATPLIDGIEPSELIGMIEKGYNKFGKESVFYEDIWGKTKTVYFWVSKKPMVSKIHKDTIYAKKENGIYTVREKIIDKFVSLKVSSKTKVDEFYKKFKKEILYKMYLHEINQNDVIYKTVQKRGDEIAEMLKSFERLDANDKEALAEAKDELNNLIHKPLIDNNGNEIRRVQFYQTNLTGFEIRGGLATKAKTFIGFKAKLKDGKFKYERIDMSNIQRIKKKKDTGFKVYKNDVVFFTYPDGSCKGGRIVSFLDEKNLVAFSNPRFPGSIAYQPEEFLTFFNGKPNSHKQHSIKKAIGIIKLNLDITGNIKSYRTIGSCESEFLEFLKSIKS

SEQ ID NO: 1211 - protein, 995 aa, unidentified
  REGION 1..995: note = Description of Unknown: Cas Enzyme sequence
MANLSLGIDLGVNSLGTALIEREKHKIRFTGVRIFPAGVVGDIESGKDESRAVKRRQMRLQRRQAWRRVRRLKKTLHLLQRYGLLPAGEAACAIPAVDSELHARYPQTEILPYFLRARALDYALTAQELGRALYHLAQRRGFLSNRRAPEKKDKDKGKVKGGIESLEGQIAGNGKRTLGEYLASLDPHEARIRTRYTHRSMFEREFAAIWEAQRVHHPMVLTESRFAELREALFFQRPLKDQRHLIGQCSLMPELKRAPVYWPEIQRWRYIQAINNLILMSPAGEERALTEREREILYRECEGHEKIAFKKAKKLIGVTDSWKFTIESGGEKDLKGNLTNVRLGKILNLRWQQLTADRQIELLQDWAKAETDDEAFRTLAQEKWECSPDEARALSDLRLPDAYANVSLEAARRILTHLERGVTYGEARKLEFPEQFVPKEPLALLPPVKEALPEVRNPAVMRALTEMRKTVNAIIRKFGKPDYIHIELGRDLKRNRDERMKLSSKNREREKQREQAREALQAHGLPEPKGSDIEKYLLWQECGKTCPYTGQSISLNSIFGANPMFDVEHIVPFSRSLDDSFLNKTLCYKPENANKGNRTPWERYGGTAQFDEMIERVKRFGNDAKLRRFQMRETDLAKLLADFNSRQLNDTRYASRLAQQYLGLLYGGRSDASGTQRVFVSNGQATAFLRQKWDLNRILSDSPQKSRDDHRHHAVDAAAAAMASPRMLQALARAAENAVRERHRRFGSFAHPWPEFREQLSAAIKATNVSHRPMRKLGGPLHEETLYGKPHTGRDGKNYVHIRVLVEKADIEEIVDPTVREAVRTAREAKVAPVLTTRDGRSIPIRKVRVRSVVKTVPIGEGARRRNVVTGDNHHMEVIGETKGTKVVYSGAVVSRLEAAQRNRLGIPVVQRDHGADKEFLFSLSEGDMVEWQGAYWRVRGVTTQSNGMPILSPSTDARLKADAIVERPTVNVFCKGGGRKVLIDHLGEVRLARD

SEQ ID NO: 1212 - protein, 1038 aa, unidentified
  REGION 1..1038: note = Description of Unknown: Cas Enzyme sequence
METVLGLDLGTNSVGWAVVQSSDLDDRSDFHFGVYVFPEGAEEDGGLRVSERAKRGQIRRQRKQLRRKRDRMRRVLRLLLNNGLLPADPEERANLMSADRQGAGRPHHPFILRKRGLDEPLTLHQFGRCVHHIARRRGYLSTRDLIARFYERRLGQVAARVANLDDDPVDIEGEDTPRTDEAKERSALLRRLKEVRAMIEKGNARTVGELCADRLLDPEVGPAGVRARGKRKKGRLDKKDPGWRTDRMLYEEEFEQLWDSQARFHPELRGNRLRDALRHAIFYQRPLMSKQGLIGPCEFMPNRRRMPRASLLAQRCSILQDLLNLKVSLGPGLPERRLTPGEIRPIAAELELRASLNWNEIRQVAGLPEQARFSAEPATAPARAGKGKSTRSRTSITGNRTMTAMRTALGEERWNAFSSSQQEEITHRMIHAFYPHNVIAGLVREFGLTVDEVRAISGVHLPQGYSNHCRAVWARLEPHMRNGLVYSEACEAAGYRQPGQSTEPVIERPLDRLGGLPDLRNPVVQRSTSMAFKVINAVIDRFGKPDRIRIEMPRDVSRTNHEREQLWKRQEEQKRDRDCARTHLIEHGHKPTDENIRKVLLWKEAGKRCPYEPTTIVSLAELMESYEIDHIIPRSRSFDDSLINKTICPRGLNLQKGDRTPYEWLGHTDRWAEIEAYLSGQMPMPAAKRDRIKSKECDTEDFTNRALSDTRYISRVILREVGKLGVPVDVSQGRMTAALRRAWQLEGCIEESEAEKKTLEQWREQAVKKRSKPRYDHRHHGIDALVTALTDRRTLQSLSTWFKTKESRGSYREAPTPKPWPTIREDVAARVPTMPVAVAPQRRLRDGINDATAERPPDPALVRAALAALPLARRGRPRKAVVVGSQLVRVAADGTPLAAYDLGNNHHTVIWEKVDARGNRKRQITVVSMHEAYRRKAEGIPVFDRTPFEEGWTCVMALCKYDIVEWTGERPGLYRVAMFSRGDNEFEIGLQYIVDACEIKETRRRVRSEGALHHIRARIIQGPLGDEIGREPSRGDGR

SEQ ID NO: 1213 - protein, 1027 aa, unidentified
  REGION 1..1027: note = Description of Unknown: Cas Enzyme sequence
MDYRLALDLGTNSIGWALLKLSDNKPSKIIKTGVRIFPDGRNPKDKASLAVKRRLARQQRRMRDRFLKRQKRLMAALITFKLMPPTDSERKALEQLDPYELRAKGLDKLLQDGELGRAIFHLSKRRGFKSNRKTDSGADDTGIVKSSISKTRQSIEDANCRTYGEWLYTRRLEGNGVLARTVGEGKDKGYEVYADRALIEDELRTLWNNQQKLGNTCCSDKAFEAIRGAIFFQRDLRPVNPGKCTFEIDEFRGPLAHLYAQQFRIYQELNNLSIIDENYKERKLTCDERDKVANALLTSSKKTFQQINRLLDLPDTTKFNLESESRGYLKGNESAAVLAKRDHFGKVWFDIPEHTQIEIIDQLLNNESEKEVIQYLENNLNLAHSKAQKIAHCRLPEGYGSLSICAINKILPHLKENVVTFDKAALIAGYNHSNFDLDEIYSELPYYGQILERHTGKPNELSSNSDEAKYGRIANPTVHIALNELRKVVNGVIRKYGHPTEIHLEVVRDLKNSQAAKKEIIKRQNENKRNNERYAEELESLGLKNNYDNRLRFKLWEELGASPLDRKCVFTGEQISLGRLFSAEVEIEHLIPFARCLDDGIGNKTLAMRKANRDKRNLTPFEAFGSSDSGYSWDDILDRADALPRHKRARFAANAAEKFAHQDEWLARQLNDTAYISKVARHYLTAVCYKDDVKTVPGKLTALLRESLGLNRLLGETPQKERDDHRHHAVDAIVVGLTERSLLQKASRHYKFAREQGFKRLLENMPEPWEGFTEQAVSSLSAIAVSHKPDHGVEAQLHNDTAFGIVQPPNDEGVSMVVRRKPLVDLSEKDITKIRDIRLANDVEEYIENSSLGFKDALKKFSQDRKIYRCRLIEPMTVIPIKDKNNTAYKAYKGDGNYCYEIFELENGKWDGKIISNFQANQNDYKLFRLDSKASLKQSFCGRPLVMRLCANDVIAITQNERQLLRVVKISSGVITLAAINEANTDARNRDKNDPFKLFSKSPNGLKSLDARRVFIDSIGRVKDPKG

SEQ ID NO: 1214 - protein, 1127 aa, unidentified
  REGION 1..1127: note = Description of Unknown: Cas Enzyme sequence
MDKERTILGLDIGTGSIGWGLIKILEDEYLDEKDDGTVDKKYRIINGEIIDTGIRTFQIPQDREKKSLALKRGTARRSRKTTRRKAQRLKRLIRLAKEFGLINDNFKRDKILKPKKGDKEKNWDIWAIRKEALERKLTDAELFRVLYHIAKHRGFYFHTKAEFLPEEDEKELKKGNKRKEEQSSEEREKEKVKKGLRRIRRMLKDKGYRTVGEMFCKEFKQTNTKNKRKRNTKNEYENAIHRSLLKEEIEIIFERQQKLGNTKAAEKLKQKYIDDILMHEEGINDEKLQKMMSRCEFTGELCAPKESYTAERFTLFNRLNTLTLVDTENKNESPRINDEQRKKIEALAYKNSKVTFAQIRKELKLEKDLDKRFNLCSYKEKDPEYNKKLVCAIKNGRLQFDEKHKVPVVDIHTGEVKMLDKEIKDVFKSKKLWPKAKNLYVYYSDIRKQLNLSEDFRFGFYDKNGKFKEIGKYTKSAAELGGEAEYIKQFEDRDTFVELKGYHKIKNAIETYYDDNKWVELAADTGKLDVIAEALVCHKSDETRAKHLKENGIADKKLIDAILTINMKEVANHSKNALKNILKYMDSESRMLFNEAKEKCGYGRIKYDKQPILQPYNGFFENNPAVARVISQTRKLVNAILRKYRNQYPIDQIHIEVATELASSRENKDNIAWGQRRYKEAKEAAVKRCREAGLEPEEGQNLLMFRLAEQQNYFCPYTDMKITLRSTGAANEVYIKDCEIDHIIPMSRSFNDSLNNKVLCTQKANQDKRDRIPFEWFEEAYGKDSTEWREYEHKVKSMPYAKRKNLLRKSWTEKDKEKFLSRNLNDTRYAAREIANYLRKQFDFSKSQRDDIKEVNRIQLRSGGVTAFLRYMWGLNKDREENDLHHAVDALVVGCSTYGHVYLVSNLAKQIERKGKNWYKHFGRNKFKPWDNIREDIQTAINKIFVSRMPRHTVTGAAHEETIISKKIKNKNRVIKINSGYAKMGEMVRADVFGDEAGRNYVVPIYSVDIFSNKPLPDKYLHKNDAPYVQWPSIKNKKLKFKFSLFKDDLISIDGQMYYVDYIRATRSQISVKKTDGSYINDVKGEKTKEVAYRNADLKKYSVDVLGNYKEIRQEKRIGNRFEKRVK

SEQ ID NO: 1215 - protein, 1081 aa, unidentified
  REGION 1..1081: note = Description of Unknown: Cas Enzyme sequence
MKYRLGLDVGTASVGLVALELDEKDRPVEAVYQSVRIFAEPLQPAKKGGGVGEPKKAARRLARQQRRLHERRARQMKRIAQLARPMGLDPEKISADKGQRIHEKRALAATSRVSLEDLLRIFLKMAKRRGYYGGFKVKKDNKKGAVETGISELKAEMKKHRCETLGQYLWHRVKNDKHLRLKEEGLFADRQMLQDEFARIWVEQEKHHPVLKEKHRERSLRECFERAIVEQRPLKSPAPMTGNCSLEPMLPRAPMAQPVMQAFRIEKQIADLRWGSSRRAKSLSPEQREFIRKELQNKKEVKFTALYKALQKAGCPGPEGRELNLAHGDRETLTGDRTAGAMRTLKLQDKWEKMMAKHQISVINLLADMGSPEVFDAPEWDKNLMGSKGKERKIEPEVKEFIEAMLDTEKFGRLAKMGFDGGRASYSIKALEKLAAIMQKDGVDEHGAIKKAYPQNQAEQLNATLPSHDLTGNTIIDVALRQVRWEVNRAINKLGGAPAQIIIELSRDMKAGPNTRKKRMKKMRDNEKRNKIAAKEINRCTGGSATPSQIKRYLLWEEQGKKYCPYCSVPINLSAAINGNQTEYEHILPKSLTRIGKKRDFLVLAHKSCNQDKEDKTPWQTWGQDKERWKIIEERAKQFEAGYKATIDGKERTFKRKGKARQLLIKDFETEALDEELIGEFSERQFQESARIAKACGKWLRRICADVSVSRGLLTAHLRRTWGLDTVIPEVRYEEGMPVFDEDYQAGEAETGQEKCKMSKADFDKHRSYWEGRSTTSKDKRTTRRLNKRIDHRHHLVDALVIALTTPGLYQRMAMNYQQVSDAGKRKPRLRAEPGLKQDIRPEALRLVRDCSPRHKPDRWLGGNMFQDTAKAIKEENGKQFYVYRKDLSALKKGDIEKIVSETIRKEIEKEIKKRLEQGMTLEEALKEPINDPEWKTPIRRVLLRGNEAKDAVKVEHGDRQSDLHKHLEPEGYAYLEFDSKQADSTPILVRLHEAIKQSKQNAREGIVRFHKNDTVRDPKDNKCYIIKKFKEGHPTVFLCPITEAVADIGKINAPRSKQISGKQIKRLTLAQDDCSSGSTD

SEQ ID NO: 1216 - protein, 1136 aa, unidentified
  REGION 1..1136: note = Description of Unknown: Cas Enzyme sequence
MTNIRYRLGLDIGIASVGWAVLRHDKDGNPDKIINRGVRVFEACEKPKDGKSLAAARREFRGLRRRLRRKKHRLDRIKELICSEFNISLEYLNSLFESNTPRKDVYVIRFEALDKKIEKEEWARLLVHFAQKRGFKSNRKSEKITNERKNEKTTEKADKLKDETGKLKAAIKTNEQLMESKGCRTIGELLYKNYKRTKQKEDGSFIDYFETRNKAGKYDLTFSREQVDDEVEYVFNSQKRLGNKFASDDIKEKYKEILLSQRNFDEGPGQGSRWRGKGNMIEKMVGTCTFEKGEPRAPKNSYTFERFMLIQKVNNVRLLGSPQKELTVEEKAKIINEAYSKSKLTFKQIRKLLGIGDYTESGKPQYVFNASIYSKKAKGKDADGKTVWNYMTYEKCEESTTFIRLKGYHDIKEAVKIDTLTPQDLDEIAYCLTVYKNDDRLKEALSQRNFKEELIKDIIEKAPNFDKFGHLSIKAMNKILPHLEKGLTYDKACLAAGYDFRNQNNDEKLTKLCFNDIANEIYTPVAKRAVSQTVKVINAIIREYGPPDCIHIELAREMAKNFEERKKLQEKNEDNQARNEKMMNEIREYESAPIKPGGQDLEKYKLWIEQKNYCAYSGERITIQDLFTNAAEIDHIIPYSKSFDNSYNNKVVVKTKYNQEKSNHLPMEYIKTKGDKEVKRFKDWVDDVIKNRTKKNNLLATEIDEQGLTQRNLQDTQYATRTIADFVRNKLQFTENDKFVNKVVCLNGGVTSYIRRRLGLGKDRSTDNHHAEDAIIIASCSQGMQKKISDYEKIRRACNFKDDDVWIDRETGEVIKMAREFPQPWPNFRKEVILWFEENPQSEINLKMRRELLPAYEEDEIIKPLFVSRMSNHKITGAAHKQTMLRTEEKDREEHIIKRVPLIELKLVKGKNNENEIEKYYNKECDKLLYDALLKRLIEFDGDAKEAFKEPFYKPKSNGQNGNIVSHVKIDSGKISNSVDLKKIGAKAANGDMVRIDVFYKLNEKTDKKQFYFVPVYVADFKEKELPNISTKGDEMKEEDGYKFEFSLYAKDLMRIKKKDKAPEMLYYTNAGIATGSINAIPHNNTQNKIESIGVQKLEIFEKWEIDFLGNYCKAPHLPRNIKTLHGRRKKDYLLK

SEQ ID NO: 1217 - protein, 1179 aa, unidentified
  REGION 1..1179: note = Description of Unknown: Cas Enzyme sequence
MIELLQKREKMNKCTRRLGLDIGVTSIGFSLIDVFQEDNKTTFKNIATNSIIFDKVLLADERRKGRSSRRLHDRTKRRKKNIRNIFYQYKIADKNFVESPTKYLNDLQKEKKLDDVYKLRKKALEQDITKEEFLKSVYSITTKRGYSNQFEIVESNKGGNKTEKEEQEKVNGSINKNIKEIREKGYILPSQLLTARKEEWEKEGFINIPIRNKQQDYSNSLNRNLHEQELEAVVLSQRDNKNIFSSRNDCEEFLNKIKKVVFFQRPLKSFENMVAFCSFYDKYHENRQKRMPKASIYNIELVIRQTLFNQTAVDKKTGEVYSLNQKETDEIVEKWIKAPTSDLIKFKNIFSKTSIKHLELLNRGSSDTILDIKGFRQLSDIFKKYKLDYINEKRDLYEQLCLILSYYKNSSSRKEHIEKTITFDFEEKEFFIKEVITITSIDGFARFSQKFSQEILENMQKGSTFSEALEELNYFDKYLNMPTYNYLPPLNPTKADIKWLHDNIPYFDEKHLFYSPNTSKTVVRIVSVLRKLVNDIIKKYGKIDEIILEGSKELNTKQEEKQIKENQKIDFKKNKEAKELLKNNNIEDYTNKKKIKKIKMLIEQNYKCLYSGKTLTIQDALDEEQCEIEHFIPRSHFWNNSQKNTILVLKKYNQNKTNTFPIDYLKQINKWEDFKEHVKNSKMQKNKKEWLTNEDKIIAIINKDTKIFRASFLNDTRTATKIIKNYLEHYLFPKENRYGKNENLHVKVVSAKAINELKHIFGISKLIASKETGKKDRTTNYHHGIDALTVALCDNKATFALHNFFKMKENHFKTAAMKERIKNNIPVTEDKHSIFTFAENLVKKYQNNEMYVCPYRKRKFNKKGFKDGNKKLIIAKNSKGLEQLQDIVKISIMPYDLLQKKEKLTKKDRTDAEVIEYIKTIQEKLNSSKQKLIIKALEKYGNFLIQKRKEQQKFDKILKDLKNKQNNKKDMQDEELNNCIEKANIAYNKVSKEISKSNCYFLTKKGQKQIVKSVRILSDSETHASTILLQDKNRTKMYKLNKESFIEAKSSKKPFVCKENDNTFSVEIYKSKKKQFVGLNYFRSLANEIPPSFNKTGEKTKKEFSLSLTRKDIVAILDNQDKIQYLAVCNGGGNISNGKNLINLNGINKDSDILITIPLNNKNIIKKAKIDFYGNFKVI

SEQ ID NO: 1218 - protein, 1069 aa, unidentified
  REGION 1..1069: note = Description of Unknown: Cas Enzyme sequence
MKRLGLDLGTSSIGWALLEEEDGNARKLVDCGVRIFSEVTDPQKRESFVPKNRERRQKRGMRRNLERRAARIRTARDALVEAGLLPLDEEERNRVVDHLDPYEVRARALDEKLSLHQIGRALFHLAHRRGFKSNRKALFADLHHLDPRVREFIEKPETDEMEGQEELSKEEKKEQSETLKAIAELRQEIEKNGCRTLGEYLYRINHEREPHDRLRARERKTDRAMYEEEFEAIWAAQQPHYPDLLTDGLRAKLFHAIFFQRPLRRPYVLKRVKLPDGTEKLKLKPKGTIGRCQFERHHRRADRALLLSQEFRIWQDLAHIEVLTDNLAGWRFLTLEERNKIYAALHGKEEITWKQFRKVLGLSAEARINFEVDGGKKKFAGNITDVRLRRIIGDEWDAWPRERKDKLVESLLTITDKADLVKHLLDHPNWRFDPKTAYRLAILQLPGGVMSLSARAMDRILYGPKPKGGGDRIPGYGLINGQNYHDACQAAGYLRADQISQHLLSRLPKPELTRNPVVDHALHQVRKLVNAIIREYGRPDAATIEMARDMKLNREQRERILRENRENREQRDWAVEKAKELGIEEPSSDQILWLRLLKECNYTCPYTGKSITERSLLTGDFEVEHIIPYSRCLDDSYMNKTLCDTQFNRHVKRNKTPYELFSSDEQRYGEVKLRIQCLPKPKQKKFEQIEIDTEQFVSRQLNDTRYICRATKDYLKQVIPEVDVSRGGATAALRHVWGLNGMLPAPPPDSEKAKAEKRTDHRHHAIDAVVIACTTRSLLKRLSDITAKGGSLTLRQTVDDERLKFPPPWPTLRDDVKKALDTMVVSFAPTRKLFGGLHEEGIYGVHMDGDRPMYHIRKRLEDLSAGQIEDIRDPELRKQVKERVTAAGGDLKKAFAESPTYKRTRVRRARICVAREPKATVQLPHGHAFLGSYHHVEILECLRAHQDEEGKKWKVGQRKGVFVSMLEAAERAHGKPSKGIPKRPIVQRDHGPDWRFVMSLSQGDLVRMDEDEKLYRVQKFGATAARAVFREATLAGPDEKWGLLQQAINVLRCTKVNTDLLGRVFPAND

SEQ ID NO: 1219 - protein, 1123 aa, unidentified
  REGION 1..1123: note = Description of Unknown: Cas Enzyme sequence
LSKKILSLDLGITSIGYSVLDEMQNDRYRLLDYGVSMFDKATDKDGNSKKLLHSINSSTANLYALRKKRKQNLASLFEAFGLGEKTTLLQQEKNNLYKNKWQLRAKKAFEEKLEVGELFTIFYALAKHRGYKSLESGDLLEELCEKLGIEVQSASKQKKDDDEKGKIKKALKTIENFRVENPEKTVAQIIYEAEIKKENPTFRNHDNYNYMIRREYINDEIGKIIKMQENFGFFECSFDVDLFITKLIATIDDQKDSTNDLNFFGNCQYYDDEKAAHQYSLLSDIFKMYESVANITFNAKPVVKITKEQIQLITDDFFKKIVKGKNVTEIKYKDIRKILQLSDDMKIFNKEDSRIIKGKKSDNTIIKFHFLNNLSKINNNFITKALEQENKYEILKEIFDVLAYEKAPHTIFENLKNKIEDEQTIIDLIRYKSGNSMNISHYAMMQFIPYFEEGFTTDAIKEKLGLDRQEDYSKFKKGIKYLHVNNFEKDDKLEINNHPVKSVVSATMRVVKHLHATHGAFDEIRVESTRELSQNEETKKEIEKANKALQKEIDTIVNNKEYQEIAKSYGKNLKKYARKILMYLAQEGRDIYSGKGIEIADIFTNSVDLDHIVPKSLGGLSVKHNLVLAHRNTNVQKSNQLPLNFVADKQAFINRVEYLFSEHKINWKKRKNLLATNLDETFQDIFESKSLRATSYIEALTAQMLKRYYPFANEKKRVDGSAVRHIQGRATSNIRKLLHVKIKVRDTNIHHAIDAILIGLTNQSWLQKLSNTFRENMGIIDDEARAKIKKEIPLIEGIEPQELIEMIEDRYNVFGEESVFYKDIWGKTKVINFWISKKPMVSKIHKDTIYAKKPNGFYTVRESIINKFGGLKITPKTSSEEFIKIFKKNILHKMYLYKTNPKDTMCQIIQKRGEAIATLLDSFTDFDSKNKEQMSEAKMALDSLIHSDLVDNNGNIVRKVKFYQTNLTGFDVRGGLATKEKTFIGFQSWLENEKLHYKRIDVANFKKIKKQNDGNFQVFKNDIVFFVYPNGSFRGGKIVSFLEENKTGAFQNSKFPMSLKYQPEIFCELNKEKKHVKTKPRSIGKSTGIIKLNLDIIGNIKSYTCIGKIESEILDFIKASVNG

SEQ ID NO: 1220 - protein, 1554 aa, unidentified
  REGION 1..1554: note = Description of Unknown: Cas Enzyme sequence
MKAQEMTWGYDLGKGSIGEVVRLKTAGKVEFPHKKVWLFPPDFARRGPTTKTGTPASRYRAWKTRLAHKKREEWLDEIWQAAGLIALHGRQVAVVRGKWCLAQKGDSRLESEAIGTKPEDCCSSCLLRVRLLRSGEKLADWQIYKALRAAIQKRGYTSVPWERGSKPKENLTPEDKAAVEKGNARWTKFTGLPEIQRLGKDFQLPCYYDAFHLGLWSPGAPDKDCNGETNGFADEHTRKVIFDGAAVEREVLLLAEKAVALYPQLRDGFRKVMDKYKQSVRDRITEINARRALRNKALLHIPLKGGATSFGELLAFGVGGRPNTADDKRRIASWDRNIQKDMGLKPGSPQDQKAGLGQIVARFENRLRAECALIRRHPGLPRLAVCRNPSREKIQNAKGDDDPCLLPAQFTFLSKLKNMWVEEKAEPHSQRKLYPEEIQKIFAEQNPKRAYSLTPGQWRNWCERFDVQPALDLKEKIEDAEKAAGDNQESKVKKKKAFVVAPPSTEGRSRFSRPALRILNKLILSGLKPSELHGFLEKRDEKLLDELKLDILDAPQIRIVGEKGREFIKQPRTWLLASDLDFFSRMRNNEGQEDWDKFSIPSSNLDRLAAESNATETERRDAIKKLISQQNNPIVRHRLTAFWERLQAMEKKFGIPDRIVLELIRDDPENSWLGKDTVKEIIKFQGKNREEREKARKRLKELPQYKNEEPSETTLTKFILWEQQGGECLYGRQAKEAENVYLETGLPISKLEQFRIDHIVPRALGGPDSIHNKVLTDDDTNARKGDRTPFQWFHDDRLEQWQAFRDRVLKPNKKLGGKKIRLLLSANAEEMVKRYTPLAETAWIARVAQVVTGLHFGWVNGIDEKRKRRITRVSGGLTGRARRQYHLNSLTGEHADQPLSADKEERKDREVQAEAERATKDRKDKRHHALDAMVLTFLEEWVNDPEREAEFRFTDLGDNPAYLPKDQFTRKRDYDRIAQLQEDFKKCRTTGRGEEIQREITHCRDRLAQMRQKRNWRPVREFFEKQLKGTSLDGQPVIPIYRHYEKPRLEATLHRGTWMLEENSKAEKTTVEDYDQAFKTEKMSLLDLPYRVRDGSEKSFDLEHARRRAAVIAPHKDYNEEVVRKIIQEFLRSNPKETDWKKFAASEQIPPLIKPKKGEPDMRNILLYRLKEVRTKHVAVFETGLGKKSVAVFDSDHFDDQLARLVTKPERPKKGDKKTPVVVSASPVPPQPNIELQALLRGLKPQIEQFFGEHNPDMSEKSDAEEKAFKFALDEFAKKHGLDKHLPFYLSKDQEKPTDNPWERKSLSGFLIRNEKRFSSSAALKEACAIIDPWIRIQLRYFYRTNPLPKEWRMFCDVFCQVKREDFKTFVTGASRSAADFIEFYQSARRSGRGGQPITGVHQLIGEKLEEYVDVSKDRSGQYAKGGNRGYFIYKRKQDQGFVWHATPVRVFQSVQTIKEQLLANSEIEPLWECEPDGKKIWRLWRTNMLFRLPQTVETGKNKVEEGYYFLGSISCRDGKNDYIDLNSPIGKKVPRALIFDEVMKAGLRYTPAN

SEQ ID NO: 1221 - protein, 1169 aa, unidentified
  REGION 1..1169: note = Description of Unknown: Cas Enzyme sequence
MEKVLGLDLGITSVGSALVDLDYNNLKNTNILHCNIRIFEAPITSKEKTSLQLIRGENRRARNSKENNAIRRKKIVNVLLRYKLIDKNEIKNINTNLPKSKLKREIIVKTANYLFENKKNANNILELRYKALNEKLSNIELARLLYSINNHRGVSYEDTRSSKNISEKKLEEFSKKDINDYADGSSDKLLYGLLNFKNAFINSNKYQTVGEFLYKEHKEKFRNSPKRLKDTKQSDFMFVIPRKNIVDELNFIFKKQKEFKNEVINDDFVKEYLEAFEWEEDSPAYDELVANCSIKESEKAASKYLVESQFYIYLEKLYNLSYKTKDEYRYKNLDIETIVKIIKNLNIKSIKYSKLKEFIEKELNFQDVMFKGVSDYKKDFIDLSIFVNLASILSLSANILELFQNIEAKNLFNQVVNILAYEPKISQKEERLKELKIVDEKIIDNLLEVKIKGNLSYCGEVLEQICNGMLSGLIPHYAKEEVQKAYPKKPIIKGHLLPPLLDTDFPIKNNQVVVRALSQMRLVINDTLKHYRKLYNNPNWFFDKIVIETGKEFLNKEQVKKYNDRAKENEKSNKEAIEFCEKYGKAYPSREEILKARLFLQQNGEELYPSNYDISTNSAKFQQIDAQRLFDVAYCEIDHILPISRSLDDSFANKTLVLSTTNQNKGDKTPYEFLSKELFEIMEDKLNKNINSLGYKKVSNLTNKEFKELDGFISRDLNDTRIITKYAGLYIEKYLAFPKSEKTKRRVFANNGKITSLLRKSWGIGKKNRNNHLHHGEDAILIALSDNSLIKNISTYYGIQTQLENIDFSKDGFDKLFKNNKSIKEHIINELKKDGIDIENIDFSKYNKKEISSKIFRIIAQKSYPREDFLDIFRNSIENAIVTHQERVKINGQIHKDTLEKLSKRTNDDVVLVRGGFATNGEAIRYDVFKSDNKIEFKRIAPKYCNKKVELLPQANDNSAKFMFSIYKNGLLKVDFIKDDELFNIKGIFSKIDADAKGMLTYIYLNSVRNTEDNLFISFVSGFLNSTIYDDAIIGDDRKKIEELLKKNKIKITDSVRDKDTIKSKIVDFMNIVKSNTELVIGFNIIRNNNILNSIHDDLSEYLYKKDLKYDVIINIDGKPATPILKIKLPIDDKKTNLPKMVNIIKLKTDTFGNEEIIENEKREPLIKK

SEQ ID NO: 1222 - protein, 1086 aa, unidentified
  REGION 1..1086: note = Description of Unknown: Cas Enzyme sequence
MTTILGLDLGSNSIGWALLEEKDGKPHRIVDLGSRIFTKAVEEKTPTPKNAKRRDKRLARRVLQRRARRKQRMMNYLISLDLLPEDLKRHLQPEKVLNRIGTPLIDNDGNQLKTKKGNVVYPNPYELRAKGLDAPLTPHELGRVLLHLVQRRGFLSNRKTILSDMMDDPDVLSVLNELDEEDNQDDATEKAKEETAFKADISELRKKINMDNCRTLGEYLSKLPQHTAKRNRIRNGGHLRTDRQMYQEELDAIWTEQKKHHAVLTDDVKEQIEQIIFFQRPLKFKEDRVGKCSLEPRNRRAQIARLEYQRFRYLQDINNLQYLDLFEDKWIALNAEQKEKLKALFESKTAITFANIRRELKLDKSAEFNLEHGNKKLKGNITACEMKGVLPQWDDLDHDTQLALVEDMLTIHKKAALKTRLINHWNFDVETAVNLCLVEFEPGYGSHSIKAIRKLLPFLEKGAKYSKREGDEAAGAIQLAGYDDGQSKKGKPDDILGLPPEIPNPIVSKGLHELRRVVNAIIAEYGKPDKIRIEMARDLEMNTKRYKAFEKQQKANTKANDEATQLYQEMGKKYPHLHLSKYPSHADKLKYRLWKDQNELCAYDLAGTKISDAELFSANIEIDHILPYSQSLDDSYMNKVVCRTRENRVKGQRTPIDAFNGEQWEQIVQRIARWDRGLKSKKNRFYMTAADVQKRDFISSQLNDTRYISTVALKYLKPLGADINVTKGIMTSWLRHQWNLNSLIGNDKVKKDRVDHRHHTIDAVVTACIDRRFYTALARMAKELEKKRQTVDDITIDPPWQSLHSDLNVMLDKMIVSHAPEKKISDELHEDTGAGFIEGKGTVYRKTLLEYFDDPDSKKRTKTHAIKKLNAVVDPAIKDILENHLKRFEYKVREAFSDNQLVFHKDGKTPIKRIRIYQSRAIKTQQKLEKEKFGKRDKSGKIFKWYSYGNIHHIEVLRKTDTGKVEGRFVTMMEAHRRAMTGTKSARERGVPPEPIINKDLDSSHEFLMAIHRKSIVELVVDSQKGFYYVKSLGQISQGKQPRPILMPHIVAVGNNGKESDSIDNLVRKYNMKLCKINAIGKLLDD

SEQ ID NO: 1223 - protein, 1026 aa, unidentified
  REGION 1..1026: note = Description of Unknown: Cas Enzyme sequence
MAKVLGLDLGTNSIGWSLLESSDNRGNEFIGIVDSGVRIFQEGVDRSTTGAELSKNAKRRDARGARKLHKRRNQRRNALKELLIQHHLLPSDELNWQKIMQNNPYQIRSQLLLLEQDTVDKQSDTAILFTLGRALYHINQRRGFKSNRISGESDGKVATALTELQQQIGEKHYRTLGQYLYSLDPREQRIRCRYTSRAMYEEEFETLWAHLSLFYPSKLDDTLKNLVKNIIFYQRPLKAQKFLVGICEFEKREVLNDKGDKVWTGKKRSPKGSWYAQQFRLLSEINNLTVIDGNDEWQLSQDLDLRDKLVKALQKKKTMNFNAIRKLLFDKNDQPYDHIRFNLEEGGRDKLQGNEVEASLRTVLKKDYEHLSIEYRDNLVHDLLFLEDQIVVQSHCEKIGKHISLSAEQVQALANIKLVDGYVHLSEKAMKKLLPYLEQGLKYSDAVEAAGYLRKDQQEDNIVPQLGEPPQLRNPIVQKGLYEVRKVVNAIVRKYGKPDFIRVEMARDLKQSAGQRKEVGFRNAKNRRRNDEIRKRLIDEYAIANPSRNDVIKFRLWEECNHTCPYTNQTISAAMLFSSEVEIEHILPYSRTLDDSYINKTLCMSSENKNKGNQTPYEAYHADADKFSMMLARVRKFTGQFGYKKFNKFRQKEIDLDSFIKRQLNDTRYISREVTKYLQQLVGKYGVQSGRGQMTSTLRHLWGLNGILSDSGEKTREDHRHHAVDAIVTALSTPKALKAVSSASKYGHLNKLSIEQFPMPWEGFRHDVEASIQSIIISHRVMRKIRGALHEETAYGALSFTDDKNQKMYAVRKAVSALSHKEITQIADEKIKGAISSHILQKGYDPKDKADVAKALKEADKNPPTMLSGQPIKRVRLHKPFSKMRILNNKQGQAYRAMQEGSNHHIVIYEYEDKRGKTKRGGHVVSMFDAAQRARHGKPIIERKLEDGQRFVMSLSINELVQVPKGEGESNVYRVQKMRSNTQVCLRLHAAANINSRETCLEVMPSSFKGRKVVIDPLGQIYPAND

SEQ ID NO: 1224 - protein, 1016 aa, unidentified
  REGION 1..1016: note = Description of Unknown: Cas Enzyme sequence
MANVIGLDLGTNSIGWSILETSDERGNHFTGIVASGVRIFQEGVDRTTTGAELSKNAARRTARGTRKLHKRRNQRREALKRLLVENRMLPSGETEWHELMQKNPYELRALGVEKKISLFELGRALYHINQRRGFKSNRKTGESDGKVASALVELEEKIQDSGFKTLGQYLNLLNTREQRIRGRYTKRSMYEQEFDYLWKQQAGHHRDELNDDLKNSIYYAIFYQRPLKNQKNLVGLCEFEKRQVVNAQGEKVWTGKKRSPKGTWYAQQFRLLQEINNLKVIDGTDEWQLADDLDLRDKLVAAMQKKKTMAYAAIRKLLFGKSDQPWEHIRFNLEEGGRDKLKGNDTEASLRAVLKKKYDSLSVEQRDSLIHDLLFIEDEDVLLRHYRGLGDSLGLTNEQVEKLSKIKLQDGYLHVSEKAIKKMLPHLEQGLKYSDAVEAAGYLRKDQQDESIIPQLGEPPQLRNPIVQKALYEVRKVVNAIVREYGKPDFIRVEMGRDLKQSAAQRRESSIQNARNRKRNEEIRNHLQKEYGIANPSRDDVIKFRLWEECHHQCPYTGQTISAEMLFSPEVEIEHILPYSRTLDDSYTNKTLCMSSENANKNNRTPYEAYHADEERYQIILARVRKFAPPFGYRKWNKFRQKEIDLDTFIERQLNDTRYISREVCKYLEPLVGKYHVQSGRGQMTATLRRLWGLNHILHESGEKTREDHRHHAVDAVVTALSTPKALKAVSAASKYGRLDKLSQEQFPMPWDDFRRDVEASIKSIIVSHRVTRKIHGALHEETAYGELKITDEKGQKLYAVRKPVSALSHKEITQIADEKIRGAISSYILQKGFDPKDKSDVAKALKEADKNPPKMRSGQPIRRVRLHKPFTKMLLLKNRQGKTYRAMQEGSNHHIVIYEYEDKKGRSKRGGHVVSMFEAAQRARRGEPIIQRKLVDGQRFVMSLSINELVQVPTGENEFEVYRVQKMNSDLTICLRSHTSAIITDKATRRFVKPNTLNGRKVVIDPIGRVYPAND

SEQ ID NO: 1225 - protein, 1095 aa, unidentified
  REGION 1..1095: note = Description of Unknown: Cas Enzyme sequence
MSQRVLGLDLGVASVGWCLLEPENEAVCASGARAFELAIEPKGGTPKNVKRRTARGARRTVRRRQMRRDALAGILREQAMLPDSPQEFAALFSNHAQNPYALRARGLDEELTLIELGRALYHLNRRRGFKSNRGTKFGDMAKDPEIAAIIAFDAEEKAARAAENRKPKDDELEEDKEEGVVLAEIATLRAEMIAAGSRTLGEHFAKLLAATDEDGCLAFMPVRRRYTERAMYEEEFDALWTAQAAFHPNVLTDGLKARAHQAIFHQRPLRIQRGLVGKCRYEKARPRCDKAHPDAQEFRIWQLLAHLSYRRTDTFDWTPLTQGQRDTLAALLATTAKVSWAGFRKALQLKGVVFSHEGKPGHDKDVSGNTTLIRVEKAVPGLWASLDSTGHDALVEALFTIPRKDSLVRRLRSRWKLSTEKAYRLAVTEFDDGVASLSLQAIRNILPHLKAGKDYHGAVLAAAESFRAGGRDKKADLYLHEYQKEQEAFDSLPLDRLPNARNPVVDKCLHEVRKLVNAIIREHGKPAVVRIELARGLKMNQKDKKKLEEENKKNEALNKKADEAFRAERGGVATRTDRIKYRLWLESNQVCPYTGEPISLGKLFGGEVDIEHIIPFSRCLDDSFANKTLCIAKENRERKKNRTPYEAYNGTEQYDQILQRVDDMKCGRHKKRLFRLTPEEVQELYKDLANRHLNDTRYIAVLAKDYLKLLGVEVEVGNGKATAALRHRWGLNTILAPGDLEDEARAEKNRMDHRHHAVDAAVIAATSRAYLKRLSDANKKLEEDEATGERASLRDADWVAPPPWEGFRDAVAQSVRNIVVSHQATRGLSGALHDETAYGWDPKAGKFTVRKPVLALSDKEIEGIRDDKLRQLVAAYRAEVGALQAKKKALRDAGEKVEKFVEPELSFQDRHGKWRTVRRVKVNTKLTEPSKMLKVAMKPSEKIPVEPDPRAEKSMPFGSNHHFVIYHDQLSSRVQVEVVTMHEAARRAVRGQPIFAPTLTSERLTPVMALCANDVVEVEGLPEKYYRVVKFSTPGNDRIGHANIDLALQPLSDAHSFDYKMERHERWTSTDKLRRIKRRVHVGRLGEVVDAVDRL

SEQ ID NO: 1226 - protein, 1040 aa, unidentified
  REGION 1..1040: note = Description of Unknown: Cas Enzyme sequence
MILGLDLGSNSVGWALLTEKDELAELTAVGVRVFTEAVEPKSKVPKNAERRAARGIRKNLDRRRRRRNALRAVLTQAKMLPTDSLEFERLFFDHGLNPYLLRARALTERLTLHEIGRALYHLNQRRGYQSNRRARRIDKVDDPEIIAVLKEDERQEELRALERKQKRAEKGQRSASDDEDSVVLAGIATLKSALQASTQPLGVYLHNELAEGRKVRKRHTERSMYAEEFERIWETQRTYYPHVLTDGLKAEIYSIMFHQRPLKIQRFLVGRCRFEPNRKCAMKAHPVSQTFRILQEVANLRAHDDVTKLPIDITLEQRHTLADALEHQGSMNWSAVRKLLKLDKNTRFNFEESKRDAIEGNTFTSKMRSVLGDSWDAMDHNTQDSLAFDLLNIPRKDALVRRLRRHWNLSAEAAYKLAIWEPPTGTMSLSVKAMRKLIPFLREGMHYREACEKVGYKHDEERSACDLLNKPPDFRNPVVNKAMNQVRRVVNAIIRKYGKPDVIRIEMARDMKLNKKEKAAVQRQNNENRKANEEAETELRNIGIHSPSDIDLKKYRLWKECGGICPYTGHPITLDMLRTGEVDIEHIIPYSRSLDDSFNNLTLCYGEENRNVKRNKTPFEAYGHDPQRWREMSSRISTFKRRKRILFTRETVPEEVTEEMAAAKLNDTRYICRAVKDYVATLGTTVTVSKGEATALLRRAWGLNAVLGDGQQKARDDHRHHAVDALVIALTSVSLFQKLSRLSGIRGGSLLDSGITPPEPFPNFWNIVNDKFKQIVVSHAPTRKIAGAFHEETAYGKGMDSSGNELLVYRKPLSDLSAPETERIRDPHIKRLVMERIEEAGNAKKAFADEHNPLVLKDKAGEVVKDAHNRPRVIRSVRIAKRGSFNPAVIHGVKNESGVPYKFFTYGNNHHVEVLECLRDGAQADGKKWKKGDRRGVFVTTMEAANRARRLRLPIVQRDHGSDWKFVMSLCRNDIFKLEELPSALWRVQKLDATSNRVVLREITAANLDDPDEGKQVAISKLIGTKLAVGPLGDLHPCSD

SEQ ID NO: 1227 - protein, 1207 aa, unidentified
  REGION 1..1207: note = Description of Unknown: Cas Enzyme sequence
MKQRILGIDTGTNSLGWAVVEKQEDGLYNLIDKGSLIFQEGVKIEKGIESSRAAERTSHRALRKQYFRRRLRKIQVLKVLVKYQFCPFLSDSELNLWHTKKVYPKSDDFMLWQRTSDNDNKNPYYYRHLCLTEELDMNSENDRYIFGRAIYHLAQRRGFLSNRLDASEDNDDNGAVKGGIKSLSEEMANAHCEFLGEYFFQLYKEKGNTVRIRTHYTDREEHYKREFYAICAKQHIQKELFEELEKALYFQRPLKSQRSGVGKCTFEPSKPRAAESHPFYEEFRMLSFMNNIKVKGPYDVELRPLNSDERNKALPMFYRKTKVNFDFEDIAKAIAGKNKYQNIREEGDKPYKFNFRMTQDVKGCPTTAALMSIFGDNYKEAIAESYTQSVKKNGEVKTPDEILCDIWNVLYFFSSENKLEVFAHEKLQLNNEDAKKFSKIRLSKGFASISLKAVKNILPFLREGIIYSHAVSLAKIPSIVGKNVWESDTQTQNEIKSFVDNFNPKDCGLQGTLEKCLKDILLERFDLKAGAADCIYHPSMIDVYQDARKNSQGVFQLGSPRTDAIRNPMAMRSLTQLRKVVNKLLQQGIINNSAEVHIEYARELNDANQRKAISDWNKDQQKKRDEAKKAIMEFRHTISEPPNEDITKFMLWEEQKHICLYTGDQIGLEDFLGQNPSYDIEHTIPQSVGGDSSMMNLTLCQSKYNREIKKAKIPSQLANHEDILERISEWKETVEELTKQIDRQKTNSSMPKATKDGRIQRRNRLKIERDYWKGKYERFLMTEVPEGFALRQGAGNGLISKYAALYLKSLFHKEDDRNKGNVRTIKGLTTAEFRRMWGIQEEYEKKSRDNHIHHCIDAIVIACIGANEYNRMAQYYHQEEDFRRGEGNKPQFEKPWPTFTEDLKQLEKELLVVHSTPDNMPKQTRRKHVKAPDGKYYPSQGDTARGALHRDSYYGAIEHDGEIVYVKRKAISDFKSVKDLESIVDEAVKQKILDAVNGKDFKKAITEPIYMNERKGIRINKVRCIENTVKNPLTIRQHRDTSKKEYKQQFNVVVDTNYAMAIYEGYKNGRLKRSCQTVSMIKAAKYFNGHIESSYNISDDGLKFKCLVQKGQQVIMLQHNEEDYHILSQQELRNRFYYITKIMSDGRITLRHNQEARQATELIACAGGYHEGDEFRPLMRVSLLDFNALIEDVDFSIDVLGHITFLK

SEQ ID NO: 1228 - protein, 1083 aa, unidentified
  REGION 1..1083: note = Description of Unknown: Cas Enzyme sequence
MDSNANSQNILALDIGATSIGWAILKADSARKPISVLDSGSRIFDAGVDGDLTAIRKGQDKSNAIARREARSVRRRLDRTARRMTKLFNHLTEAGLMVKPAAHVNHSNSDKRESRSARKHRKRIEKAVARDKHLAAYDKDCYRKWVSRLKTESADKKTISGLRKKFPYFLRAKALDEKLEPLEIGRIIYHLAQRRGFESNRKAPTDKEEGQVKEGISELRHKIEESGARTLGEYFSLIDPETDRIRRLWTSRDMYRQEFNLIWESQSRFYPDLLTDELRSLLYEDIFYQRPLKSQKHLIGKCEHEHNRARAPLSCLEFQKFRILQTLNNVLVITPQFQKRDLTEQERNTLIEILSTQGELKWSSAKKKLKLPKGCKFNLEEGSAKGFTGNRTASKIISVIRKDKWLDLSQKERDRMVHYISCIRDPEVLVKCAMKYWDLNEEDARKFSGINLEDGHANISRKAIRKLMPYLEKGVHYATAVKEVYGDALHSDSFDYLPSVDDPEVDAAMQGLRNPAVHRALSELRKVVNAVIRKYGKPEMIRVELARELKQSRDDRKDVTRKNAKNQKLRESARQRIIDKISETGISNPSRNDILKVLLADECEWECPYTGKPISMGSLFNPSQFDIEHIIPFSRCMDNSYMNKTLCWHEENRNVKKEMTPYEAYSSMNKWEEILGRVGKFYKDPMHPKMRRFLMHGKELEEYCDFSSRLLNDTRYISRLATQYLGFLYGPEYRKHIQVSTGQVTAWVRNELDMNSILSDGGEKSRDDHRHHAVDAIAIGIISPGLVKKLSDASKRAYKLYDLFEHIDPPWEGFLSDARNSIDRINVSHMISRSINGPLHEETFYAPRPREGNGTKPEFYILRKLLNKFQKSDIEKIIDDDVRAAVQTALACSAETDPSKLFTDENNLPVITDKNGVVHKIRKARIKVRANPFALGTQDIERHVLHKSNHHVEIVEYTDKKGNLKWEGHVVPQLEAIRRHRAGEPVVKRDHGPGKEFRFSLSSGDLIEIDGDGVLKELKRIRCVSSSKSGYLTVEFVNLNDARKQKEIKANSEWFKKSIDPLRQLHCKKVIITPLGDVRYAND

SEQ ID NO: 1229 - protein, 1184 aa, unidentified
  REGION 1..1184: note = Description of Unknown: Cas Enzyme sequence
MKYRLSLDLGAGSIGAAVLPLDEQNRVTDILDTGVCIFKVSEGAEDRRLKRSQRKNTYRTKKRLSLLSEALAEAGLWSLDEDIQADLITLSPYRIRAQGVNGKLNDIMELGRAILHMAKHRGASFIEIQKLEMELEKDIANEENDLTKKKKKEPSEYAKLKKYCDEQGAKTIGEYFFMRLNRHYKNNTIKENNRRYVRQRKGLSDKKAKIDYAIPRYLVKEEFNLLWDTQSQYYKQLKSKDLKKKIYDILFYEHDHRPYATGKCIFIKEEPRLSKAHPLSEKRRIYEAVNNIRIQTLTEQIKLDKSQRDLIINELLLEGKKAGKRSIAEKLQLDKNNKIVLADMIQPYLYSTPEYRAIDFLSNLNDKQLADIVEFMAEPRNPDKEGYLYNDDRVIEILKNKFQADDEKQISQLLAMLPKGRGSLGITATKEILKLLEENVISIREATDILAKTDKRYIAEEERARALQGKYDKLPYYGEILTTDTQPIAPWQQEINKSLNPMERECGKIANPAVHRMLNQLRKVVNDIIRIYGRPYDIHIELAREVGMSSKRKKEYEKIQGENRGKNEKAYEYLKKHKIRVTSKNRLKWRLAEEQGWTDVFSQTFERIHPRFEGFEIEHLIPDSLGGTDAPINRVLISRSDNLNKGNLYPYEYLEGKYGDKIYAILKEIRDNKKMPNSKKWRFENDAREKFESGDDADNITRYLSDTSYFCKLAARYLKAIVDYKKGNENNLRVLTIYGGHTAKLRSIWNLDGIEYDLMGLNTEVPKYLPSEPYFFNKDTGEILYQEELDTNGKWEKRDTIRNKNWQRKPRYDHRHHIVDAITIGFVSRADMQNINWHDKRGYDSPFELLPVPLNDPSQTNKKKQLSIFRDKVKEMLRDVKVYHKPEHSKNSKLHEDTGKFALMRNPHDPRKTITRYNRPITKSTVLKDKSSLKNILINVNTIKPEWHIDIKRDVEKTIDLRTVIESHYGEAMDELKFENDQLIKEGKKANDISEAMILQRAFKIVRDRKEYEYNTYPVYENSESLIYIDKHKIAYTRGRNHRIDFYQDDKDKVGWECISLFDANDKDFIPQWKREGLKPIWSLHKCDMIELNTPQKWKKYTKQKRCLAVVDACHSKLGTTYHSDARDTTGKSGPNSIRDSMIRRLKFYTEHKAQKIELTPFGKIRKKHKKLWYGKKKETEQSK

SEQ ID NO: 1230 - protein, 1215 aa, unidentified
  REGION 1..1215: note = Description of Unknown: Cas Enzyme sequence
MEKRILGIDTGTNSLGWAVVDKQENGKYSLVSKGSLIFQEGVKVEKGIESSKAADRTAHRALRKQYFRRRLRKIEVLKVLIEFGWCPYLSPEALHQWHVKKEYPMDEAFISWQRTNDNFDENPYYYRHRCLHEQLDLNEKSDSYILGRAMYHLAQRRGFLSNRLEQGDDDETGKVKEGISSLSKSMAEAGCEYLGDFFYKLYKEKGNTERIRTRYTDREEHYKKEFYAICERQNLSEEQISKLEKALYFQRPLKSQRQGVGKCTFEPKKARVADSHPAFELFRMLSFLNNIKIKGPQDVELRPLSQEEFEKAKPMFFRKSKPQFDFEDIAKAIAGKGKYQHIKDDGDKPYKFNYRMSQGVMGCPTIASLISVFGDDYENAIAERYTLSDGKTPEQMVSDVWNVLYSFDDKEKLKQWGKDRLQLSDEEAEKFSKLRLTHSFASLSLAAVKKILPWLEQGLIYPHAVLMANVPDIVGREVWKSRGEAITNELLSLITNFNPKDVAMTGTLDFCIKDVLKDMCSLNPGATEKLYHPSMIDTYPDAKKNSQGVYQLGSPRTNAVRNPMAMRSLHQLRKVINTLLREGTIDSDTEVHIEYARELNDANKRKAIAQWNKERETRRKKYAEDIRTLYKQECGKDIVPTNDDIIKFQLWEEQDHICLYTGDSIGITEFVGPNPSYDIEHTVPRSVGGDSTLENMTLCSSKFNRDVKKAKLPTQLSNHAAIMERLEEWRKKIEKLRRDADRVKTHSGMDKAVKDRLIQKRHLLKLELEYWVGKYKRFQMEEVPEGFARRQGAGIGLVGKYAGLYLKSLFHKADDRNKSNVRVIKGATTAEYRKMWGIQDEYEKKSRDNHVHHCIDAITIACIEPGEYNATARYYQQLEEYERTKAAKPSFPKPWPTFTEDIKAIAQEMLVVHSTPDNMPKHARKYVQTAKGRKLAMGDSARGSLHNDTYYGAIERDGEIKYVVRRPVSSFEKASDIESIVDPAVKEIIKRAIEQKGFKQAVSEVIYMNEEKGIKINKVRCYAKTVKNPLNIRKQRDLSQKEYKQQFHVQNEGNYMLAIYEGEVKGKVKRTYELVKGIEAAEFYKESTDKAEYPSIIPQSKNDLPLKHKLKIGQHVLLFENSASEIDFSDIKDLTKRLYIITGLSYLPVGKGFGTIVMRHHQEARMAKDIKTTNGAFKDADPYRPSIIQLHTQFKALVEGVDFKINVLGEIEMLR

SEQ ID NO: 1231 - protein, 1210 aa, unidentified
  REGION 1..1210: note = Description of Unknown: Cas Enzyme sequence
MKKRILGIDTGTNSLGWAVVDKLEDGTYSLIRKGSLIFQEGVKVEKGIESSKAADRTSHRALRKQYFRRRLRKIEVLKVLVEFGWCPYLSPEALHQWHVKKVYPMDEAFMSWQRTNDNFEENPYYYRHLCLHEQLDLNKESDRYILGRAMYHLAQRRGFLSNRLEQGNDDETGKVKEAISSLSKSMADAGCEYLGDYFYMIYKEKGNTERIRTHYTDREEHYKKEFYAICHQQNLSDKQIETLEKALYFQRPLKSQRQGVGKCTFEPKKPRVADSHPAFEMFRMLSFVNNIKIKGPHDVELRPLSAEEYEKAKPMFFRKSKPQFDFEDIAKAIAGKGKYQYIKEEGDKAYKFNYRMTQSVTGCQTIASLMSVFGDDYVSAIAERYTLSAGKTPGQMVNDVWNVLYSFSDKDKVVQWGKEKLQLDDEEAEKFSKIKLTHSFASLSLSAVNKILPWLEQGLIYSHAVLMAKVPDIVGEDVWKNRGESIAKELLSLISNFNPKDAAMQGTLDFCIKDILKDMCELEPGAAEKLYHPSMIETYPDAKKNDQGVYQLGSPRTNAVRNPMAMRSLHQLRKVVNTLLREGTIDSQTEVHIEYARELNDANKRKAIAQWNKDRENQRKKYAEEICKLYKQECKKDITPTDDDIIKYQLWEEQNHICLYTGDSIGICEFIGPNPSYDIEHTVPRSVGGDSTLENMTLCSSKFNREVKKAKLPTQLSNYEEIMTRLEEWRKKIEKLRKDVDHVKTHSGMDKAVKDRLIQKRHLMKLELDYWVGKYKRFQMEEVPEGFARRQGAGIGLVGKYAGLYLKSLFHKADDRSKSNVRVVKGTTTAEYRKMWGIQDEYEKKSRDNHVHHCIDAITIACIEPGEYNATARYYQQLEEYERTNANKPSFPKPWPTFTEEIKAIAQEMLVVHSTPDNMPKHARKYVQTSNGKKLALGDSARGSLHNDTYYGAIERDGEIRYVVRKELRSLKESDIENIVDDAVKEKVKQAIAKNGFKDAMEGDVFMNEEKRIKIKKVRCFVPSVTNPLHIRTHRDESRKEYKRQFHVTLDGNYCMAIYEGEVKEKMKRTYEIVNMIDAASYFKKSADLTKRYPIAPENKNGLKFRCTVRTGTQIILLQSDDEQINLANKEDVARRFYFVAVMRSDGRIVLRYNQDARDATTLKKERKSGAYKVGEQYRSEIMLSLSDFHALVEGVDFKINVLGEIEMLK

SEQ ID NO: 1232 - protein, 1210 aa, unidentified
  REGION 1..1210: note = Description of Unknown: Cas Enzyme sequence
MKKRILGIDTGTNSLGWAVVDKLEDGTYSLIRKGSLIFQEGVKIEKGIESSKAADRTSHRALRKQLFRRRLRKIEVLKVLVEWGWCPYLTPEALHQWHVKKVYPMDEAFIAWQRTNDNFDENPYYYRHICLHEQLDLNKDSDKYMLGRAMYHLAQRRGFLSNRLEQGNDDEMGKVKEAISSLSKSMTDAGCEYLGDYFYKIYKEKGNTERIRTHYTDREEHYKKEFYAICKRQLLSEEQISKLEKALYFQRPLKSQRQGVGKCTFEPKKPRVADSHPAFELFRMLSFVNNIKIKGPHDVELRPLSKEEYEKAKPMFFRKSKPQFDFEDIAKAIAGKGKYQYIKDAVDKEYKFNYRMTQGVAGCPTIASLMSVFGDDYVSAIAERYTLSDGKTPSQMVNDVWNVLYSFSDKDKVVQWGKEKLQLDDDEAEKFSKIKLTHSFASLSLSAVNKILPWLEQGLIYSHAVLMAKVPDIVGEDVWKNRGESITKELLSLIANFNPKDVTMQGTLDLCIKDILKDMCELEPGAAEKLYHPSMIETYPDAKKNAQGIYQLGSPRTNAVRNPMAMRSLHQLRKVINTLLREGTIDSQTEVHIEYARELNDANKRKAIAQWNKDRENRRKKYAEEIRTLYKQECGKDINPTNDDIVKFQLWEEQNHICLYTGDSIGITEFIGPNPSYDIEHTVPRSVGGDSTLENMTLCSSKFNREVKKAKLPTQLSNYEEIMSRLDEWRKNVEKLRKDVDHVKTHSGMDKSVKDRLIQKRHLLKLELDYWVGKYKRFQMEEVPEGFARRQGAGIGLVGKYAGLYLKSLFHKADDRNKSNVRVVKGTTTAEYRKMWGIQEEYEKKSRDNHVHHCIDAITIACIEPGEYNATARYYQQLEEYERTNANKPSFPKPWPSFTEDIKAIAQEMLVVHSTPDNMPKRARKYVQTSNGKKLALGDSARGSLHNDMYYGAIERDGQIKYVIRKELSSIKETDIENIVDDVVKEKVKQTIAEKGFKKAMEEDIFMNEKKGIKIKKVRCYTPSVTNPLHIRTHRDKSQKEYKRQFHVTLDGNYCMAIYEGEVKGKMKRTYEIVNMIDAASYFKKSADLTKRYPIAPETKNGLKYRCTVRTGTQIILLQSDNEELNLADKDDLARRFYYVAVMQKDGRIVLRYNQDARDATTLKKERKSGVYKVGEQYRSEIMLSLSDFHALVEGVDFKINVLGEIEMLK

SEQ ID NO: 1233 - protein, 1210 aa, unidentified
  REGION 1..1210: note = Description of Unknown: Cas Enzyme sequence
MKKRILGIDTGTNSLGWAVVNKNEDGTYSLIRKGSLIFQEGVKIEKGIESSKAADRTSHRALRKQYFRRRLRKIEVLKLLVKLGWCPYLSPEALHQWHVKKAYPMDEAFISWQRTNDNFEENPYHYRHLCLHEKLDLNKESDRYILGRVMYHLAQRRGFLSNRLEQGNDDETGKVKEAISSLSKSMTDAGCEYLGDYFYKIYKEKGNTERIRTHYTDREEHYKKEFYAICKQQNLSDDQISLLERALYFQRPLKSQRQGVGKCTFEPKKPRVADSHPAFEMFRMLSFVNNIKIKGPHDVELRPLSQEEYEKAKPMFFRKSKPQFDFEDIAKAIAGKGKYQYIKDLGDKAYKFNYRMTQSVTGCPTIASLMSVFGDDYVSAIAERYTLSVGKTPSQMVNDVWNVLYSFSDKDKVKQWGKEKLQLDDEEAEKFSKIKLTHSFASLSLSAVNKILPWLEQGLIYSHAVLMAKVPDIVGEVVWKNRGESITKELLSLIANFNPKDITMQGTLDLCIKDILKDMCELEPGAAEKLYHPSMLETYPDAKKNEQGIYQLGSPRTNAVRNPMAMRSLHQLRKVINTLLREGIIDSQTEVHIEYARELNDANKRKAIAQWNKNRENLRKKYAEDIRTLYKQDCGKDINPTDDEIVKFQLWEEQNHICLYTGDSIGICEFIGPNPSYDIEHTIPRSVGGDSTLENMTLCSSKFNRKEKKAKLPTQLSNYDAIMSRLEEWRTKIEKLRKDVDHVKTHSGMDKAVKDRLIQKRHLLKLELDYWLGKYKRFQMEEVPEGFARRQGAGIGLVGKYAGLYLKSLFHKADDRNKSNVRVVKGTTTAEYRKMWGIQDEYERKSRDNHVHHCIDAITIACIEPGEYNATARYYQQLEEYERTNANKPSFPKPWATYTEDIKAIAQEMLVVHSTPDNMPKRARKYVQTSNGKKLALGDSARGSLHNDTYYGAIERDGEIKYVVRKELNSIKETDIENIVDDVVKEKVKQAIAEKGFKKAMEEDIFMNEEKGIKIKKVRCYAPSVTNPLHIRTHRDESRKEYKRQFHVTLDGNYCMAIYEGEVKGKMKRTYEIVNMIDAASYFKKSADLTKHYPIAPETKNGLKYRCTVRTGTQIILLQSDDEELNLANKEDLARRFYFVAVMQKDGRIVLRYNQDARDAMTLKKERKSGAYKVGEQYRSEIMLSLSDFHALVEGVDFKINVLGEIEILK

SEQ ID NO: 1234 - protein, 1177 aa, unidentified
  REGION 1..1177: note = Description of Unknown: Cas Enzyme sequence
GSLIFQEGVKVEKGIESSKAADRTAHRSLRKQYFRRRLRKIKVLEVLVEFGWCPYLSPAALHLWNVKKTYPTDEAFMSWQRTNDNFEQNPYYYRHICLHRQLNLNEQSDRYILGRAMYHLAQRRGFLSNRLDQGNEEETGKVKEGISSLSKSMEETDCEYLGDFFYKIYKEKGNTERIRTRYTDREEHYKKEFYAICKQQNLPDALISKLEKALYFQRPLKSQRQGVGKCTFEPKKSRVADSHPSFEFFRMLQFVNNIKVKGPQDVELRPLTAEEFEKARPMFFRKSKPQFDFEDVAKAIAGKGKYQYIKDVGDKPYKFNYRMSQGVTGCPTIANLMSLFGDDYEEGIAERYILSEGKTPAQMINDVWNVLYSFSDKNKVKQWGKEKLQLSNEEAEKFSKIKLTHAFASLSLAAVNKILPWLEQGLIYPHAVLMAKVPDIVGEEVWKNRGEAITKELLSLISNFNPKDVSMTGTLDFCIKDILKDMCDLTPGAVEKLYHPSMIDTYPDAKKNSQGVYQLGSPRTNAVRNPMAMRSLHQLRKVINTLLREGTIDNQTEVHIEYARELNDANKRKAIAQWNKDRENKRKKYAEDIRSLYKQESGRTIEPTDDDVVKFQLWEEQNHVCLYSGELIGITDFIGPNPRYDIEHTVPRSVGGDSTLENMTLCSSKFNRDIKMAKLPTELANHAEIMDRLEAWREKIEKLRKEADRVKTYSSMDKITRDRLIQKRHLIRLELDYWVGKYKRFQMEEIPEGFARRQGAGIGLVGKYAGLYLKSLFHKTDDRSKSNVRVVKGVTTAEYRKMWGIQDEYVKKSRDNHVHHCIDAITIACIEPGEYNATARYYQQLEEYERYHAPKPSFPKPWPTFAEDVKAIAQEMVVVHSTPDNMPKRARKYVQTANGRKLAMGDSARGSLHNDTYYGAIERDGEIRYVVRKALSSLRETDVENIVDDVVKEKVKQAIAEKGFKEAMAGDIFMNEIKGIKIKKVRCFTPAVTNPLHIRTHRDESRKEYKRQYHVTLDGNYCMAIYEGEIKGKLKRTYEIVNMIDAAAYYKKSAGLTNQYPIVPENKNGLSFRCILRSGTQIILLQSDSEELNLANKEELARRFYYVAVMQKDGRLVLRYNQDARDATTLKKERKSGAYKVGEQYRSEIMLSLSDFHALVEGIDFKINVLGEIVILK

SEQ ID NO: 1235 - protein, 1062 aa, unidentified
  REGION 1..1062: note = Description of Unknown: Cas Enzyme sequence
MDKERVFAFDLGVSSIGECIRSGSKIEHIKTHLIPEETASITEQAKRRRQLRSRIAHKKREEWWRKCAEEAGIEVLETRQPVKDPKTGKFLDCKPDTRMLREFPAEGDKTIYTSCLLRIALLQGVKLEGWQIYKAIWSAMQHRGYDAHLTWKREKGSKKKKKDAEKLTEKEQEEQKNLQAVNAYRTELTSTFGNKEEFCFPCYLEALKIGVWSPENPKDLSGKIGTAPSPARNKYGKNTLVSPRELVENELKLLLRNASLQYPALKDKEFYVLYGPAGKPYASLFDSRYKKFRGRDWEWQGVLSQKVPRFDNRIIAKCRLIPRLNVCKAENELNRDVVFLQSLKNMRFFDADNRLVALDVKALNEIYKEFYDKKRVTPSKWDKIVKEHFGGNVHPNQLSTPEPKITGRSSFSRPALRILKELLLSGKSPHVLYEELCSNNKNMDKQKGLVKEDYAFLLRIPPNWEDFTIPDERGIDGYLEKAEREEKISEILNGITNSIVRHRLKVFTQRLKELSSSYGIPDRVVIELVRDTKTGFMSETRKKHYIKVQKENTASRDRALEKLKEFSLEGTGERMLLKMMLFEEQCGIDPYSLKTLKQTDLEHYEIDHIVPLSRGGSDAYINKVLTTNKNNNDKLNKTPYEWLSGTDIWLAYLDRMKQSGLSAKKKELLTSENACELIEKYAMLAATAYVAKLAQRITALMFNWPQLLRGTERKIFVASGGYTAKIRRKFHLDALLHEFLREDEFVEMVKEGDIEEKNRANPKHHALDALVISLLPYLTKPFSGKSEMELAPGWFNPEFCREALKRVLPEQLAFKKPVLAETIYAKRFFMENGREKYYFVTHFGPGTKIEDFYKLSEAKKYVPSLFDPKMRKDLSEKLEDENITEEEWKEFILDYQDKNHVKRILKKESGTLEKGMSVEFAEIGKMKGQYYKDKKEHKGQIVYEEKEGRWKVMPVYVFESSFEKLNLFKEKYGKAFFFQSQQLVYIANNCPGTAKIKRADGTEEPIYNENGKDEISSGTYILKTIKAKGQVKISSLDGAITILSSVNNLFNIGRMRPVKQKK

SEQ ID NO: 1236 - protein, 1529 aa, unidentified
  REGION 1..1529: note = Description of Unknown: Cas Enzyme sequence
LFSKKNVFLRIFKICSTMTKQILGLDIGTNSIGWAVVRGQGDDAQPLQEIVAAGSRVIPVDAGVLGDFERGVSSKSKAAERTAFRQVRRMIERSHLRRQRLLRVLQVMDYLPPHYARCLDRYGKFLPHTEPKIAWSETADGHYEFLFRDAFDEMMAAFRQRNPEWVARGGKVPYDWTLYYLRTKALSQPVSPYELAWILLSFNQKRGYRQARGEQQEDDSRKLEEYKSLKVLSVEDTGEKKGDQTWYRVLLEDGSEYKRLSRNPLPWEGQVRDFIVTTTLDAQGNPKTEKDGRVKRTYRSPKADDWTLLKKKTEAQIAQAHQTVGAYIFEALLRNPSQKIRGKLVHTIDRKLYYDELKAILQAQQPYHAALTDSAVLERCVRTLYQKNEAHARQALCHDLTAFLLDDVLFYQRPLKSQKALIANCCFESLTYYDRQTGEEKQAPVKCIPKSHPLYAEYRLWQFLDNLRIYQLEGEVDGKKCFDIDVTRQFLPDHEAYARLFDWLYHRENVSWKDLPKYPPFGLTRTTADLYRWNYAQDKSYPCHETWGHMQQCLKKAGLSPDFLTPEREEALWHILYSVSDMQELGRALHTFAHKNELTDDEAERFAKFFGKMEPFAHDYGACSAKALKKLLPLMRRGSYWSEEALAPGVRERIGQLLAGTDDAALPAKAREALKALHAVSDYQGLPLWLASYVVYNRHAEAKDIVRWETPADIDRFLLNFRPNELRNPIVELVVRETLRVVRDIWTRYGSFDEIHVELGREMKMPAQQRQKLSERMLENERTNLRIKMMLACFQHPEFGVDDVRPYSPYQQEILKIYEEYVLRDVKDIPDDIAAILRKFGESTAAKQPSAKEVLRYRLWLDQKYTSPYTGQIIPLGRLFTRDYEIEHIIPQKRYFDDSLSNKVICESAVNKLKSAQLAHEFISQHHGEVVELGNGRTARILELEDYERLVKDNYSHVRLSHKRRNLLLDEVPEAFIARQLNDTRYISKYVSMLLSNIVRGEDERSVNSTHLIATNGSITTRLKQDWGINDVWNAIVMPRFERLNGMVQTGDHMENVYVKLNTQGHLIPNVPLDRQRGFSMKRIDHRHHAMDAIVIACASRNMVNYLNNESARKGAKVTRMDLQHLLCTKTRADANGNYRWVMNKPWPTFTTDVRHALEDIVASFKQNRWIMSPTVNYFDHYDPATGKKRRKKQTQGEMQAVRKPLHKATLYGEINLRSIKEVSLKQALEQPQRMVNKDLRHKLQTLQAEGLNLKQMTAYFAEHHDEWADVNVKKIPIYVYSKEEGKARYFASRCALDKSFTRETIERKVADTGIQQILLRHLAHYENAEQAFSPEGIEEMNRHLTELNGGKPHQPIYKVRKYEQADKYPVGQRNCKAAQFVEAEKGTNLYFAVYEAESEPHKRSFATIPLREAVLRLKKGLPVALETNMAGEKLKFVLSPLDLVYVPTPEDLARGQVQLPLDKKRIYKMVSSSGNQCFFVLANVASAIVDKYEFSSLNKMERAVTGEMIKEICLPLDVDRLGNVHLRQ

SEQ ID NO: 1237 - protein, 1480 aa, unidentified
  REGION 1..1480: note = Description of Unknown: Cas Enzyme sequence
MRTILGLDLGTNSIGWAKVCVDDNGNYAREIKLGSRIIPMSQDTLSNFDKGVTESPTAERTTFRGIRRIRERALQRRERLHRVLHTIEFLPKHYDEAIGWNREEATTYGKFLNHEETKLAWEKQEDGSMRFLFMDSFKEMMADFAKHQPGMVADGKKIPLDWTLYYLRKKALTQAIKKEELAWILLNFNQKRGYYQLRGEEDEENPTKREEFYELKVISVEAAEEGKGGNTWYNVKLENGWIYRRQSKTELNDWVGKIRQFIVTTEYEKDGVTVKKDKNGEVKRSFRAPSEDDWGLRKKRTEKSLENSSKTVGAFIYDHILSKPTDKIRGNFIRTIERKFYKKELEAILCEQSKHHKELSGHNSLVDCTKELYPNNKPHQDSLMKKDMSYLLITDLIFYQRPLKSKKSLIADCPYEYYEYVVKETGEIKRQGIKCIAKSNPYYQEFRLWQFIINLRLFDRTDDKEVTSEYLSSKDDYSKLFEYLNDKKDINQETLLKDFFKQKKIKMGMEKEYPIRWNYIEDKEKKYPCNETRHELLAALDKAGIDHSWLDDKEQYYRLWHLLYSVESKEEAQGALRKLNNNDDFVNAFLKVKPFKKEYGAYSEKAIKKLLAVMRIGDFWDEANICEQTKNRIHNIINGEIDEKIKERMGRSFTQISDFQGLPEWLSCYVVYGRHSEASDNQRWRTPEDLMAYINGFKQHSLRNPIVEQCILETLRTVHDIWKEAGHIDEIHVELGRNMKSTSEQRAQNSKRILQNENTNLRIKSLLMELKNVKEVENVRPYSPMQQEILRIYEEGALQELTTEDAQYPEIYKISQMAQPSAKELLKYRLWLEQKYCSPYTGKPISLSKLFTSAYQIEHIIPQSRYFDDSFTNKVICEAEVNQLKSNMLGYEFIKKHGGEIVYCTKIGDVKILDEKEYHNFVTEHYANNRNKKEKLLLEDIPQEFLNRQLNDSRYISKKVTSILSNIVRGEDEQEVNSKFVVPCTGGITDRLKQDWGLHDVWNRLVYPRFERLNQLTQSEAFGRWENKEGKQVFQTSVPLELQRGFSKKRIDHRHHAMDALVIACASRNIINYLNNESAKNQTKREDLRKKLCDKNRVIRKPWGTFTQDAQAALEDVVVSFKNYVRVINKATNYYERYEANGKKGMAKQEGHNMWAIRKPLHKETVFGHVNLRRKISVKLKDAIKNVPAICDKELRDYINDLIAKKYNSKQILAHFKDKNYRLNMKYVDKVDMWQFSDEKEPMVATRKSLDTSFDAKRIATITDTGIQKILLNYLSTKNNDPNIAFTPESIAEMNKHIVEYNNGKQHQPILKVRVSEPMGAKYEVGETGNKTKKFVEAQKGTNLYFAIYEDKDGNRSYNTIPLNVVAERLKQGLSPVPDMNEKEAHLRFYLSPNDLVYVPTEEEKQSGDCKLNKKRIYKMVSATGYECLFLPYTISNIIYNKVEFESLNKMGRALTAEMIKAVCWKLEVDRLGNILKIIK

SEQ ID NO: 1238 - protein, 1483 aa, unidentified
  REGION 1..1483: note = Description of Unknown: Cas Enzyme sequence
MKTILGLDLGTNSIGWAKVTVDDNENYLRDIQLGSRIIPMSQDVLGKFEKGVTESQTAIRTSFRGVRRLRERTLQRRERLHRVLHTLHCLPPHYDSAIGWDRNAPTTYGKFLNHGEPKLAWERREDGTMQFLFMDAFHEMIADFAKYQPALVADGKKVPLDWTIYYLRKKALTQPIKKEELAWILLNFNQKRGYYQLRGEEDEENAAKHEEYHELKVVGVEVDEAGKGDNTWYNVKLENGWIYHRQSKIPLDDWVGKVRAFIVTTEYEKDGTTPKKDKEGNVKHSFRSPNENDWGLRKKQTEHSLEASGMPVGAFIYDHLLKEPSDKIRGKFIHTIERKYYKQELAAILREQSKHHEELRSKDMLKACIEELYPNNPLHRESLLKKDMTYLLIEDLIFYQRPLKSKKSLIAECPYEAYSYKDKETDKKKRQGIKCIAKSNPYYQEFRLWQLIANLRLRNRSDERDVTAEYLPHQEDYVRLFTYLNDRKEINQETLLKDFFKLKKVAIGGEKVFPIRWNYIEDKEKKYPCNATRHELLLALDRAGMEHDWLDDRDLAYRLWHLLYSVDSKDETERALRKLKDDDAFVESFLKIKPFEKEYGAYSEKAIKKLLPVMRRGSLWNEADLCPSTKERIANILQGTIDEKLKKKIGAFISSCQQVSDFQGLPEWLACYVVYGRHSEATAIQRWETPEQLLAYIHKFKQYSLRNPIVEQCILETLRTVYDIWKEAGQIDEIHVELGREMKQTAEQRAHLTEKVLRNENTNLRIKSLLMELKNNADIKDVRPHSPMQQEILRIYEEGALQTLSKDDAAFAEIMKISKMAQPSASELQRYRLWLEQKYRSPYTGKPISLSKFFTSAYQIEHIIPKKRYFDDSFSNKVICEAEVNGAKGSMLAYEFIKDCGGNVIHCTTLGDVTILREAEYKALVTELYANNNSKREKLLMEDIPQDFINRQLNDSRYISRVVMTLLSNIVRIEGEEEATSKFVIPCSGGITDKLKKDWGLNDVWNNIVYPRFERLNALTNTTNFGQWENKEGKRVFQTSVPLKLQRGYQKKRIDHRHHAMDALVIACASRKIINYLNNREANDPTKQESARKQLCIKNRIIRKPWETFTQDAYKALDNMVVSFKNYVRVINKATNYYERYNADAKKVVDKQKGEAMWAIRKPMHKDTVFGHVNLRRKAVVKLKDTLENIPAICDKTLRHYIQDLQKKHFNTKQLLAHFKSINYRLNKQAVDKVEVWQYSDDKEQLAATRKPLGPSFDAKRIAAITDTGIQKILLNYLQAKGGDPTIAFTPEGIAEMNQNIAVYNGGKQHQPILKVRIAEPMGKKFPIGQTGNKAFLYVKAEEGTNLYFAIYEDEEGNRTYDTIALREVVERLKQGLTPVPEKNEKGVALKFHLSPNDLVYVPTADELLSKVCSLDKNRIYKMVSSTGTDCFFVPHSVANIIYDKVEFEAKNKMGRALTGEMIKPICWKIEVDRLGHIVNIIK

SEQ ID NO: 1239 - protein, 977 aa, unidentified
  REGION 1..977: note = Description of Unknown: Cas Enzyme sequence
SPMYQEFRIWQNLNNVLLIDTEINESRPLDEEEKALLYNELSVRAKLSETEALKTINKKGKHWDLNFKELEGNRTQAVLFECYNRIITQTGHEECNFKKISAEDIRHYVATIFKNLGFNTDILDFNPSLEKHELEKQPMYQLWHLLYSYESDKSRTGNESLLNKLEANFGFPQEYASVLADATFEDDYGNISVKAIRKILPHLHDGYDYSEACERAGYNHSVRSLTKEELAQKVYKDRLDLLPKNSLRNPVVEKILNQMINVINAIIVEYGKPDEIRIEMARELKSSAAKREERTKSINQNAAENKRITEILQTEFGLSYISRNDIVKYKLYQELEANGFKTLYSNTYIPKEKLFSKDFDIEHIVPKARLFDDSFGNKTIEARDVNLAKSNKTAFDFVKEKYGEQGIEEYKKKLDTLLKENAISSGKYKKLMMSEADIPSDFINRDLRNTQYIARKAYEILGELVKTITPTTGKITDRLREDWQLIDVMKELNFEKYDRLGLTEVIEDRDGRKIKRIKDWTKRNDHRHHAMDALTIAFTKPSYIQYLNNLNARSDKSGSIYAIETKELHRENNTLRFNAPMPLNEFRKEAKRHLSAILVSIKAKNKVMTQNVNKIKTKNGIIKKVQLTPRGALHNETIYGTKMRPIIKMVKIGAALDEATINKVSSPTIREALLKRLNEYSGDAKKAFAGKNAITKNPIYLNAEHTKTAPAMVKIVEWEMYYPIRKLITPDLKIEKVIDNGIKEILKKRLKEFGGDAKKAFSNLDECPIYLDEEKNITLKRVSIEGVLSAIPVHTLKNHAGKEIKDEDGKAVLGDYVQTSNNHHVAIYQDAKGNLQDNVISFFEAAERKSQNVPIVDKNLNRDKGWHFLYTMKQNEYFVFPNEETGFVPSEIDLMDENNYEMISPNLFRVQTMSRVDYGKTIIREYVFRNHLETILNDNLKLKGLVFKKIKSLKALEGIVKVRVNAIGKIVAVGEYD

SEQ ID NO: 1240 - protein, 1113 aa, unidentified
  REGION 1..1113: note = Description of Unknown: Cas Enzyme sequence
MNSHPISPDLQLAFDVGHSSIGWAVLQKSDGQTPGINILGCGSVVFRANDCLVSSRRAYRRQRRHIRSTRQRIARMKTLLQQRGVLTAAELEKPGCAWPWKLSARVLQGGKLLTWRELWDVLRWYAHNRGYDGNRRWSAADEAAQSEDSEKEGNARTLMGKYAARSMAETFCAMCGINPLGKKRSANVPGAQRPKGQNAAFPREIVEGEVRKVLRAHFGNLNGVDANLETALFSDWRAIPAPGLQLPNRYQGGLLFGQLVPRFENRIISNCPVTWQKEFARATEALTNEDPNFIKLHRVDFAKHDGSWWASHIADKLAKVPSRNCPEFLNFRWAMQLANIRVGKKLDRELRVLSTGERKRLDQQMRLCGYLTPGQLKDAVRRFTDCERDNLDTMFMHPDAKEALLVDPVQKLITSEELRPFWTLFPERLQKRLRGQWRRGKSFSLAQIRSQFEPLGDVSQLDAELQKQLDAQNTKAKRKDKQMTRDDLLQRCFPPRPLKLDGRAAFARPLLKQAYEDVVAGKPHPKEAGGCLFISEEIRQTQLNRELADQTNNHLVRHRLLILERLLADIIKERDFADGRKERIGKITIEVNRDLREMSGMTAEEKAMDMGSRVANHHAVADKLEKAFAEESNGKSIPITAGLIRKARIAEDLGWRCPYTGIQYEPKDLITRRVDKDHIVPRSDRASDSLDSLAITFSAINKWKARRTAWQFVSEEQGKPVPDLPNLSIMSLSRYKQSIEGLEAFKGHDDDKRRKKRRKELLLLPRYEEKEFMPRDLTQTSQLVRLGAQVLRKNLPHLTTGDITSLPGSITGTVRKSWRVLCCLATANRQVLDEHGEAKNKTDIRDITHLHHALDACVLGLASHFIPNDGRIWELIVKRSPNDSEKRQLEALGVFGFNADKRFEMLDLDKKLKEQIRQRLAEKRVIQHIPARMDGLRVEQNTWRVVAVKDGEVILKQRVRQPDGTRPEKTAEEKPAKLLGLAPVNGQGKLATNKGALVIPENYGVALDPQPAIIPFHKVWPRLQELKKANGGKMPRILRNGQLIRVKEGNFKGLWRVFSAKNNATGMALDIGSPDVVRLKNKTEGHKINVRLASLLKGGLEPIRSPLSGISSK

SEQ ID NO: 1241 - protein, 1273 aa, unidentified
  REGION 1..1273: note = Description of Unknown: Cas Enzyme sequence
MKILGLDLGIGSVGWCLIEIDEENHPLLIHAIGSRILSISPTESDNFCKGKGETVCSQRTFMRTARKGLDRYQMRRKILSLELAKLGMISSDNSLLTLSPLQTWQLRADAATTGKRLSLAEIGRVLLMLNQRRGYRHSKSDDSDSSQKSYVTDVNQRYSDLNGMTPGQFFATKLKESETTSSAGKNVYDYRIKGYVLPRKAYEEEFYRIMEVQGEFYPEILNDATVKKLHDIIFYQRPLKSCKRLVSVCEFESLKFINKTNGKEVITGPKVAPRTSPIAQETRLWETVNNIRLKNFSNKKRVRKDSQPGLFDEEMSQSKDFRLLQYEYIPNQEERTRIFNFLNTNEKLTQTQLLKILGLKASDGFRWEGAPKNGLEGNRTYTQLKEALGDLAESMPDILRFNIEYENTDIVDQDTGEIISRVKMNRRNSATGKNDGEIYPQYQDEPLYRLWHTVYSSSSKEELSKAIEKQFGITDKEVIDRLYKIDFVKPGYSNRSAKFMRKLLPYLKDGYLYSEACTFVGVNHSDSLTKEENERRVLKKHIDNIEKGELRQPVVEKILNQMINIVNALIEKYGEIDEIRVELARELKQSKDQRAETTSNIAKRERENAAIAIKIKEQGLVASRRNIQKYRLWEESGHRCIYCGKTLSLGEFLGGHGGEIEHIVPRSILFDDSMTNKACSCSHCNKEKNNRTAYDYMSGKSEADFNRYVANIDTLLKEKKISRTKHDRFMMSQSEIPQDFLDRDLRQSQYIAKKAREILFEVCRNVYATSGSVTDFLRHTWGYDNILHNLNIKRYEQADLVEEVSYEHEGQTHKELRIKDWSKRLDHRHHAVDALVIALTRQGYIQRLSNLNTQRDKMYADIQGQSNEFKEKFHLLEKWAELLPHFPVNIAADTIDSIAVSIKSGKKLSTPGKRYIYRNGKRKLVQDNILVPRGALHQETVFGKIKLQDNGKDLKYAFSNPELIADDDIRNLVINRIQEADGDFKKALKALKRSPLIIAKNGKEKEITSIDCYKETFVTRADLSALTAPGIQRIVDKSIREAALDRLAECKNDIKKYQQSFEENPIYIGNDVRHPVKRVRIFSNDNLVPIRKDSTGKAVAFASSGNNHHVAFYEKDGKVTEVIVSAWTGMKRKLIGLPVIIKDPDEAWTRLIDMRESDDVREVADTLPPVGSRFLYSLKIGDMCLLGLTPEQLSDALDMNDMKTLTAHLYRVQTLSTGDYRFRLHTWTNVDAKNARPDTEMKALYRIRSYNAITLSNLIPVSVDNLGQIKILK

SEQ ID NO: 1242 - protein, 1159 aa, unidentified
  REGION 1..1159: note = Description of Unknown: Cas Enzyme sequence
MIKHILGLDLGVGSIGWALIETENDQPKQIIGIGSRIVPLSKDDSDQFSKGQAISKNADRTARRTTRKGYDRYQLRRALLTQVLRQNGMLPERMDENVIDLWKLRSDAATEGHQLTLPQIGRVLYHINQKRGYKHAKADNNGDSKQTKYVETVNQRYAEIQETGQTIGQHFYLELLHSKVESGNGPYYTYRIKDKVFPRAAYIAEFDQIIKVQKAYYPEVLTDELIDTLRNRIIFYQRPLKSCKHLVSLCEFEMKPYKTKEGKIVYGGPKCAPRTSPLAQLCAMWETANNITLTNRNNEQYDFSLDERRQLVEHLCTHEVLKLTDLYKILGITKKDGWYGGKAIGKGIKGNATLNQLRKALNGKYGEWLEMPIEHIDAVDNETAEVFWQVSPKVEETPLFRLWHAVYSIQDADELAQTLRNKFGITEQEVIDALCKIDFVKPGYANKSHKFIRRLLPYLMDGMMYSEACKLLRINHSNSMTTEERDARPLAERIELLPKNALRQPVIEKILNQMINLVNRLQQEYGPIDEARVELARELKQSREEREGAYRRNNQNERLNKEIFAKIEEMGIRPSRSRIQKYKMWEESNHRCMYCGKTVSLAEFLNGAEVEIEHIIPRSILFDDSFSNKVCACRECNHEKGNLTALDYLETKPTAEQEAYKQRVDEAFKEGRISKTKRDHLLWHRSDIPTDFIDRQLRQSQYIAVKAVEILQQGIRQVWTSGGSVTDFLRHLWGYDEILHTLNLPRYRQVEELTEIVHYEHAGQEHDEERIKNWSKRIDHRHHAIDALTVALTRQAYIQRLNSLNAEFTREEMLKEVEEANTVYNEKKSLLEKWVNEQPHFSVDDVTQSVDSILVSFRAGKRVTTPARRAIYQGGKRTIVQRNIQVPRGALTNEFVYTKNGNKYARKYPIDAISNPENIVDPTIRQLIKARLAAFNGNAKEAFKEPLFSAEGMEIRTIRCYNNKLADKGVVAVKYNERQEPIGFSETDSNHHIAIYRDKSGKYQEMVVSFWDAVERKKFGVPVVISNPHDVWDSIMDKDLPQEFLVKLPKDDWTYILSMQENEMFVLGMEEDEFNDAIEAKDNAVLNKHLYRIQNISSLFYNFRYHTETKVDDKYAGIENGRNASMSLGALVPIRSFGSLFALFPHKVKIDIMGRITKA

SEQ ID NO: 1243 - protein, 1533 aa, unidentified
  REGION 1..1533: note = Description of Unknown: Cas Enzyme sequence
MKKILGLDLGTNSIGWAVVERGSNVGRIIKAGSRIIPMDAATLGDFASGNTKSQTAERTSKRTARRMRERFLLRRERLHRLLRILGYLPKHYEERIGWDLDNDRKHYGTFLDGDEPKIAWIKNDDKKFEFVFKSSFQEMLEDFKKYHPDNVSDGKKIPYDWTLYYLRQKALTQSISKEELSWIILNFNQKRGYNQQRDEILEASDDKKEEYMCLTVSSVTPDEDTKGKDIWYNIRFENSDIIYRRKSKYPLNWVGKKRNIIVTTKLDEEGNPKLKKDGSIDYSVKSPNDDDWALLKIKTEQDLKASHQTVGQYIYAALLANPSEKIRGGLVRTIERDFYKDELEKILQKQSEFHAELKDRSLYEQCIKELYRNNETHRNNIAKNDFTYLILEDVLFYQRPLKSKKSLIDNCPYESHQGIDKETGEICTYPLKCIAKSNPYFQEYRIWKFLSDLRIIANTKEINGHIHTDVDITNELLPDNNSWSHLFAWLNDKGHITQIDLLTYLGIKKKEQSKFRWNYVADKHYPMNATRHAILNRMKEGEVLNREMEQAIWHLLYSTTSKAEIDKSLSPSDNTNGIYKKLIQAGISVESIEKIKTIKLPDEGYGAYSEKAIKKLLPLMRCGDFWDEEQMHPATLERIKEFQKGNGLEDFSERVKQLISTMNDIHLYQRIPEWLACYVVYGKHSEANEIVKWKAPEDINVYLNNFKQHSFRNPIVESVILETLRVVRDIWKRYGDIDEIHIEMGRDLKNPSDKRAQITQRVLQNENTNIRIKTLLAEFLAEEYKIDNVRPHSPSQQDLLRIYEEDVLAHNEPDEEIQDIINNLSNPTKQPSRTQVLRYKCWLDQKYCSPYTGQPIPLSRLFTSDYEIEHIIPQSRYFDDSFSNKVICESEVNKLKDNQLGYEFIKRHHGQTVQLASGRMVRVLEVDQYEQLVKDNFAQNKKRKLLMDDIPAEFIQRQLNDSRYISKVVKGLLSNIVRTTDEDGNLEREAISKNVITCNGSVTTRLKRDWGLGEVWNAIVLPRFQRLNEITGRNCFTALNSHGQEIPAMPLELQKGFSIKRIDHRHHALDAIVIACTTRDHVNLLNNESALPENQANKHALSHKLRQCEEIVINDKKRTIYKEFLMPWNTFKSDTFNSLQEIVVSFKQNLRVLTQATNLYTKYMNGEKKQQAQHSSDHFAIRKSLHKDTVFGHVNLQRITTVKLKDALKDVIRIVDKRLKKKIKELISKHYNDKQLLVYFKDYAYEWKGYDFNKVKVFYYTDEKEMMVATRFCNDLVSVFSGKTKKQDVVKTIEQITDTGIQRILTNYLNANLEQIEYAFSADGLEKMNENIAAYNNGKQHKPIFKVRLFQPKDNKFQVGQKGNNSKKYVVADAGTNLFFAVYQTSDGNRKYKTIPLEEVVARMKMKLHPVNDTDEEGNKLFFCISPNDMVYLPTPDELSDGHINQESIDANRVYRFVDSSGTTANFVPSKIANVIYHLKKDQAELFCQGDTIQDELGKGSPQSKNQKAITGEMVKDLCIPLKVNRIGEIKFK

SEQ ID NO: 1244 - protein, 1148 aa, unidentified
  REGION 1..1148: note = Description of Unknown: Cas Enzyme sequence
MEKHILGLDLGVGSIGWALIETDDDQPKRIIGMGSRIVPISKDDSDQFIKGQAISKNADRTARRTTRKGYDRYQLRRTLLTQVLRQNGMLPECMDEHVIDLWKLRSDAATNGHQLTLPQIGRVLYHINQKRGYKHAKADNGDSKQTKYVEAVNQRYKEIQEAHQTIGQHFYLELLRSKVESGNGPYYTFRIKDKVFPRAAYIAEFDQIMQVQHGFYPEVLTDELIDTLRNRIIFYQRPLKSCKHLVSLCEFEMRPYKTKDGRIVYGGPKCAPRTSPLAQLCAMWETVNNITLTNRNNERYEFSLEQREQMVHHLCTHETLKLTDLYKILGITKKDGWYGGKAIGKGIKGNATLNQLRKALNGQYAQWLEMSIEREDAVDDTTAEIFWIVSPKVEETPLFKLWHAVYSIQDADELAKTLRDKFQITDPVVIDALCKIDFVKPGYANKSHKFIRRILPYLMEGMQYSEACARVGINHSNSMTTEERDARPLAERIELLQKNALRQPVIEKILNQMINLVNRLQQEYGPIDEARVELARELKQSRDERESAYRAMGQNERNNKRIAEAISEFDIRPSRSRIQKYKMWEESQKRCFYCGKNVDVTEFLSGADVEIEHIIPRSILFDDSFSNKVCACRECNREKGNQTAMDYMESKPTGDFEAYKQRVNDAFQEHRISKTKRDHLLWRRADIPQDFIDRQLRQSQYIAVKAVEILQQGIRKVWTTGGSVTDFLRHQWGYDEILHTLNLPRYRKVEDFTEYVHYEHAGQEHTEERIKNWTKRIDHRHHAIDALTVALTRQAYIQRLNTLEASHDFMEKQVKEACSQYNEKKSILERWVNEQPHFSVEDVTNKVDGILVSFRAGKRVTTPAKRAIYKNGKRTIIQTGLQVPRGALTNEFVYTKRGRKYVRKYPINAITNPENIVDPTIRQLFKTRMAAFRGNTKDAFKQPLYSAEGMEIKTVRCFNNKLSDRGVVAIKYNKCREPIGFAETDNNHHMAIYLLPNGTLKESIVSFWEAVERKRYGLPVIITNPSAVWDSIMDKELPQEFLEKLPKDDWTYVLSMQENEMFILGMEEDEFNDAIEEQNFNALNKNLYRVQSISYGDYYFCHHTETKATEKNESLKLGKTIRVRGVNPLKTYFPQKVKIDIMGRITKA

SEQ ID NO: 1245 - protein, 1160 aa, unidentified
  REGION 1..1160: note = Description of Unknown: Cas Enzyme sequence
MKKKILGLDLGVGSIGWALIETEDNQPKQILGMGSRIVPISKDDNDQFSKGQAITKNADRTARRTARKGYNRYQMRRALLTQALRNNNMLPERMDENVIDLWKLRSDAATEGHQLTLPQIGRVLYHINQKRGYKHSKADENGDSKQTKYVEAVNQRFKDIQEAHQTIGQRFYLELLRTRVHREKGDYYTYRIKDQVFPRAAYIAEFDQIMHVQRVYYPEVLTDEFIDTLRNRIIFYQRPLKSCKHLVSLCEFEMRPYKTKDGKIVYGGPKCAPRTSPLAQLCAMWETANNITLTNRNNERFEFTLEQRRQIVDFLCHNKEMKVTHLQKILGISKKDGWYGGKAIGKGIKGNATLNQLRETLQGKYDQWLEMPIKHVDVVDATTSEVFWAVSPEVEETPLFKLWHAVYSLQNADELAKTLREKFQIFDEAVIEALCKIDFVKPGYANKSHKFIRRLLPYLMEGMMYSEACERININHSNSMTREEREQRPLSARIQLLQKNQLRQPVVEKVLNQMINIVNSLKDQYGEIDEARVELARELKQSREERESAYRAMGQNERRNKEIAEKISEFGIRPSRSRIQKYKMWEESMHQCFYCGKTIDLSEFLNGADVEIEHIIPRSILFDDSFSNKVCACRRCNQEKGNQTAMEYMETKSAAEQEAYKQRVDEAFTAKRISKTKRDHLLWRKADIPADFIERQLRQSQYIAVKAVEVLQDGIRHVWTSGGSVTDFLRHQWGYDEILHTLNLPRYRQVEGLTEYVEFEHAGQKHTEERIKNWSKRIDHRHHAIDALTVALTQQGYIQRLNTLEASHDLMEKQVKEAGTHYNEKKSILEKWINEQPHFSVEDVTNVVKGILVSFRAGKRVTTPARRAIYKGGKRVIAQRGIEVPRGALTKDTIYGKQGESYVVKYPLTHQSMKADNIVDPTIRALVKARLAAYNNNANEAFKTPLYSAEGMEIKSVRCVARLTENGVIPIKYNKQGMAIGYAEKGNNHHVAIYKEKDKKTFDITVSFYDAVERKRYGVPVVITNPHEVWDSVLNKDLPQEFLAKLPNDNWQFILSMQENEMFVLGMEDDEFDDAIERQDYATLNKHLYRVQKIAHNDYWFRYHTETTVDDKYGDGEDNKVNLGWSVEMGKVCRIRSCDALFAKHPHKVKVDLLGHIHKA

SEQ ID NO: 1246 - protein, 1149 aa, unidentified
  REGION 1..1149: note = Description of Unknown: Cas Enzyme sequence
MKKKILGLDLGVGSIGWALIETEDNQPKQILGMGSRIVPISKDDNDQFSKGQAITKNADRTQRRTTRKGYNRYQMRRALLTQALRNNNMLPERMDENVIDLWKLRSDAATEGHQLTLSQIGRVLYHMNQKRGYKHSKADDNGDSKQTKYVEEVNQRYKEIQEAHQTIGQHFYLELLRSKIERANGPYYTYRIKDQVFPRAAYMAEFDQIMQTQRVFYPEVLTDEFIDTLRNRIIFYQRPLKSCKHLVSLCEFEARPYKTKEGKIVYGGPKCAPRTSPLAQLCAIWETTNNITLTNRNNEKYEFTLEHRRQIVDFLCHNKEMKVSHLQKILGIGRNDGWYGGKAIGKGIKGNATLNQLRDALQGKYDQWLEMPIKRVDVVDATTGEVFWAVSAEIEETPLFRLWHAVYSLQNAEELAKTLREKFLITDESVIEALCRIDFVKPGYANKSHKFIRRLLPYLMEGMMYSEGCERININHSNSMTREEREQRPLKEHIQLLQKNQLRQPVVEKVLNQMINIVNSLKDQYGEIDEARVELARELKQSRDERESAYKAMGKNERRNKEIAEKIAEFGIRPSRSRIQKYKMWEESMHQCFYCGKTIDLAEFLNGADVEIEHIIPRSILFDDSFSNKVCACRRCNQEKSNQTAMEYMETKPVGELEAYKRRVDEAFTAKRISKTKRDHLLWRKADIPTDFIERQLRQSQYIAVKAVEVLQDGIRQVWTSGGSVTDFLRHQWGYDEILHTLNLPRYRQVEGLTEFVDYEHAGQKHTEERIKNWTKRIDHRHHAIDALTVALTQQGYIQRLNTLEASHDFMEKQVKETGTHYNEKKSILEKWINEQPHFSVEDVTSAVDGILVSFRAGKRVTTPARRAIYKGGKRVIVQRGIEVPRGALTNEFVYTKKGNKYARKYPINAISNPDNIVDETIRQLVKSRLIACGGNTNEAFKTPLYSAEGMEIKTVRCFNNKLSDRGVVAIKYNENNEPIGYAETDNNHHMAIYRQKDGSLKEKIVSFWDAVERKRYGVPVVIANPHEVWDSLLNTEFPQEFLAKLPKDDWQYVLSMQENEMFVLGMEDDEFNDAIERQDYTALNKHLYRVQSISHDDYYFCHHTETKATEKSESLKLGKTLRIRGVNSLKNYFPHKVKVDILGHIHKV

SEQ ID NO: 1247 - protein, 1154 aa, unidentified
  REGION 1..1154: note = Description of Unknown: Cas Enzyme sequence
MKKKILGLDLGVGSIGWALIETEDNQPQKILGMGSRIVPISKDDSDQFSKGQAITKNADRTARRTARKGYNRYQMRRALLTQALRNNNMLPERMDENVIDLWKLRSDAATEGHQLTLPQIGRVLYHINQKRGYKHSKADENGDSKQTKYVEAVNQRYKDIQEANQTIGQHFYLELLRTRVHRESGDYYTYRIKDQVFPRAAYIAEFDQIMNVQRVYHPEVLTDEFIDTLRNRIIFYQRPLKSCKHLVSLCEFEMRPYKTRDGKIVYGGPKCAPRTSPLAQLCAMWETANNITLTNRNNERFEFTLEQRKQIVDFLCHNKEMKVSHLQKILGISKKDGWYGGKAIGKGIKGNATLNQLREALQGKYDQWLEMPIKHIDVVDATTSEVFWAVSPEVEETPLFKLWHAVYSLQNADELAKTLREKFQITDEAVIEALCKIDFVKPGYANKSHKFIRRLLPYLMEGMMYSEACERININHSNSMTREEREQRPLSARIQLLQKNQLRQPVVEKVLNQMINIVNSLKDQYGEIDEARVELARELKQSRDERESAYKAMGQNERRNKEIAAKIGEFGIRPSRSRIQKYKMWEESLHQCFYCGKTIDLSEFLNGADVEIEHIIPRSILFDDSFSNKVCACRRCNQEKGNQTAMEYIETKSAAEQEAYKQRVDEAFTAKRISKTKRDHLLWRKADIPADFIERQLRQSQYIAVKAVEVLQDGIRQVWTSGGSVTDFLRHQWGYDEIIHTLNLPRYRQVEGLTEFVDFEYAGQKHTEERIKNWSKRIDHRHHAIDALTVALTQQGYIQRLNTLEASHDFMEKQVKEAGTKYNEKKSILEKWINEQPHFSVEDVTNAVDGILVSFRAGKRVTTPARRAIYKGGKRVIVQRGIEVPRGALTEETIYGKLGDKFTVKYPLDHPSMKPENIVDSTIRALVQKRVAERGKDAFKEPLYSAEGMVIKSVRCYTSLSENGVVPVKYDEAGRPIGYAKKGNNHHIAIYQDKDGQYQEMVVSFWDAVERKRYGVPVVITNPHEVWDSLLNKDLPQEFLAKLPNDNWQFVLSMQENEMFVLGLEDDEFNDAIERQDYAALNKHLYRVQKISHREYTFRYHTETKVDDKYEGMENGRTTSISLGASIPFKSISALLVKFPHKVKVDLLGHIHKA

SEQ ID NO: 1248 - protein, 1450 aa, unidentified
  REGION 1..1450: note = Description of Unknown: Cas Enzyme sequence
MTKILAFDLGSSSIGYSLRDTDNNGENIIDQLVLYGSIIFSPGMADNGVSNAAERTSHRSSRHLYRVRRYRIWETLATLIEFGCCPLSKEDLDKWRTYDKNKRPTRQYPVDAVEFEKWIRMNPYELREKLATDQLDFTKEENRFMLGRALYHIAQRRGFRSSKGETLKEQEKDINENPAEEIRIDSDLLKKSEEKKSKKLVAYMEEHSLPTVGKAFAKLIKDKNKGRVRASEYQAVRSQYRDEIEYIFNFQKGLDANGEFFRRIYSTGNDGTIFYQNPIRSQKGQVGKCTLEAAKPRCPISHPEYEKYRAFSFINNIKYRKSIDEDWQTLTASQKIKLYKEKFLLVNDFEFADIRKWIEKEICLPKDISLSKEHGTINYDDRTNVSVCPVSGRLKSVFGDNWEDYVYQTAKTRKDKEGKEHTVTYTIEDIWHVCFSYDDEDAVSGFAKSIGLDASQEKKFLNLWMNIPQGYAMFSLKAIRNINRFLVPKENNPSYKGYIYTEATLFAKIPDILGEKQWQESESDILRSLNGLMNDVRDENCILKIVNNLISDYKALDYRDLDYREHFAVNDRSYKLDDSDRKDVEMHTVSFFGKSVWEKKPEDEREEILGKVEELYQNIFSSSKRDYYNLPKLGDRIKLYLSNKFPELRCCNEDADSQCNCHACKKLNQLYHPSMVEFYRPVVCNGKKLLGSPVTGSFKNPMAMKVLHQLRRLVNGLIQKGLIDEDTRIVVETARELNDANMRWAIEEYSRKREEENKIIIEAIKKIRKDDNEVSDTVLEKARLLLEQSPDYLSDIKEKEDAAANKSNKDKKEDKNKQKKKDIKNYSSWLEKGIKCIYTDKPISLTSLFVENETDIEHTIPRSRSFDNSMANKTVCLAYYNREVKKNRMPTELEDYEEIKKRLLPWEERVEHLEYRVRFWQRKSKHSLTKENKDEAIRQKHLWQMELDYWKDKLSRFTMTEVPEGFRRKQLNDTRLITKYAYHYLKSVFGKVDVQKGIITSEFRKIFGFPVKTRDNHSHHAIDATILTLIPVASKRDEMLRLFYEIQEDKKLNIVTKEKEKQLEWLIKSCRIGKTVGIAEHIENNILVKHISNDRALTPAIRNKRVGGKVVWKRNEKGEILIDTYGKKIPQYKLTGDCIRGKLHQASFYGAIKQSKKEVVKKEKQKEEGTIYETSYDDISYVIRRKLKEFDSLDDLHRVIVDEHLFDEIRKQCEGKDFKDACDEGFYMQKCSNPIRHIRCYAYDVKNPLHIKQQTYLSKKDYKRTYHAQVGDMYAMCRYYNLTNNAVIHKVVSLSEISENRKKGCDLEMKNSEYRLDAILNKGKQVILYKDLNDLESLIGAGKKQLSERLYVIKGYVRQSEKIILKKHICSKKDKDLGGVKTINSESFNKGLPEKKIKQSINNLNYLLEDVDFKITIEGEIKFKTNRIEEIKKRIKKRTEKEKKKRKKKS

SEQ ID NO: 1249 - protein, 1108 aa, unidentified
  REGION 1..1108: note = Description of Unknown: Cas Enzyme sequence
VIFRRDRMGYRIGLDIGIASIGYSILKTDENGNPKKIEFLNSVIFPIAENPKDGSSLAAPRREKRGLRRRNRRKNFRKYRTKRLFIESELLTEKGIRTIFENIADKSIYQLRSEALDKLLTNEELFRVFYFFSGHRGFKSNRKAELKDSDNGPVLTAISETKKALHTTGYRTLGEYYYKDSKFDEHKRNKEHEYLTTPERSLLVEEIKEIISKQRGYGNEKLTEKFEEAFIGNQSDKGIFNQQRDFDEGPGENSPYAGDQIEKMIGWCTFEKEEKRAPKASYTFQYFDLLSTVNNLRIQEYAGESYRNLIVEERQLLIDKAFEKEKITYKDVKKLLNLDEYAKFNLLNYGSKIEAEATEKKTTFVSLKAYHKLKKTVGKEVFSEMSPVVIDEFAYILTAFSSDNSRMREFKNRLDLSNELVETLLSITFSKFGNLSIKAMKKVIPYLELGDTYDKACGEAGYDFRQNHINEEYIKENVANPVVKRAVSKTIKVVKQIISKYGPPDAINIELARELGKSNEERNKIKKRQDENRSYNEKVASQISELGFAVNGESIIRLKLWFEQKNLDPYTGLSIPLDDVFSYKYDVDHIIPYSKSFDDQFTNKVLTSTACNREKGNRIPMEYLGNNPIRVKSLEAVANQIKNIKKREKLLKQTFSKEDTDGFKERNLKDTQYISKLLKSYFEQNIIFSESLEQKQKVFVGNGVVTARLRARWGLNKVRDDGDKHHAMDATVVACMTPTLIRMLTLYSRRQEVRANLDLWQTYDEKEDPDFLKLSKIKREQYESLFSKRFPEPWPGFRDELLIRMSEDPKSLIKNYPTVKANYSEQEIMDLKPMFVVRLANHKITGPAHQETIRSAKLLDEGKTVSRMSVDKLKLDKNGEIKTAKWEFYQPSDNGWKIVYEAIRRELEKNDGDGTKAFPEKEFTYEFNGHSHTVRKVQVVQKTTLSVQLNDGEQVADNGSMVRIDVFKTAKKYVFVPIYVSDTIKNELPNKACVAHKPYKDWPEVDEAEFQFSLYPRDMLHIKHKTGFTAFYNGENKGPSKISDFYGYFTAADIANAQINIVSHDNSFLGKGIGIAGLEKIEKYAVDYFGNYHKVNEKVRQAFQRKKG

SEQ ID NO: 1250 - protein, 1415 aa, unidentified
  REGION 1..1415: note = Description of Unknown: Cas Enzyme sequence
MTDSKIISPIAIDLGGLYTGLYMAQYPYGESLAQHHGKLTTLVMPEEGGKMTWSQAARTATRHRIRSNKRRKLAKRLLKVIFTQGLSYKLNDAELEALNGLLNRRGYNRVETDIDRQPLETVPPSWIANEFPEFFDSSSPISEQLEELLEDIPKLRDLAADEKFNLNNREAKKQLFTDAEDEQADILKAYGILRESVTELLNSIDFGHQHRRKYLEAVGKEILKDSRLAELRAKLGASALKNLIGNISNLQLRALRWYFNDTAMKSADYYDGERFKSVYVRWLQNWHVDEETRVNRNNALKVIHPSEDILTALMTIDAELTIPPYENQNNRRPPKDQTLWLNPQSLNEQYGSQWRVWVNNLRKRNPELAEGIAPVLEFTDRRSRLKTNKQRLTDTSLYADSYFLQRLLDRSRIHDTYALRAISKNFKSEKLEKFRWNLKQDLGDQHTEKFLDFTQKYYQEVERAKSGIWEQESASLLEKADINPPSKRKILNRLVGNILGVEMSAEELTTFLSDVWTKKVHGPSTVKSICKAAEDLRKQNGNLFNMYIQSVRYRASVEAGAEKKFKGLDKEIWQLLVKVEKAADVISGSISATETQKQRFSNTFSLAQLYTLIETDRNGFSKVSAAAHMELAWRMTMIPVDDKEAARCSRLPADSSRPFDGVLRRLLERQAYEIATLKSGQIKESGVRDSEISIPVVVEENRFTFSIGLADVKKDGSKRKKLLSLGEKQLEKWQEKNERIRQGGSGLCPYKGTILDKDAELDHIIPRSYSRDASGTIFNSEANLIYASRRGNQEKKDQRYGISDLAPNYLKAVYGTSDSAEITRIIEASVASIKKDFLFSELEGDQQRDVRHALFLERDSKAFEKVFRRLATQQSARVNGTQAWLARKLISVLKSQLKSWLSETGNTIVFNLCKADAQQTSFVRTGLAVTKPETTKGERQGVGSHAIDAYCAFSVAAAEGMHETLAQGAGLMEDTEWLATALPVDVDVNWVKRLPLYRKSELSTRPIFKEGIYAESFLTTWISEKGIESGFSLGSNSVQWQGKDTRGLLELLAPFATKNLNVDTALASPRPVQLDISKEKAFKHFEMVAKAPHSEVDLHQADILDALRYCTAKKDISSRLIDVQKKTLKKPEEVLKAKDIYVKVDVDVKGLGKLKGKVTHPAIEQWKRLFLIPDIETRIGEKAVGINWQQIGEKYFGEGSSRPHSKTRRVYSLPIVDSPDGGYRIKRIAPDGSTIWQLTSIKDTGSSGFTVNDKGVNWKQPVAIPALRDSSVVGVGERYQPVPEQQVYFDDWKCVDITDERVLSVSVAPGTKDRRYVSVSQTLSDFKAWLTESGIKLHSPFEIPSRVKVDAAKFQSAHGIDVLGKPKSNLFISKVGDVVNYWYIRESSPVVINQYYDKALLAEREAVNETEPCDI

SEQ ID NO: 1251 - protein, 1062 aa, unidentified
  REGION 1..1062: note = Description of Unknown: Cas Enzyme sequence
MQKVLGIDIGISNVGWGIINQQTGEIIEAGVRIFEEATRNANEERRGFRSSRRLKRRKSHRLERACQLFNQYDLPLSGIGKVNPYEVRYRGIYGKVNKDELVAALYHIVKKRGTILDSTEEGKSGDDFSTIEQLNINKKLLETKYVCEIQLERLANKDEKLRNHENQFRTVDYVNEARAILNNQKQIHSEITEDFISKVIQLIEERRQYYDGPGSEKSPTPYGCYYLDKKGSLVITTMINKMRGKCTYFHNEMRMAKMSFTADLFNLLSGDLNKLQINGEYLSYEDKSYLVNQLIKKGKSITLTQILKYKAASEDADVTGYRVDLKTDKPIFTEFKGYKLIRKVVIENELPVEILDNIEMVDSIIEILTSEKSYQRRDNQLLQLFCMYNNNEARRIVDAFKESTGFTGYHSLSKKAIDSIIEELWHTNKNQMQIFSERGIEGKRLIKYNNYKNIAFDDDAILSTVAKRAHREAIKIINEIRKKHGELAAIAIETAREKNSEEKRRQYADYQKKIGKHEKEMAKLLGVSSLAELRLSSKQLLALKLWESQDYKCIYSGKSIDIHDIIINPSLFEIDHIIPISLSFDDSQANKVICYHGENQRKGQKTPYQYFASGKAPRTFDQFKIEVLNLYKSNRITSKKKDYLLELRNIEFNEELQKEFINRNLIDTQYAMRSLSMTLRTFFKVNNIDTKILSIRGSFTAALRRRAKLYKDREENYAHHAIDALIVAAIGKMPVLGFFKYFDMNEEGIIFDKDKGIFIDEDEFFSHSYIAFLRRLMSYEPKIKYSHKVDRKINRSLSNQTIYSTREKDGETRLIRRTSNIYHLNKNDNELKTILKLIDKEPENLLIVQYNPELLELFKKIVNEYSTSDNPFRAYFEEHGYILKDGKVPVKKLKYYGDRLGVHLDITHKYPNSKYFVVMLSINKLRVDVFKNQEGNYKCLGVPYCWFKQKGDQFILNMDEYNKQKSVKKITDTDEFLFSLYKNDRFSYVKNGEYYERIFIGDSSPTQHKIEVDFVNRRRLQEERGSMFLYISKLSNIVKYNMDILGNTYKIEKENFKNYLQI

SEQ ID NO: 1252 - protein, 1354 aa, unidentified
  REGION 1..1354: note = Description of Unknown: Cas Enzyme sequence
MGKTKDYYLGLDIGTDSVGYAVTDEEYNLIKFHGEPAWGVTIFDAASLCDERRSFRSARRRLDRKKQRISFLQSLFAEEIAKVDPKFFVRLQESRLYRDEAGDAFVFFNDSEFTDKDYYKKYPTIHHLIVELMRNSKAHDIRLVYLACSWLVSHRGHFFSNIQKENLSAIKDFESVYNSLMNYFKENGYDAPWESPDLSKLSIALKKHIGVNEKTKLLTKELYGESKPSRENTESFPFSRISIVKLLAGGSCKLKDVFGKEEYDEIGSVSLRMDDDKMNEVLSGIGDDSELILALRAVSDWALLVDVIGTADTISEAKVAIYEQHKSDLATLKHMIKKYLPDKYNEVFRNPNEKDNYVAYSYHVDGKDTSLIKKADIEVFSKKMEAIVKNITPDINDQYAYADMCERLKNCTFLPKQKNTDNRVIPYQLYWHELNQLLNTCANYLPFLNEKDRDGLTVHEKILSIFMFRVPYFVGPLNRNSNNAWLVRKNEKIFPWNFEKIVDFDASEQAFIQRMTNQCSYLPGEPVLPKDSLLYHRYMVLNEINNIRIEGVRISVELKQEIYNNVFLNRKKITRRTLTDYLISNGYIKKGNEETLGGIDDNIHSNLAPMVSFKNLLSKGVLSEKDVETIIERSSYAEDKTRLHRWLKLTYPHLSEDDQRYICKLKFKDFGRLSRRFLTEIEGADIETGEVYSIIDALWKTQNNLMELLSGRFTFRQEIESFSHEYYAEHPVTLEDRMNDMYVSNAVKRPVYRTLDIVKDVVKAFGEPKKIFVETTRGADPDQKGRRTKTRKQQILDLYSTCEEDVRALTAQIDAMGDYADNRLQSDKLFLYYMQLGKCMYTGRTIELEQLFSKAYDIDHIYPQAYVKDDSIINNKVLCLSEVNGKKQDVYPIDASIRNKMGGYWHFLKEKSFISEEKYKRLTRSTPFMPDEKMGFINRQLTETSHSVKAIAAILKEKYQNTEIIYSKARLVSEFRQIFDIPKSRLFNDLHHAVDAYLNIVTGNVYNMKFTKPWFDVTGKYSIKTETLFTRKQVCNGIVVWDGQQTLQKVKKIAVKNNAHFTKYAFFKRGGLFDQMPLPAAKGLIPLKKGLDTERYGGYNKASAMFYIPVRYETGKKTDICIMSVEMLYGDQFLSDTDFAVKYAKIRLKKIFGKQVERVEFPMGMRPWKVNTMLSLDGFRVCIAGISSGGKCLIAQPVMQFSAKGEWQYYLKKIEKFVEKCDKNPKYLYDESFDHVSKENNIALYDLYIEKYERSIYAKRINKPLQTLLSGRELFLSLDIKKQAKALLNIHMTFGRVAGGCDLKLIGGAPKAAATISFSANVSNWRKQYKDIRIIDQSSSGLWMKQSDNILSLL

SEQ ID NO: 1253 - protein, 1124 aa, unidentified
  REGION 1..1124: note = Description of Unknown: Cas Enzyme sequence
MSSNKVLSLDLGVTSCGFSVLNQFEDDKYTLIDYGVFMRDNPKKDDVSPKALRSEYKSKREIRKKRKKRVIAIQELLFSLNIYTGDAKEQNIDIWALRGNIAYERKLKDYEYFAILRFLAKHRGYKSLKIEDLIKEINSKNELQADCDKDATVEVPKDLENFAKTLAYLDALKCQNQDKSVPQIIYEMQKDNRVKTFRNHDNYRYMIRREDIKREIELIIDSQNEFGFFDKSIDIKKLKSDLVEIIVPQAPVVLNLDLINNCLLIPTQKCAPIYSHSYDLFKLYKTVNDLKVDGETINSEQKEIIIDYVLSKVDNQDKVEFITVKEIKKVLNIFNPDIKLNNFSEERSIKGKREDVKLLSFLWFSKIYKFDSKIISLINTHDKKLEIYDNIALTIQTKINPSDFLNSMIDIVDAYKICIDCKKEEIEKFSLTLFENKKSGTGSYSFEAIKKLLTVMKTGINEAEAKEQTGLDVKNEDYSTYHKGIKYLNFYQYEKDKNALSNHVVKSIVSGVLRLIKDLHSKYGTFDTIKIESAKELSIPEEAKKEIEKANKENNKIWENLKKKYAKHAGERGLTNSDILKLKLYELQEQKGIYSNTSIGVSDVLSEKTEIEHIVPRTCGGSSAEYNLALDFKDENAKKGNKLPLDYLSGDKRTIFEEKIQKMKDDGVINYKKWKNLLAEDLGKTFKETKDDANMHATSYAEKLLGEIVKMYYPFTDKEKQKNGVGVMHISGRATTHLRKVLGVENKSRDTNFHHAEDAIIMSIMSRGYLQKLSRTFRENYGKDKHSAKNHLKSIFPTIEGAVPAEIIVRLRELYEKDIDISPFFIDHEGRLKTVNFWVSKKPIGTQAHNETIQSAKDFSYRVKLESLFNDVKPKPSHKSKPEEFHKLYNSKVYERLQLVKDNPNDFTAKAIKQRGDEVVALINKYQLVTTKEEKEQADKEIRELFNAPIYDVNGNVIRRVKRVGEEASIKVRKGVAYTAPSFVCMKVLKNKSKSKLILERLDIRSYKFESQLLPANQMNIFNNDLIAIFSLNKNTLEVKIEGILRSFTNSRNRAYIRNPKFPLLLEKQPKAYTKDISIGSACGIIKYKTDITGKVIGIYRLGKVLIDDKEKESNHVIYENLDG

SEQ ID NO: 1254 - protein, 1058 aa, unidentified
  REGION 1..1058: note = Description of Unknown: Cas Enzyme sequence
MKDYVLKDSKGAASGDHIWAFDLGKGSIGEAVRQGTKFLHKASLLIPADFAETKTAANRRRAWRTRQAHKAREQWLKEVMQKAGIEVLHGRNYDKNGNWKAGEPADERLEREFAEKGDITCYTSCLLRIKLLRGEKLEPWQIYKAFHSAIQRRGYDPDIPWKTRESRAKTKDGDDDEAGTQKRMEEFEQKLTEISKGKPEFHYPCYFDAHEMGLWDGGSQFKAWTDCQAKTTRNQIVPRKLVEKEIRDMVDAAAKFYPTLKDKADYLLYGPPEKAYASYDPKLRRQFGLKEGGASDWQGVVGQKIPRFDNRIIGKCVLIPRLNVCKIRKDENGELHPNSRIAAEVVFLMKLKNMRFQQSGKVRGLSAKEIGEIFNDPKRTKLGLTPTQWRKWCEKFHGNPMAGQHEEVAEPSFSGRSRFCRPALEVLKRLILSGDTPQLAYEKELQKLNGNTEPLKGLVKDDLKFLQKMGTTWEGIYIPNQKLDTLAQSTDNPKEAIHNLISSQNDPIVRHRLTLFAERLNELAERFGVPDAIVLEFVREDFMGKKAKLEYFKFQRERANERAKAREEAIQVGAEERSAGLKMELLKAQVGECLYTGMALIPEKLDEYVIDHIVPRAKGGPDSAVNYVLTTRRANDDKSDRTPYEWLSTTNGWAAYIERVKKRISTLRNKKVQLLASPDAETLVQKYTALAETAWISKLTQTIIGLRFSWPNGISNGERKVIVVSGGLTGRIRRKYKLNSLLNPDAKSEEEAETKNRNDDRHHALDAMVISFLPNWARNSRFTGFFKFPDGVHRELFEKEIAEVIPQNVCFEKTTLAETIYGARIDDGKKVIVQRAELVSLGMKPTAPGKSVFDLKYAVKQAQFVRDSVIRERLQEFLSTTPDETAWRKFCAEFCLKCKDGSNGPRIEHVTVNVGEPTEYKDLSKDGTGAYRKALKGHKGQIVYSLLTTDKKGAKRETIAVRPIYAFESAAKVSTALRAEFGDALQVKGIFQSGCLVEMERETAHAKKPLPSGKYLLNTIITASNAAKLTTMSGHTYPDIPLYGLSNLLAAGMKRVTL

SEQ ID NO: 1255 - protein, 1148 aa, unidentified
  REGION 1..1148: note = Description of Unknown: Cas Enzyme sequence
MNGKRRKRILGVDLGVTSFGYGIVETEKGTSDYTVVDKGVVTRDRFVNDPKSGKTPQKKHSEIQSRSKILDAKKKRRYAVAEIMEKHGVLTVKECRESARKNTITNQWELRADDVWKRPLSPEELYAIFKHMADHRGYKSLSTEALILEEKRKAGVVDAKEETPKTATEEGDDAGFAMAAMELDALRKKYPGETVVVTIRKAIENGEHSSWRNHDNREKVIRREHIEEEIEKVVARQYEMGAFDFGEDAAIGFVKDMKEAIIHQDLPTIDISKFGTCPVYPEEICAPKFSYVSDMYRIRKHLADLRIDGNPLSKEERSAVTGWIEESAKKGSLPEKITYTKLRKILKLPEERLFNGMPDRIEGEKKDIPRVFVTLLYLPVLGKTPGLMRIETEHESPMDVHESIATALQLSLTPTEGVAKAAEALKKHGVSMETLELLELFAAKGKRSGTMNLSHRFMREALPLFEEGLDESGIREHLGISTKEEYGAYPKSVRHLHLGKGNHYERNFGVVNNHEVKTVASWSLGLIADLDRRYGPFDEIVVETARDALPPKRQKAIEIAQKRRDERISKTIEAHKKEIPGMDRRLAAKIILLEECGGIDIYTGRGIGLSDILDGRVEIEHVIPKSLGGSNADYNLVLAYRDTNTRKGNRLPGDIYGHDPAYKERVERIFAKNGKKKRNLLAETIDDAYIGVSDTASMRATSHIERVVTQVLKCHYPFPDPEHRENGVAVRMVPGKTTSRMRGLLGVKSKSRSTNFHHAEDALILATLDRGLFNRIHKNLRENYGKSKEELKKMWASLLPTIDGRPVREYLAEAAEKFHSKDKDPEGKNLFYRDMNGEIRTVSHFVRKKPGTGAAHGESVYSAKYFERFGQIIARKKLSEEIEKMGIAKKRHSIGADEIEKKFEELVAKTVLHLSGEPNHPVCVAIRERGKEIVELLEKYRQLGAKDDKELDEKFRKELGDLIASDIVAGGNPVRKIAIVPPGTGGAMGIRKRNGKPTGYVTKEKNAIGIFVEKSGKGIDVRRVDVTNKNEFAEKSKKGEGRIFYMNEPLFFFDKKGQIVASGALGGTTTIDKMGIAGKVMLFNPKFPRSPKFQPSHFATGKGSLKEFGIKKAVGVLKITPDLTGRIIKHEKIGIVPSDAMKIVLEGV

SEQ ID NO: 1256 - protein, 1354 aa, unidentified
  REGION 1..1354: note = Description of Unknown: Cas Enzyme sequence
MENYNIGLDIGTTSVGWAVVNDATNKVMRKGGKALWGVRLFDPAVTAEDRRAKRGTRRRYDRRRERIKLLQDEFKDEINKVDINFFLKLEESKYTSKDIKNKTVLISMEEEKAIKKYNQEYPTIYHLRQKLMNSNEQMDIRLVYLAIHHIIKYRGNFNYEGKTFNIEKLDISGKLQEVFMSLSENVSELDISQICLNNIDYIAIAKILNENPKSQNDLKVDLNAELVKGFLNKKFIKEFCQLLVGSEFNIKNLFNIDIEKDIKISFAGNDLEEQADTLEKVLGDYMEILEQLKELYDMVFLKKMFGDSKETTLSGLMVERYNQHKKDLKLLKDTFSSDRKIYNKIFRSKKDIKDDKDMCLYDLYIHNKLETTDFLKEIKKYINTDSFVINDENFLKRLENNEVLPRITSKENGKYPYQLNKDELVSIIEHQGKHYPFLLNKTDDKSDDKTFKLVRLLEFKIPYFVGPLVSREQSDNAWMIRNEGKEHEHIDPYNFNLVVNKEESAIAFITKMTRCCTYLLNEKALPNNSILYSEFKVLNELKQIKINGEHLTQEEQHKIIEELFMKTSGPISKNKFEKFLINKLDYGFYEDVKITGYSADGKFANNMQSYVDFFGEDGIFKDTSYNTNDAEKIIEWITIFDDKDILKRKVENEYPELKKNNQVKNILNKKYSGWGRLSRKLLLDLRVLDEETDIPKSIMDLMYETDENFMQIINNDKYNFQKLIAKENKIENTSNDLSYDVVENLATSPATKRGIYQALKVVKEITTYMGYEPKNIMVEMARGGEKKIRKDDRKKYLQKLYDNIKDEVDSNYKNLKKELAKEEKIDTDKLYLYYLQEGKCLYCGKPINVDDLNTKNSLYEIDHILPRTLVKDNSWDNRALVCRECNQDKGASLVLPSKFNTEKTRKLWNRLKDNKLMSNKKFYLLTRKKYSEEDIKGFINRQLVETRQITKHVANILNCFYPKTKIVYLKANISHSYRDKYDLFKFRDINDYHHAHDAYLAATLGSYQEEYLHYDLDYNKINEFNEKLIKNEDYKRLHYGIVVNSLDEEFQSAFAEIAPRLINEETGELLFNAKEFNDLVEDTLYRNDILISRKTEIKTGEFYNQTKSKKGSIGVQLKKNMPTELYGSYTSINPSYAVMLKYTSKNKDMQRLVGFPIYLENTTIDVKKEYFRKLLKLKPNDKVEIINKKIPFYSLINWDNQLCYLIGASNKIEVCNAIEFKYRKDFMKNNKYVLNKIFNGKNSEKINDYSLSLDSIINYIIDSMENDYKLFANLIIDLKNMTNNGDYSIFSIEQKEKIIKELTKLLNIKSDNANFKFLNDKYSSAFGKKNGRIIENCNIICVSPAGLKKKAYEL

SEQ ID NO: 1257 - protein, 1135 aa, unidentified
  REGION 1..1135: note = Description of Unknown: Cas Enzyme sequence
MKTAPVISNDLHPSSGQETIWAFDLGKSSIGEVVRRGAQFLHKASLLIPADFADTKPAGKRRRMWRTRTAHRERERWLEQIWAAAGLHVLYGRNRDGRTGKWKAGETADRRLEREFAEPGDDTCYTSCLLRIKMLREEKLEEWQIFKALHSAIQRRGYDKTIPWAQKEARRAGKSPEDLEKEEQKKDRGYLAALNRWSEFKTQVAPQFSFPCYYDAWRMGLWNPAEPERLRPRTTYRAESTRNVRFDRQDVEAEITRLAKNAAKSLPALAAAFARIESGGWEQTDAESGRKKRFPVRAQTFGDFLCHGPAGVAYASFSAKSRKEIGLHTGSADDWMGSLGQKIPRFDNRILDDCVLIPRFHVCKAEIRKSTVTGLPLPNTLLSAQVTFLMKLKNTVVADGPNQRKLRVDEVQKIFKTAFADARKVKPNAEDWPRKAADCFALTRADWFRTKGIKELALRPLPGHEVIKPPKDSGRSGFSRPALRLLRTLILLGKDPCAFHAEQLAKLNGNTNPLKGLVPHDLKFLLDMGGSWMDIHIRAQKLDSLAARHTEDGKLDAAAATADLLGSVNDPVVRHRLNVFAGRLRELRGRFGRPDEVVLEFIREDFMGPKRKAELLQFQRDREKARKEAREKAKEAGAEEKSAALKYELCKAQGCLCLYCGQPFAASRLEEYEIEHIVPHSQGGPDAMVNYVLAHRHCNEAKGELTPFQWKHGQEGWDGYKRLVESHAVTLRNKKVQLLLREDATDLVNRYTALAETAWISKLAQTIVSLYFGWKNGNDAEGRKRVTIVSGGLTDRVRRKYHLNSVLNPCPKDEDPFLWEEACEKNRSDDRHHALDAMVISFIPGWMRDARKEHFFRFPKPVHKNGKAFFAKEISGVMPRAVAYERAALAETIYGARPTDKGLVIVQRVALHGLAMKPIAPGKARFDTTYLRKQINAVRDAGIAATITDFLETAPDEAAWDRFCQEFRLHCQDGSPGQRVVRVSVNVGEPDEYREMSKDGTGAWRKGLGSHKGQIIFWDERGELSVRPVFAHGSVGRERRAVESLGGKAKFYAFFQSDCAVRTTKTIPAEAYRLVVKNEAKQKRRISAEKPLPACELTLRTIVTKGRIAELTLADNTRVVAPLDVWVEAGLSRTR

SEQ ID NO: 1258 - protein, 1121 aa, unidentified
  REGION 1..1121: note = Description of Unknown: Cas Enzyme sequence
MQEEILNASEVSKNLEVSFDVGHSSIGWAVLKSLDKNVQNNPEFPQIELLGCGVVTFESDTCLAKKRRDYRRQRRHIRSTKMRIKRMKQFLEHLKVLTASELEKPGSPYPWKLAASVLQGKRLLNWNEIWDILRWYAHNRGYDENRHWSEVAEKDKDDTESVKKSIELMKEHQTKTMAETICKELGTDPSESDKRASHKSYKEIGAAFPRSVVVNEVREILEKHIGKLPGLSQELVETLVGESKDAWKTLPCPSINLPSHYWGSLLCGQLLPRFNNRNIKKCPFSGDTLPLKECVEFYRYRWGKILTNIRVSADGLFGQKRPLNPDERKYVDSKMQELGSMTKTELRKAVEEAVLMTLNKEGVPQPVKINTNLETMFLTSEMEGGLVLDPVKKLINSDTVQSFWGVLPPQLQKRLAGKWRRGKQITIGEIQKELEKIAPEKVEEFNLAIKSNIKRKKKTENRLNDKIPESPLKMLKGRAPYGRKLLQQTYEEVLAGRDPHEKDGCLYRAENILKEEIREAIDKQTNNHLIRHRLLILERLFDDIVREYADNDKNKIKLITIEVNRDLREFSGMTAKEIESELNARSADFKKAKEQLEDMLQEAGLSNTRITATLIKKARIAQDLDFTCPYTGAKYELIDLINKQVDLEHIIPKSKRPSDSMESLVITFKEVNRWKGNRTALRFIKEEQNKPVPGKENLMILTERRFQELVNGLNTKGHPKDTERKKKRKELLLMEDYVEEEFLPRDLTQTSQLVRLAVQVLMKKYIDEKEKPVFVSMPGSITGKFRAGWNLLGCLLKAVPWAADGDNQVKPKDELRNITHLHHAIDACVLALAAHFIPTYKNGKVWELMIKGTVKPSEKSYIEDVPMLQLDSENRLHIKDLPDSIKEQITERLCERRVVQHIPKDMSGVKCDETVYRVVDPNDNHPYAKKLIRWAKENNIQIPSTNDDTVLIVAKKRRGADGATGSKILHKGDKYVWLYDIVKKDKLLGIDPKKGNGKLKRLKAAKLISENYGIALDPKPQMIRHFKVHQTIQDKKLKRILRKGSIINVPKGTYKGVWKIFSIKDNKNGLAIDIGLPDVIRPANKTNYSYSKINASLKTIINGGVQIINMPYTGVNVALYN

SEQ ID NO: 1259 - protein, 1016 aa, unidentified
  REGION 1..1016: note = Description of Unknown: Cas Enzyme sequence
MFHKMNYRLALDLGSTSLGWCMVRLDKEGKPCAVIKAGVRIFSSGLDPEKGTSLAVARRQARGMRRRRDRLLKRKVRMMRMLIQYGFFPENEAERKALEKLNPYALRAKGLDEALAPSEFGRALFHMNQRRGFKSNRKTDDKKNDGSVIKAAISNAREAMERENCRTVGEWLLRRDEQGQTVRARYREQPVMRDGKSRKDKSYDLYIDRAMIEAEFDALWAKQAEFNPGQFTEQARQDLRGTLLYQRDLKPVDPGRCTFLPNEKRAPLALPGAQRFRMYQEVNNLRILQDDLRELPLSPSQRDAVIEALEKNNKRTFAQIRTLLKLGGASKFNLEDPKRTELKGNATSAVLGKAEYFGNSWFQLDEAKQDAIVMQLLGEENEADLIGWLQEGTGVDASHAKAIVNVSLPEGYSNLGMTALNRILTELKKNVVVYSDAVRHASFNHHSNIDASATGEIWPELPYYGLALQRHVGFGTNNPADPDEKRYGRIANPVVHIGLNQIRVVVNALIKRYGHPTEIIVELARELKQSKEKRDAQNREQATRQNKNKERRKAIADILGNSEDSVGDSDLQKWILWEELNPADCAERLCPYSGERIGADRLFSPEVEIEHILPLARTLDNSLNNKTVSMWKANRIKGNQTPWEAFGDSPGGFDYDAILLRAGLMPKEKRYRFGEDGYARWLKEDKDFLARALNDTRYMSRIAREYLGLINPSGVRVITGTMTAMLRRHFGLNNLLGLQGEKNRNDHRHHAVDACVIAVTDQSMLQKFATASANAREEQLGRLVKGLEMPWKSYSDHVKRAINHIKVSYRPDHNYEGAMHRAGAYGLRANGNVSFRKIVDGRRQRMEENRKVIPVTSLKASARHGLLPDGSPRPYKGYDGNSNYCIEIVRNEKGKWTGEVVSTFEAYQVAKKYRKERLRHRTLSISGKPLIMRLMRNDCLQFENNGELQIMRVVSIRTDGAITFAAPVEANVDARNRDKEDPFSYFRKTAGTLQQAKARLVTVSPIGELRIYPFKG

SEQ ID NO: 1260 - protein, 1062 aa, unidentified
  REGION 1..1062: note = Description of Unknown: Cas Enzyme sequence
MKDYFLKRETSTPSNETVWAFDLGKGSIGEAVRRGNEFLHKASLLIPAEFAETRTARDRRRMFRTREAHKARERWLNEVMRAVGIEVLHGRNYDAAGNWRPGEPADKRLEQEFPAPGDDTCYTSCLLRIKLLRGEKLEPWQVFKAFHSAIQRRGYDKDIPWKNREARKAKNADDDDAGTEQRMHKFEQDLENMVPGKTHLHFPAYFDAYQMGLWNPAKSDELKLRSDCHAKTTRNQIVPRKLVEAEIRQMVEGAAKYYPALAGKADYLLYGIAQQSYASTKPELRKKFKLREGGATDWQGVVGQKIPRFENRIIAKCALIPRLNVCKLREGEKGQPHEKSLVAVEVAFLMKLKNLRVQRPGGNGWLSAKEIRDIIENPKRTDWKFTKSAWKKLCVSIGAIPLPGHEEIDSPRFSGRSRFCRPALEVLKRLILSGKKPSEFLQEEIARLNGNKDPLKGLVEADLKFISDMAAKNDSWEGIYIPNQQLDALVELSNNSDDAIKRLIGQQNDPIVRHRLSVFYKRLLELEQTTKSRPDQVVLEFVREDFMGKKAKIEYFSFIKRRAEERIKAREEAASVGATEKSAGLKLELLRAQDGCCLYTNEGLVPSKLDEYQIDHIVPRSKGGPDAVVNYVLTTQKANEAKADRTPYDWFHQEMPDKWDAYVNRVRARATHLRNKKVQLLIALNAAELANKYTALAETAWIAKLAQAIVGLHFGWRNGIDENGNKRITVISGGLTGRIRRKYALNTILNPNAKTEEEAEKKNRDDDRHHALDAMVISFIPSWVRDAMKEKFFRFPEPIHQNAKGFFEKEIQSVKPRNIALQKPAFEETIYGQRTIDGHKFIVGRESLASLAIKTTQNSETLKKVSDIEFGRIVDARIQKDMKEFWESNPTATLESWKKWCANYRLGANGPRVNFILVKKSKEDAVDEYKNVSKAGVSSERGQYKRGAKHRGYYIYERPAPTRKEPNKMQIEVCPVFVFQSKKAVQENLLKQSGIKMHGYFESGCQVRTKREWEFQGKKYPADEFILGSVWANRNAKLWHPIHQEVGPVGLRILLDAGFERI

SEQ ID NO: 1261 - protein, 1070 aa, unidentified
  REGION 1..1070: note = Description of Unknown: Cas Enzyme sequence
MKDYVLKEKPEAAEINGTVWAFDLGKGSIGEAVRRGTEFLHKASLLIPAEFAETKTAAGRRRMWRTRQAHKAREQWLEKVMRDAGIETLKGRQVGKVNGKWTETTKGDPRLEREFPAPGDDTCYTSCLLRIKLLRGEKLEPWQVFKAFHSAIQRRGYDKDIPWKTREARNAKKDDGEEDAGTEKRMHQFELALETMAPGKTEFKFPAYFDAWKMGLWNPAKPDELKNRTDCRAESTRNQIAPRKLVEAEIRKMVEGAAKHYPALAGKADFLLYGPAQQSYASYKPELREKFNLREGGATDWQGVVGQKLPRFENRIIAKCALIPRLNVCKLREGEKGQPHEKSLVAVEVAFLMKLKNLRIQRPGGIGWLSANEIRAILEDQRRKDWKITKSAWKKHCIGIGAIPLPGHEEIESPRFSGRSRFCRPALELLKRLVLSGQKPSEFLKDEIQRLNGNKNPLKGLVEADLKFIADMAAKKDTWEGLYIPNQQLEALSELANNSDAAIAHLIGQQNDPVVRHRLGVFYKRLSELEQATKSRPDQVVLEFVREDFMGKKAKLEYNSFIKRRAEERIKAREEAAQAGATEKSAGLKLELLRAQDGCCLYTNEGLIPSKLDEYQIEHIVPRSKGGPDAVVNYVLTSQKTNEAKGDRTPYDWFHQEMPDKWDAYVNRVRARATHLRNKKVQLLISPVAHELAERYTALAETAWIAKLAQAIVGLHFGWRNGVDENGNKRVTVISGGLTGRIRRKYALNQILNPNAKSEEEAERKNRDDDRHHALDAMVISFIPAWVRDALKEKFFRFPEPIHQNARGFFEKELASVIPQSLCFEKATLAETIYGARGNGEGLVIVQRSELLQLAFKSIAPGKTKFDLDYLGDQIKAVRDSRIQNLLAEFHGKLPDELAWKSFCEHFYLPQKDGSAGARVLSVLMNVGEPKEYKDLSKDGTGAWRKALKGHKGQIVYAETSVDKQGKTKERVQVRPVYAFESEVLVRKELLEEFGDKCRIIGFFQSGCLVEVDKPVPHAKQALPPGKYRLNTIRTDSKDVKVTTANGVTHPEIPRYNLGNMVAAGLKRAD

SEQ ID NO: 1262 - protein, 1584 aa, unidentified
  REGION 1..1584: note = Description of Unknown: Cas Enzyme sequence
MVWAFDLGKGSIGEAVRRGNEFLHKASLLIPAELGQRGPAAMSGTPASRYRMLQTRRAHKRREDWLDAVWEAAGLKPLVSRTVELVDFKTRKVKKTIHGKTRWKNKKVGGHWVLKNKADLLLEKEFGAHDDSTCYTSCLLRIKLLAGEKLETWQLYKALFSAIQKRGYAKVPWEKDQKGDDNKDAQEEAENAVAGKRWTDFSQHPDVVKLGDDFKRACYFDAWHMKLWNPTDPKRVELHSMERPESTQKVVFPGRIIAEEVLCLAENAAKQEARLNEAFGKVMADWRAKVSKRITRVNEHRARLGKSPLPEPDFSIGAKNFAELLVYGPGGSPKTVREGFRHIPSHDPDIRRAMGLRPGGIDDAMGALNQEVARFDNRLRAPCALIPRLSVCRNLAPDEILKIKENNHEKLLPAQVTFLMELKKLSVESVEKGESARKQRGLTAEELGEVFGKLNPQRKYHLTKREWRTWCRHFAVLAVTDPEEKNAAPKTDADAESGEKKKPDDLAVNRPRAAGRARFSRPALRLLKELLLRGSSPAAFHTKLVERNEELLNKLNLDVLDKEPVITKKDSRGNDYINYEKRTRPWLLVSDLDFLLRMAKDGKPADSWDNLFIPSQQLDRLAQESDASVAKRKEAIRNLIGEQNHPIVRHRLETFWKRLEKLEAKFGEPRSIVLEFVRDDSETSWLGAEASKEITAAQKKQRDRREMAKRMLAEMGKPNGDVLKYMLWEAQGGQCLYGKPAGNPQCPYTETALSFTDLHKYRIDHIVPRAKGGPDSFSNFILTTDEANAAKGDRTPWHWFRQDRSLADWDAYKERVLRRFHALGGKKVRLLLGADAENLVERYTPLAETAWIARLAQTIASLHFGWANGNDSEGKKRVITVSGGLTGRTRRKYFLNSLLGRDRELDKNISEKLAELAALRSSALPREEQKAKARILRAELDGLNADSEKARDDDRHHALDAMVLSFLEGWVNDPKREDEFRFALLGDNPTYPSSLEREIGQLKHKIIALGAVAEKATSGEERARINQQIIACRDALAGMRMERNALKVREAFRAEINGNEEKGIKPILPLWLHYPKPELAAALHRGVWLRVESASRAAHATIDDFDKAFEQERVSLVDLPYLENRITEELEFSVAHGLRRISEIVAHKDYDFKAVQAGVEGFLTTNPPETQWKEWCASSAAPAGIKPKKGQPDERQFNFYKIEEARTKRPQETPSARASLYSIGIGSNEVPEFDRTHFEIQVARLVCRPAKGTDKLAIPLQPDTELQNKLRALLPRIEEFYRQYPPDPGDRPRKESARAAWQAQKEAAAKAWDEFIKETGLDRNKRVYLSADSAVVTDRRYEPAGISSVLLHRVKRFDCAKAEKQAQSISDVWTRFQLREFLKQRPTPLQWKEFCATFVQVARPTFKEFLASQPQTADAFVDFYKKQADDTKLQSRTLIKAVHQVIGGADDYVDISKDGSGIYAKGGNSGYLMWKLIAAGGEVSYGAKAVRSFLRLADVKRQLLKQKGVELLDARPWQTDMLLHLPKDTQSGKKLVPTGYYYFGSISNGAYATLKPLAGGDVYDGISVASLLEHGLHRVEIETI

SEQ ID NO: 1263 - protein, 1319 aa, unidentified
  REGION 1..1319: note = Description of Unknown: Cas Enzyme sequence
MDAKEHALKTDGNSPSKKNEIVWAFDLGKGSIGEAVRQGKDFLHKASLLIPAELGRRGPATVSGTPANRYRAMKTREAHHERERWLEKVWTAVGLSPLRPREVWQNPKTDQWELKHPADYRLEREFAPAEFKRNPKTGELGKIVYPNGKAPKDGAPAAKKEDFEICYTSSLLRIRLLQRDKSLADWQIYKALRAALQCRGYGKVPWAAKEARKQGKTAEQLQLEEEKKLQQADPGYRQAVGRWPNFKWDIKKQKLPFFERIQPGKAERVHLQLQDNYYFVPPCYYDAWKMGLWNSDEGIRPSARHDHLATSTHNIRFDRADVRAELVILGDHAAAMLPAVQNAFLRWQREGWKYRHPATGEELIYPIHAKSFGEFLCDGPAGKPDETSFEAFLDQRQHARLHRGSFEEWMAALGQKTPSFDNRILNDCILIPRYHVCKVDVRLETDGDKGVTGKIVSDSLLATEVTLLLKLKNLLVTDAVAGQRKLTVEEVRSISAFAHRQLKSLSLLTADGDLVTGWPQKVADRFAINKSKWEKIAIESEFLGKISAYNISDAGKTRRLTADETELLLRLVSNPKKVLGDELPENLESIFKTAKSDWKKAKALANEKTLRPMPGHEEVKAPKTSGRSGYSRVALRILKELILSGESPSLFHARLLRRDAELLRKLGSSPDKPLELFDNSKATDERQRKLENMENRKRGLLVSELNFLRQMRQDNAAEDSWKDLFIPSQTLDALQQRHTENGKLNTDAAVRELLGNINDPIVRHRLEAFDHRLKKIQFGDQKEKLPGFGKPDAVVLEFVREDFMGEERLKKYQKFLNERAADRKKAKEEATKLGLESRSSGLRYELFKAQGCVCLYTGKPLSETRLDEYEIDHIVPRSLGGPDAVLNYVLTFQEVNHTKEKGKLTPFALLHGKEGWDAYVKRVEARATALRNKKVQLLTREDAPDLVERYTALAETAWVSKLAQTIVNLRFNWTNGYDQNRKKRVIVVSGGLTARVRRKYGLDKLLYKDDTDPEVLAKKLKNRDDKRHHALDAMVLTFIPQWARDPGKEGFFRFPEDFRDSNGREDYEQIRKLFGDHIKKVTPRHLAFERPVLADTIYGRRDNGCVMVKRSQVRSLAYKQEQMKPVFNLKYASGQIEAIRDARIKQELKKFVASEPSQSSWDTYCDKLGNGRLESMPGIKVSKVTLQLDEDPIEFKDLSKDGTGAFRTKKKEHRGQFVYLDSKGKPHAEAVRVFDSVQRVKMAIEAKGKGVHIIGFFQSMCLVELEKPVVHGNITLQPGIYKLNTIKKDGRAQLTSAGGEKSPEIGLVKFLASGFKRVD

SEQ ID NO: 1264 - protein, 1317 aa, unidentified
  REGION 1..1317: note = Description of Unknown: Cas Enzyme sequence
MKTYFLKEKPEPPSNDTVWAFDLGKGSIGEAVRRGNEFKHGESLLIPPELARRGPAKDSGTPANRYRALKTREAHHERERWLETVWTAIKLPVLRPREVWQNPETKKWELKHPADYQLEREFAPAEFSRDAKTGGQEKIVYPNGRAENDCAPAATPEDFDICYTSSLLRIKLLNGDSTLKDWQIYKALRAAIQCRGYGTVPWATKEARKQGKSAKELEQEEEKKLQQADPRYRDAVGRWPDFKRDLQKQNLPLFAGMQPSAAAKKYLRLPEDYYFVPPCYYDAWKMGLWNPAEPGKLLARSNHRANSTRNVRFDRIDVRAELIKLGDQAAALLPQIREAFAGWQRDGWNIRHPVTGAEKNYSVHAKTFGEFLCDGPAGQPDESSFEAFLQQREKAGLHRGSYEEWMAALGQKTPSFDNRILNNCTLIPRYHVCKVDVRLEAGKNGNITGRLVPESLLATEVTLLLKLKNLLVADPSAGQRKLTVEELTDIFAYAHRRLKALNLVTPDGELIKEWPTKVAARFGLNESDWNKIAAESEFLRKIKLFTVGSGGASRALTDEEEAGWLLRAVADSKGKTALELPENLKALFKAAKAEWKKAKTAVEQNHLRPMPGHEDVKAPRPSGRSGYSRVALRIIKELIISGQAPSVFHARLVQREAKLLGDLGSSPGKPLCLFNDSVVADKKQREREDTENRKRGLLVSELNFLLQMRRDNAAEDSWKNIFIPSQTIDALQQRHTHDDKLDADAAIRELLGTINDPIVRHRLEVFDKRLKKLQFGDAKENIPSFGVPDAIVLEFVREDFMGEKAKRELKDFQNKREAARKTAREETAKAGVTERSAPLRYELCMAQGGVCLYCGQTFSLAKFEDYAVDHIVPVGVQGPDAMVNKVLAHQECNEAKGRQTPFQWWHHNTSSKAPTISWDGYKALVEKNATTLRNKKVQLLTREDAPDLVERYTALAETAWVSKLAQTIANLRFGWTNGYDQNRKKRVIVVSGGLTARVRRKYGLDKLLYKKDTDIEAFAKKLKNRADKRHHALDAMVLTFIPQWARDPGKEGFFKFPAELGDYDQIRKLFDDSIAKVTPRYLAFEQPGLADTAYGQRDNGTMMVQRSLLRDLAYKSEQQKPVFNLTYAATQIKDVRDERIKKELLKFIATSPDKFAWDAFCNKFEKGELDSMRGIKVSKVLQNRKEAPSEFKDMSKDGTGAFRTRKEGHRGQFVYLDAKGKPRVEVVRVFDSIAKVKAEIEARGKGIRVIGFYQSLCLVKLDKPVVHGTVTLEPGTYQLNTIKKDGQGRAQVTSAGGEKSLEISLGKFLAAGFTRAD

SEQ ID NO: 1265 - protein, 1233 aa, unidentified
  REGION 1..1233: note = Description of Unknown: Cas Enzyme sequence
MNDYVLKSKPEPALNDIVWAFDLGRASIGEAVRRGNEFLHKASLLIPAEFAETKTAAGRRRMFRTREAHKARERWLNEVMRAAGIEILKGRQIGKIDDKGNVIPKSEWKKTKGKWVQIAKGDYRLEREFPPRKFQKNKDGKLELVIYPDGKAKDGAPAKTDEDFSTCYNSALLRIKLLRGEELKPWQVFKAFHSAMQKRGYGKVAWATREQKRLGKSEEEIEKALAKKDAAYREAVEAWPKFKQDVPDKRHHFPAYYDAVKMGLWKAGPPEVFLERTDCQAQSTRNVRFDRSDVEKEIRALVDGAAKHYHALTGKAEYLLYGPAGKSYASYYPDLREAHDLKEGGENDWQGVLGQKIPRFDNRIVNNCSLLPRFQVCTVHFRFDGKGLPKPESLLAAEVTFLWKLKNLRFTRGDQGFLSPEELKQIFDFPDPAGYRVEAKTWSKFAKQFKWDDSCLPKPIKFPKGKPQNREALTVWFAAQIADTQVLRENGSVEKLKPDEKASIFSEVLLRSYELTPSKLCVLLDDLGGKPLPAQNEVEASKPKGRSRFSRPALRLLREFVLKGLSPDEFRREQQTKIPMDADPKKGFVRDDLKSFCKERMGDSWQKAYIPNERLAMQVMRAGSTRKERDEAIRDLIGEQNDPIVRHRLNQFVIRLNKLQHGDAKEKLPGYGVPDYVVLEFVRDNLPESFLGQQAQFDYGKWARDRKNEAKEALEIVKELGCTSRDAVQKYLLLRSQGFQCVYFPNGSLNINATQKQLSDSPCVYTEQKIGLANLDDLVIDHIVPQQGGYNGPDAIVNKVVTTRHVNEQMKKCRTPFEWFQQDMPEKWAAYVKRVSSLQGMLGKKKVRLLTQPDASELVQKYTALAETAWISKLAQAILCIHFGWPFALDEERRRKITVISGGLTGRVRRMYNLNRVLNPDAETREEAEKKNRKDDRHHALDAMVISFIPSWARNEKKENFFRFPEPIHQNAKGFFETEIASVIPQSLCFEKSALAESIYGARGEGEDKVIVQRVELLKLAYTTVKQKQVFSLDYLGDQIKAVRDTYIQKLLAAFHATLPDEGAWKNFCEHFNLPRKDGSTGSRVLSVLMNVGQPKEYKDLSKDGTGSYRKALKGHKGQIVYVETSVDKKGEAKETAQVRPVYAFESQSQVSKELAEKFGDKCRVIGFFQSGCLVETKLEVPHAKKPLKSGVYRLNTIRADRQVQLTSADGKTYPDIPFFHISKLLTAGFKRV

SEQ ID NO: 1266 - protein, 1205 aa, unidentified
  REGION 1..1205: note = Description of Unknown: Cas Enzyme sequence
MDTKDYVLNKKPEPASNETVWAFDLGKGSIGEAVRRGNEFLHKASLLIPAEFAETKTAAGRRRMWRTRQAHKAREQWLEKVMRDAGIEVLKGRQVGKVDAEGKIIPKELWHKAKGKWVETAKGDPRLEREFPAPGDDTCYTSCLLRIKLLRGEKLEPWQVFKAFHSAIQKRGYGKVAWAAREQKRQGRSEEEIDKALAKKDPAYKAAVEAWSKKFKQEISDTRYHYPAYFDAAKMGLWKPGPPESFQERTDCQAQSTRNVRFDRADVEKEIRALVDGAAKHYPALAGKADYLLYGPAGKAYASYYPDLRKEFDLKEGGENDWQGVLGQKIPRFDNRIVNDCALLPRFQVCAVHFRFDTNGLPKPESLLPAEVAFLWKLKNLRFTRGGKEDSLTPDELKQIFDFPDPACYRVEAKTWGKFAKEFKWDDSCLPKAIKLTKGKPQSREKLVAWFAGQLDNIQVLRESGSVEKLNQQEKASIFSDVLFRSYELTESKLGVLLDDLGGKLLPAHIMVEPPKPKGRSRFSRPALRLLREFVLRGLSPDEFRHELEMKIPVDADLKKGLVRDDIKSFCKERMGDSWQRAYIPNERLAMQVMRAGSTPDERAKAIRDLIGEQNDPVVRHRLSEFATRLNKLQYGDEKEKLPGFGVPAYVALEFVRDNLPESFLGQQAQFDYGSWARKQQKEAKEALEIVKELGCKSRDSVQKYLLLRSQGFQCVYLPNGTLNIDATQQQLSDEPCIYTEQKIGLANLDDLVIDHIVPQQGGYNGPDAVVNKVVTTRHVNEQMKKCRTPFEWFQQDMPEKWAAYVRRVSSLQGTLGKKKMRLLTQADAPKLVQKYTALAETAWISKLAQAILCIHFGWPFALDEERRRKITVISGGLTGRIRRMYHLNRVLNPDAKTREEAEKKNRDDDRHHALDAMVISFIPGWARNEKKEDFFRFPEPIHKNAKGFFENEIQSVKPRNIAIQKPVFEDKFYGQRIISGHKFIVGREGLESLAIKKTQNIESIKKASDIEFGRIVDARIQKDMRAFWESNPVTTLDAWKKWCADYRLGKNGQQVKFVLVTKSKADAVEEYKNVSKAGDSSKRGEYKRGAKHRGYFIYESPAPTRKEPNKMQIEVCPVFVFQSKKVVQENLLKLAGIKIHGYFESGCQVRTQREWEFQKQKYPADEYILGSVWSDGRAKLRHPRFGEIGPIVLRVLLNAGIERI

SEQ ID NO: 1267 - protein, 1015 aa, unidentified
  REGION 1..1015: note = Description of Unknown: Cas Enzyme sequence
KKDPAYKAAVEAWSKIFKQEISDTRYHYPAFFDAAKMGLWKPGPPESFQARTDCQAQSTRNVRFDRADVEKEIRALVDGAAKHYPALAGKADYLLYGPAGKAYASYYPDLRKEFDLKEGGENDWQGVLGQKIPRFDNRIVNDCALLPRFQVCAVHFRFDTNGLPKPESLLPAEVAFLWKLKNLRFTRGGKEDSLTPDELKQIFDFPDPACYRVEAKTWGKFAKEFKWDDSCLPKAIKLTKGKPQSREKLVAWFAGQLDIIQVLRESGSVEKLNQQEKASIFSDVLFRSYELTESKLGALIKDEDGLNGIPLPAHKEVEPPKPKGRSRYSRPALRLLREFILTGLSPDEFRHELEAKIPVDADPKKGLVRDDIKSFCKARMGDSWQRAYIPNERLAMQVMRAGSTPDERAKAICDLIGDQNDPIVRHRLSEFATRLNKLQYGDEKEKLPGFGLPAYVALEFVRDNLPESFLGQQAQFDYGSWARERKKEAKDALEIVKELGCKTRDAVQKYLLLRSQGFQCVYLPNGTLNIDATQQQLSDAPCIYTEQKIGLANLDDLVIDHIVPQQGGYNGPDAVVNKVVTTRHVNEQMKKCRTPFEWFQQDMPEKWAAYVRRVSSLQGALGKKKVRLLTQADAPELVQKYTALAETAWISKLAQAILCIHFGWPFALDEERRRKITVISGGLTGRVRRTYDLNRVLNPDAKTREEAEKKNRDDNRHHALDAMVISFIPGWARDEKKKDFFRFPEPIHKNAKGFFEKEISSVVPQSLCFEKSALAETIYGARGEGEDKVIVQRSELLQLAFKSIAPGKTKFDLDYLGDQIKAVRDEHIQKLLAAFHATLPDEGAWKNFCEMFNLSHKDGSAGSRVLSVLMNVGQPKEYKDLSKDGTGSYRKALKGHKGQIVYVETSVDKKGGTKETAQVRPVYAFESQAQVAKELAERLGEKCCVIGFFQSGCLVEVDKPVFHVKQPLPPGKYRLNTIRTDSRDVKVTTADGKTHPEIPRYSLGNMIAAGFKRAD

SEQ ID NO: 1268 - protein, 1514 aa, unidentified
  REGION 1..1514: note = Description of Unknown: Cas Enzyme sequence
MNAIKKILPGTNPDLQLAFDVGHSSIGWAVLQNNNTSSANSLAMPDIRASGVLLFPADDCMASVRRQLRGQRRHTRATRKRIEQIAKLLLKLLHNKSEPNAAKLVEHLEHYLNPNPKNRAMLQGKGHPAPWLLAARVLRGGNLLDWPQLWDVLRWYAHNRGYDDNVPWARESESRSLSDQAQQAQEQDRKRQAQAIALMKRYGTEGTEPSMAETVFCYLFDEADSGHCDLDPRQVDQLPFFQRYFKEEECIFPREIVKAEVRQILNRHRAMVESAGISADTFIQALLENWRVLPKEFLGNPKAKDRIWLPKRYGTYTKRQFADGRVIEERTHAGLLFGQLIPRFENRIVSTCPFTFARLYGQFLNQGINEEQWKLLPKSWKSRITPNQSLPEETARHLARIAAKVPTKACQEFLQYRWAMLLADLTVRSKGNGVSRKLSATERKYLDNEMQKRGTLSIDELHELISTAALGCEAANLDDIFQETPERAKELFVDQAKNFAANDKYARELFPLLPERLHRRILNELRRGHSFKVSSLLELLKKFGYAKETSDFEAKVQWLQDAENLNAGKGRHSKSKKSAGKAKHRSIPILERILKLKPLSGRARYHRDILKKAAQEVLDGFDPNKKALVPQNPDDKSEQKAKDGCLVETPEMVSLALGHTSSAENAEAAFQNWLAKWRKKKNRKGKLANEALFQKRGEAYAREVYEARTSDQWLAAQTNNHLLRQRLLLMRRLTDDIIAEFADGKAERITGVVIEVARDLLAFSGMQKKDIGSDTKGALKSIKAQHYRVEEKMFKELRSEGKEYLINANLLWKGKVADDLDWKCPYTGSRIYPIDIALGTMDVDHIIPRSKRLTNAMEACVITYKEINQKKKNMTAREFVTRFQGKRIGGLNKEIRHINDYLNFVKTLKLCRPPKAKGQANGEPAANDDTQDDNTGALDLNPKYLPGTDRLHPDYVRRRKRQRLLKIKNASDEDLGFAKRDLTVTSHLNRLAQSALLRALPHLRPENFVSLPGVVTGSVRDMGGWQLLGVLGRPNVCGEKAMRKVKKINYETKEVERDPKTGEVLWKPIPRKKNEIRKLTHLHHAIDACTIGILAHVLPKDGKLWEYIAVGDLSEIQAADFRKRSDEFKWRGHPFSSLFTLVPISENEREEESEKPRTQRVKMVWNKQNKALLDKIKDSIGNAMEAKRVRLHIPAEQGGMPTNQTVYRILASLDTPGYIPQLARAVVSAKEQQLKRLEEAIANEKNKARLKKLTVERDALAKLLIKLKDFSQNVWLVNRTRAESENGKQILKRLKEYEDWRRRSNEAPIVEPADEADDEDLDVETEDEDKKNKKSNRKKREPNLLRPFNREKHKLLYTYDVVSRERVIGLPPDNKAEQARLLPLKAGKELGANFAAVILPPIEVGGEKQWRDGKEIIVLPFFQVHKSLGLLKAENKGKEIQLLRNGTLIQVPKGERQGWWRIISVKDTEAYGIAVDLANPDGVEKAKGNAPVSVLLADGMKIISSTLTGHDIRK

SEQ ID NO: 1269 - protein, 1108 aa, unidentified
  REGION 1..1108: note = Description of Unknown: Cas Enzyme sequence
MRYRVGVDLGTASIGLAAVSLNEEKQPDDLLWGKVRIFKEPLDNGTGGLKSKKATRRAARMQRRQFDRRRGRMRHIVALASLLGIDLAPAPDGGASVLELRARAARHPIALDDLMRVFLRLAKRRGYAGEFRPKKEGAKQGEVEGGSNDLKAAMSELATARGVESVTVGEFLQFRWQQGQPTRLKVKEKRSDDSNPLPNLYALRSQLEAEFAQIWRVQAEHHTVLNGEHDCQPLQEVFHAAIFHQRPLKSVSGMVGQCPLEPTLPRAPRAQPAFQHFRIEKTLVDLRWGAGRRAMTLTAKQKDVIRELLDKQKTVSFKSINETLKEKGHPGPDGRGLNMDRLSREELHGNTSNHAFNKLGLGPDWQALDERTQVQIINFLADLGSPEQLDAPLWYTCFVKQVKTGEKDVYGNPIYAQEPRAFSEKFIGFINRLKEQDEFGRLSGMGFDGGRASYSVKALRKLTEWLADPWWPGDWQGEKRIDEESAIRVCYPAARSQPKESLPRLPAPKPTGNAVVDVALRQLQQEFNAMIAALGATPEQIVVELTREMGVGVVKRNERESAMTKNQKARKDAEKAIREHGATVTPSRIRRYLLWREQGEKFCPYCDRTINLADALNGKETEYEHILPKSLTQVGLKRSEIVLAHRDCNQKKGNRTPWQAWGYDPNRWNLIEQRAAWFEKNKQDRKARLLRLKDFEKEVLTDQSIDDFADRQFHQASWIAKEAAQWLQGVCATPVSVSRGELTAAARRAWRLDTVIPQVRIEEGLPVLDEEGKVVTPEEFSRYKPVWEGHRLPKAEMDMNRKPDKRIDHRHHLIDAITLALTSRGLFQQMARTYKLESDQCAEGERPRLKIPEPPLHNVRELALKLIRACPLSIKPDRYPDGEIFEDTAYGIALKEGEDKPRLTRREQLSTLVDRKKGTVEQARKAIAAIVSDSIRAIVSEAFEKRIAEGKSAPAALAEPVFQELYGRKIPIRKVCCYRDKYAGEAVLIRHTSRNGKIHKKYLLNGGYAWLESELRDEKVVRQELVPIQRALRQKNQSCPDGVMRLHKGDTVQDSQDGKKYRVGYFTSEGKVFLVPITDPRAFDAIKESGSGKKRISFGQVGRLKVLG

SEQ ID NO: 1270 - protein, 1031 aa, unidentified
  REGION 1..1031: note = Description of Unknown: Cas Enzyme sequence
MSKSDRGLVFGIDLGKASCGLAIIDYEAKEVKLLSSRIIKAPENRSGKSLAAVRREKRSIRRQIDRRAARKKNVLKVLKQFGITPQDCDCKWFETKKNGNDGIDLPVIVLRSQGLDRQLSNREWARILYWFCSQRGYINRGEETLINGEVSTEVSSESEEAGKVLSAISENKKALKESGYRTFGEYLYKESYVSTRSYRNKAGDYKHCVSHLMVVDEIKELFEQQKKFGNTHTSEEFRDAYLEQLNWLKDTKAFDKLTYQKVGYCVYFDQYSDEPQKRAANADLISEVVKAYEKLGNIRLKFDDKPEQSLTREVRDAVINEMFSVHQGAKVKSVTYKTLRKLIDDDNLVGFKGVKSDLEKNPVFVPKAWNTFCRVLSGSESGIQLLNRMRCDFKFSNAIAESLTYASSLDSLERRISMYQEKESLIISEDELALIESLPYNTQIFKGYGSRSIHALEMLHDQFLDGEAFTLDEAEKQSGLQGFRLREKGIRQSLLLPYSDYDVQCTNPVVLRVLAQARRMINSAIKQYGTPNIIRIELGNDIAKSAKEKNKIAKGQNENRKENERIKDKIAELLHIDQSEVTGKQITKMKLYEEQGGKDIYTGEGLGDIAFAGGRRFLIDDNYCEIDHVLPYSRSADDLKSNKVLVLAKSNQEKGNRTPYEWMNSTDGSHPNWEQFRLRVSSNIRLSDGKKSKLLEENFAEKETSFIKRNMVDTQYMARAISAWLSDSLNFSSEFDQKQHVYAVNGRMTAKLRRKWGLNFGEDDTKDRSDNRHHAIDAAVIAACSASMVKEFAISCSRLREVRNSVIAEPWEGFADQVREAREWVIPTMYRPNKKNGLLFEESRYRYVEKKKKHILTSKEGKEKSSGNIRFFDDEKDGKHVKIVGNIAYIRLWLDESARKGKGEWLIEPVYFADMHSIKNGSYVPRYISASHVTSDEWKPIPEDVLSKIPPVVIHIQDVIQVDASYFRVDGVDINSKSLNLLPVFDDFEKSNPMLMKIGKWNKSTKVTRISEDALGLVWFIFLKNQNSSES

SEQ ID NO: 1271 - protein, 1027 aa, unidentified
  REGION 1..1027: note = Description of Unknown: Cas Enzyme sequence
MSKSDRGLVFGIDLGKASCGLAIIDYEAKEVKLLSSRIIKAPENRSGKSLAAVRREKRSIRRQIDRRAARKKNVLKVLKQFGITPQDCDCKWFETKKNGNDGIDLPVIVLRSQGLDRQLSNREWARILYWFCSQRGYINRGEETLINGEVSTEVSSESEEAGKVLSAISENKKALKESGYRTFGEYLYKESYVSTRSYRNKAGDYKHCVSHPIVVDEIKELFEQQKKFGNTHTSEEFRDAYLEQLNWLKDTKAFDKLTYQKVGYCVYFDQYSDEPQKRAANADLISEVVKAYEKLGNIRLKFDDKPEQSLTREVRDAVINEMFSVHQGAKVKSVTFKTLRKLIDDDNLVGFKGVKSDLEKNPVFVPKAWNTFCRVLSASESGIQLLNRMKNDFKLANAIAESLTYASSLDSLERRISMYQEKENLVISEDELALIESLPYNTKIFKGYGSRSVQALEMLHDQFSDGEAFTLDEAEKQSGLQGFRLREKGIRQSLLPPYSDYDVQCTNPVVLRVLAQARRMINSAIKQYGMPNIIRIELGNDIAKSAKEKSKIAKGQNENRKENERIKDKVAKLLHIDQSEVTGKQITKMKLYEEQGGKDIYTGESLGDIAFAGGRRFLIDDNYCEIDHVLPYSRSADDLKSNKVLVLAKSNQEKGNRTPYEWMNSNDGSYPNWEQFCLRVLSNVRLSDGKKSKLLEENFAEKETSFIKRNMVDTQYMARAISAWLSDSLNFSSEFDQKQHVYAVNGRMTAKLRRKWGLNFGEDDTKDRSDNRHHAIDAAVIAACSASMVKEFAISYSRLREVRDSVIAEPWEGFADQVREAREWVIPTMYRPNKKNGLIYEETKYKYLGKEVGDKRIVHILKGKKQGVGTVDLFRDPTGGQFARILGDRAYIRLWLDEEGKSRRGEWLIEPVYFADLDKIKRGSYVPRYIPRQKVTTQEWEPIPSRITENSIPIVLRNDDIVRIDGIYGRLSGLDINSKRLKFDRILSKDVKTIGSWTKDTSVEVIHEDCLGLMWFNLLKDQNSKES

SEQ ID NO: 1272 - protein, 1066 aa, unidentified
  REGION 1..1066: note = Description of Unknown: Cas Enzyme sequence
MKILKYRLGFDLGYTSIGWAALKLDDNYQAQDIMDFGVRIFPSGRDAKSFAPTSTIRREKRGARRNRDRYLKRRHRLLKLMIELGLQPANKKARQTLAQKEPLAIRAQAVKEKVDLYDLGRALFHINQRRGFKSNRIADRKDDSDTNSGLLGGVDNLASLLSEKGLYLGEYLYARLRNGKHTRLKAGANQYDMWTSRKMYLDEFNQILETQKKYYPETLTDSNIEKLKSGIFFQRNLKPQEPGFCSLLDGKKRARLAYPESQLFRIYQEVNNLEIIAENTSTPRISRENRTDIVTHLTEDFSQLSKKNFLSWTKIQKIIGIKGVKFNLEALARGGLKANTTDILLEKALDSKWHKFSAAQKRNLIDTLLTSQSNKELKKELARISEIISINFTENETENLTALQGLKEGFGRVSLAAIDLILPHLKKGLIYDKACKAAGINHSDDRTGEVFDELPYYGEVLAKSVIGGTFNKKDIPEKRFGKINNPTVHMALNQFKVVINDLVKRFGGPPAEIHLEMARDTSMSTDELKEHLRQQTKNKKKNDEINAQLRKAGAQENYQNRMKYRLWEDLHKSPESRCCPLSGKPINMDNLFSHQVEVEHIIPFSISFDDGRNNKMLCYKSANQDKGNRTPFQAFGMSPKPYVWNEILARAKEMPYPKYRRFLPDAIEWFKGSDEGQYIARQLADSRYMSKAARKYAEAITPEVTTIKGKYTSDLRHVWGLERFTHNLIDGKPTKDRTNHHHHAIDALVVALADIRTMQKVALANRGKKKYSSKQWLKDIGIPYPKFNHQQIQEKLESMIISHKPDHKNPELARKTGTSIGQLHEDTSYGHITENIFATRKELSADNFSKQKNIEVIAASHIKAELQNIFDKYYDKEKRKLKDKKAYEQDLENYKTKANIKRLRIHLNKPDLISIQDKDGNPYRYVVGGNNFCAEIYCNQKGEKAGKWQSEVIQNYFANQKGFVPRWRQNNATAYKVMRLQINDMLAINKNGKRIICRVQKLSAKGIIVLRFHNDSETDQKTQISSAASSLQTMNARKLFVSPSGKIYDPGTARKPKNNNVNSGNK

SEQ ID NO: 1273 - protein, 1051 aa, unidentified
  REGION 1..1051: note = Description of Unknown: Cas Enzyme sequence
MKKYRLGIDLGATSLGWCMIELNEENSPKDLIELGVRIFPDGRDAKTNEPLNVKRREHRSMRRNRDRYLQRRAYLMDILVKYGFMPENEKERKQLEHLDPYFLRVKALDKKITLYEVGRIIFHLNQRRGFKSNRKLDNAEKDSSRMKEAIKELKQKFKEDGTRTLGEYLFNLNITKNREQNRRIPIRIRDHGKEYNLYTERSMYENEFDMIWDKQSEYHSELMEQKKEHLKQIIFFQRPLKPQPKGKCRFELDQPRCPVAFPVYQQFRIYQEVNNLILFDFDRNEHELTSAQRETITQILLKQKSATFKSLRKKLGKEFAGDYVFNLESEKRKDLKGDETSFIMRKADYFDEKWDSFTELEKDEVITRLINEDNDLEIENTLVSWLCDTFKITKENAEKIKDIRLPQGIGSVSKKAINKILPYLKEGYIYSDACSNAGYHHSDFRTGEVYDEGDLPYYGKIIPHAVAFGTDDPNDIDEIQYGKIANPTVHIALNQMRKFINALTKKCGAPSQIVVELARELKLGQKRLREIEKEQSMNRKHNEEIADEIKKLGIENTYQNRLKYKLWEELDSDPAKRCCPYTGRQIPLNAVDGLFSNKFEIEHILPKSKIFDDRPANKTVSYYQANRFKGERSLFDAFGENPENYNWEKILDRGEKLPRNKRWRFYPDAMKNFQDQGELISRMLTDTQYMSRVAKEYMSYVCGDKNVWAIPGKLTAKFRAKWGLNELLSENKEKNRADNRHHAVDAFVVACTDRGMLQKVARATEKSRERFIEKMPLPFEDFSHDEMQKKVNNIVVSYKPDHGNAKSAITDCKQKGKRKTVGQLHDETAYGFVSENEEKGKITLSIRKPLTSLYSIKNIQEIASTKIRNELVKLTDAIPQKEIKAILSQYSEKTGIKRAKIHVEKDAKTVIAILNKKGEVYKYYLSGNNYCADIYSPNKGKKAGKWQVEIIPMYYAHQPNFEPEWHKKYPTAKKIMRLFKNDYVAYDEDGERKIRRVKKMNVDGRIFFIDTKIAISDKGINATSVKQLQDRNARKIGVDILGRVYDNKKEK

SEQ ID NO: 1274 - protein, 1370 aa, unidentified
  REGION 1..1370: note = Description of Unknown: Cas Enzyme sequence
MKKSYSIGLDIGTNSVGWAVVNDDYKVPAKKMRVFGDTDRSHIKKNLLGTLLFDDGNTAESRRLKRTARRRYTRRRNRILYLQEIFIESMNEIDESFFHRLDDSFLVPEDKRGSKYPIFATLEEEKEYHKKFPTIYHLRKHLADSKEKTDLRLIYLALAHMIKYRGHFLYEESFDIKNNDIQKIFNEFISIYDNTFEGSSLSGQNAQVEAIFTDKISKSAKRERVLKLFSDEKSTGLFSEFLKLIVGNQADFKKHFDLDEKAPLQFSKDTYDEDLENLLGQIGDGFADLFLVAKKLYDAILLSGILTVTDPSTKAPLSASMIERYENHQEDLAALKQFIKNNLSEKYAEVFSDQSKDGYAGFIDGKTTQEAFYKYIKNLLSKLEGADYFLNKIEREDFLRKQRTFDNGSIPHQIHLQEMNAILRRQGEHYLFLKENREKIEKILTFRIPYYVGPLARGNRDFAWLTRNSDQAILPWNFEEVVDKASSAEDFINKMTNYDLYLPEEKVLPKHSLLYETFAVYNELTKVKFIAEGLRDYQFLDSGQKKQIVNQLFKEKRKVTGKDIIHYLHNVDGYDGIELKGIEKQFNASLSTYHDLLKIIKDKEFMDDPKNEEILENIVHTLTIFEDREMIKQRLAQYDTLFDEKVIKALTRRHYTGWGKLSAKLINGICDKQTGDTILDFLIDDDKINRNFMQLINDDGLSFKEIIQKAQVVGKTDDVKQVVQELPGSPAIKKGILQSIKIVDELVKIMGHAPESIVIEMARENQTTARGKKNSQQRYKRIEDALKNLAPGLDSNILKENPTDNIQLQNDRLFLYYLQNGKDMYTGKALDIKQLSNYDIDHIIPQAFIKDDSLDNRVLTSSKDNRGKSDNVPSIEVVQKRKAFWQQLLDSKLISERKFNNLTKAERGGLDERDKVGFIKRQLVETRQITKHVAQLLDARFNTEVNEENQKIRTVKIITLKSNLVSNFRKEFGLYKVREINDYHHAHDAYLNAVVAKAILKKYPKLEPEFVYGDYQKYDLKRYISKSKVSNTIDKATEKYFFYSNLLNFFKEKVRYADGTIKKRENIEYSNDTGEIAWNKEKDFATIKKVLSLPQVNIVKKREVKTGGFSKESILPKGNSDKLIPRKTKDILWDTTKYGGVDSPVIAYSILLIADIEKGKAKKLKTVKTLVGITIMEKAAFEENPITFLENKGYHNVRKENILCLPKYSLFELENGRRRMLASAKELQKGNEIVLPVYLTTLLYHSKNAHKLDEPGHLEYIQKHRNEFKDLLNLVSEFSQKYVLAEANLEKIKNLYADNEQADIEILANSFINLLTFTALGAPAAFKFFGKDVDRKRYTTVSEILNATLIHQSITGLYETRIDLSKLGED

SEQ ID NO: 1275 - protein, 1056 aa, unidentified
  REGION 1..1056: note = Description of Unknown: Cas Enzyme sequence
MPKQKSTRYRLALDLGSTSLGWAVLRLNEQHEPNAIIRAGVRIFSNGRNPKDGSSLAVTRRAARAMRRRRDRLLKRKARMMNKLVEYGFFPADVAERKKLERINPYELRAKGLDAPLTPGEFARALFHINQRRGFKSNRKTDKKENDSGALKAAISHLRQQLHERKARTVGEWLWQRLQAGLGTRARYRESRVAQANGKTRIEKSYDLYVDRQMIAEEFDALWAAQAAFNPQQFSEQARGELRDVLLFQRDLRPVRPGRCTLLPDEERAPLALPSTQRFRILQEANHLRLLHPDLHEEPLSLAQRDAVVDVLERNSKRTFEQLRKLLKLNGTVKFNLEDEKRKELKGNATSATLSKDGLFGENWWKLDEALQDAIVWQLVSEQSEEKLQNWLQANTGVNATQAETIANAGLPEGYGSLSYKALARIIPALRGTEVANGIDVPRTYDQAVQAAGFAHHSDLDSGFDFEHSHDEVERIGERVIASTGEVKPVFAFKQLPYYGKALRRHVAFAKEHPRNEEERYGKIANPTVHIGLNQLRVVVNALIRRYGRPTEVVVELARDLKQSREQRQEEQKRQADYQKRNERIRREIASMHGCAEERVSHADVQKWILWEELSFDVADRRCPYSGVQISAQMLLSNQVEIEHILPFSQTLDNSLNNRTVAMRQANRIKGNRTPWQAREDFERQGWSYDSILQRAERMPKAKRYRFSRDGYERWLKEDKDFLARALNDTRYLSRVAKTYMELVCPLGTRVIPGQMTALLRAKFGLNDVLGLNGEKNRDDHRHHAVDACVIGVTDQGLLQRFAQASADARGNGLEKLVENMPVPWATYRDHVKRAIQCIWVSHKPDHGYEGPMMEETAYGIRKDGSIRQKTKADGSTGRAITNLIRIIEPTQKLRHGVDAQGQPLAYKGYVGGSNDCIEITQNAQGKWEGNVITTFQAYDIVRRLGSKQGPRRLRHPTLAQALDAYGKPKKLVMRLMIDDCVRLELDGNEKTLRVVKITGNGQVFMAPVHEANVDKRNSDKTDPFAYVSKYAGSFQKAKARRITISPIGELHDPGF

SEQ ID NO: 1276 - protein, 1004 aa, unidentified
  REGION 1..1004: note = Description of Unknown: Cas Enzyme sequence
MRRRRDRLLRRKARMVNKLVEYGFFPADPAERKALELQNPYELRAKGLHEALTPREFGRAVFHLNQRRGFKSNRKTDKGESDAGALKSAIVHLREDIQAQGLQTVGELLWQRMQAGKGTRARYREARVPKDDGKTRIEKSYDLYIDRQMIADEFDALWRKQASLNPTHYTDAARDDLRDTLLYQRKLRPVTPGRCTLLPELARAPLALPSTQRFRILQEVNHLRLLDERLQERPLTEEQRDRIVAALEQAHKVTFKGIRKLLKLGGVVQFNLEDEKRPELKGNATSATLSRDEHFGARWFELDTALQDDIVLQLLNEESEDKLVDWLAQHTGVDDARARKIANAGLPEGYGSLSREALARILPALRACEVVDGVARPRTYDKAVLAAGFAHHSVLAVEAEPHEYDLREVVDSATGEIKQQQVFKALPYYGKALQRHVAFGSGNPEDTEEKRFGKIANPTVHIGLNQVRLVVNALIRRYGHPTEVVVELARDLKQSREQKQETQKKQAENQRRNERIRREIATIRGIEPFNVKIADIQKWILWEELSFDVADRRCPYSGVQISASMVLKDEVEIEHILPFSQTLDDSLNNRTVAMRSANRVKGNRTPWDAREDFEHQDWSYDGILLRAERMPKGKRYRFAADGYEQWLRDDKGFLARALNDTRYLSRIAKEYLTLICPGSGVRVIPGQMTAMLRRRFGLNDVLGMDGEKNRDDHRHHAVDACVIGVTDQGLLQRFAQASADARNKGLDRLVEQMPLPWPTYRDHVARAVRHIWVSHRPDHGHEGAMHNDTAYGLLGAGKVTVHKRIEGKRERTEENLKVIAFANEKAPHGTNRPWFGSAHHKPAKPYKGYKGDSNYCIEIVRNEKGKWEGEVISTFEAYQLERKLRAAYRNQHGKSERAPSFLELLGNTESISKKPLVMRLMRDDMVRLVHGGVLMTLRIATIKTNGQILFAPHQESNVDARNRDKDDPFSYVSKTPGSLFASQGRRVTVSPIGDLRDPGWKSAE

SEQ ID NO: 1277 - protein, 1043 aa, unidentified
  REGION 1..1043: note = Description of Unknown: Cas Enzyme sequence
MDKGHQIRYRLSLDLGATSLGWAILRLNPAGVPTAIIKAGVRIFSDGRNPKDGSSLAVTRREARAMRRRRDRLLKRKARMMRLLVEHGLFPEDAAARKVLERQNPYELRARGLHEALTAGQFARALFHLNQRRGFKSNRKTDRADNDSGALKTAIKQLREQLAVSGCQTVGELLWKRLQAGQGTRARYREAPLVTDDGKKRIDKSYDFYVDRQMVADEFDALWAKQAALNPALFTESARDALRDALLYQRKLRPVTPGRCTLLPDEARAPLALPSQQRFRILQEVNHLRLLDADLTESVLSLAQRDAIVALLEASAKVTFKAMRKKLKLGDVVRFNLEDDKRTELKGNATSAVLSRKHLFGDQWASFEPALQDEIVSRLVTEESEAALVQWLCESTGVDEPRATAIAEAGLPDGYGRLSRAALARIVPALQADVITYDKAVQAAGFAHHSDLGFDFEHDSSDVELIGERTIESTGEIKPVYVFKQLPYYGKALQRHVAFAKENPRNDEERYGKIANPTVHIGLNQVRVVVNALIKRYGRPTEVVVELARDLKQSREQKLETQKRQADNQKRNQRIRKAIAEVLGCSEERVKHANIQKWILWEELSFDVADRRCPYSGVQISAHMLLGEEVEIEHILPFSQTLDDTLNNKTVAMRQANRIKRNRTPWAARADFEAQGWSYDAILQRAERMPLRKRYRFAPDGYERWLGEDKGFLARALNDTKYLSRVAAEYLRLVCPGSGVRVIPGQLTGMLRWHLGLNDVLGLDGEKNRNDHRHHAVDACVIGVTDQALLQRFARASDLTREEGRTKLAKDFEPPWPTYREHVKRAIDNIWVSHKPDHGYEGAMMEETSYGIGRNGTVKQKRKADGSAGREVRNLIVITESDQPQRHGVDDEGAPLPYKGYVGGSNYCIEITANDKGKWEGQVISTFEAYRIVRKSGFQQLRNPSSGQNGRPLVMRLVIGDSVRLVLGERPEILRVVKISGSTGQVFMAPLHEANVDARNRNKESGFAYTSKMAGSLQSGQAKQVSVSPVGDMNVSGFLRPEP

SEQ ID NO: 1278 - protein, 1124 aa, unidentified
  REGION 1..1124: note = Description of Unknown: Cas Enzyme sequence
MKILSLDLGVTSCGYSVMKDLGENSFSLLDYGVVMRDNPYDGGTQKDRREKKQSRELLKKKKRRILLVRNLFASFSLDFQEEQNYDIWKLRAIDAYQRKLDNDELFAIFRFMAKHRGYKSLKIEDLIAEIEAKEKIGNCQSDEIVTPSDLENFSETLAYLDALKCKEENKTATQIIWELESQKINPTFRNHNNYRYMIRREDIEKEINFIIEAQQKFHLIESEERSQQFIKELQTIIIPQEAVVLNPENINNCLIYKEEKCAPTFSYSFDMFNLYKLISDLKIDGIDATTEQKEELLSTLLNEINRFTCKASYSVKDFKKILGIENEYVKINNFQEYKMLKGKKEQNQLIKFNMLHSFKKLNHEMLHVIFQNSAYIEIFDAIATQIHLNVNPEKLLEAVKIVFQKYNLDFSDDAILKFTLQLHKDKSKGTTSYSLKALKNLTELMKEGKNESSAKEILGVGKSEDYSHFLKGIQYLKPQSKKGELQYELDENRISNHVVKSLVSWALRVVIDLHGKYGPFDVIKLESTRELSQSDDVKRDIKRANDKNEKEWQGLIKKYTKHFEAKGLNPQNNKEYILKLKLWEQQKEFGIYSHKVLSVDEVLSDKTEIEHIVPRACGGSNAEYNKAIDIKDENAQKGNKLPLDYLTGEKREIYTNFVKELKDAKKINFKKFKNLMAEELKDAYKEVKDDVSLHATSYMEKLLGEILKRYYPFTNLLKENQRVMSISGRATSYLRRILSIDNKSRDTNFHHAEDAILLGLMSKSYLQNISTNFEKNYELTEQNAKENFKKIVPLLEGASPNQIFAHIRESYMQDVEESPFYKALDGTLKTPAFWVSKKPIGTEVHRSTIQQDKELNPYYVPYAKFIDDFLDPKKIKFNYQLNVEKFSKHFDEYFLNKLYVYVTNPNDFTSKAFLLKKQEIVDVLKKANFATSKDEQIQFNNILKTIIKEPIKDVNGNLPRRIRRVGEKSEYKIRKGVALTSPSMIAMRCSVESKNRLFTERISFRDKDILNKNDGEFIDIFNNDLIDICTFEKKKVTHKLIGLLRTFVINAKQDKMLKVKNPKYPIREDAQPKQYNNYVAVKKMCGIKKYKTDATGRVLGFYYLGRVIDDEKELFAKVLSYKAL

SEQ ID NO: 1279 - protein, 1117 aa, unidentified
  REGION 1..1117: note = Description of Unknown: Cas Enzyme sequence
MKILSLDLGVTSCGYSVMQELEKNSYSLLDYGVVMRDNPHDGGTQQERREKKQSRSLLDKKKKRIKSIKQLFTSHNLIYKEKNRYDIWKLRAIDAFERKLDNDELFAIFRFMAKHRGYKSLKIEDLIAELEAKEKIGDCQSDEIQVPKDLEKFSETLAYLDALKCKHKDKTAAQIIWELESKKESPTFRNHGNYRYMIRREDIKKEIEKILEAQQKFDFFESDELATKFANEVINIIIPQEAVTLNPENINKCLIYKDEISAPLFSYSFDMFQLYKLLGDLKIDGASATLEQKEQLREALLEDINSLKCKSSYSVKDFKKILGIDNEYVKINNFQEYKMLKGKKEANTLVKFNFLPSFKKLNNDILNTILREKSVVEIFDAIATEIHLNVNPEKLLTNIEILFKKYNLEFSKDETRDFTLALHKNKVSGTSNYSIKALKDLTVLIQEGKNESNAKEILGVSKSENYSHFLKGIRYLKPQSKDGKLQYEIDENRISNHVVKSLVSWALRVIIDLHDKYGSFDIIKLESTRELSQPDDVKRDIKAANDRNEKEWQELIEKYKKHFEAKELNPQNNKEYLLKLKLWEQQRELGIYSHKPLSIDEVLSDKTEIEHIVPRACGGSNAEYNKALDLKDENAKKGNKLPLDYLSGDKREIYINFVEELKKGYKINMKKKINLLAESLDKTFKEVKDDVSLHATSYTEKLLGEILKRYYPFTDRLKENQRAMSISGRATSYLRRILSVDNKSRDTNFHHAEDAILLGLMSKSYLQNISTNFEKNYELTEQNAKENFKKIVPLIEGTSPNHIIAHIRESYMQNMEENPFYKVLDGTLKTPAFWVSKKPIGTKAHNETIQSKKNLAYYVPVASLLDKVKPNHKMSTDEFYQKFNKEIYEKIQVAQDNPKDFTAKVFAQKRDTIVNILNQSAFASTKDEKAELDKKLRDVMSEPLYDVNGNEIRRVKRVGEKVSIPIRNGVAGNAPSMLAMRCQAESENRLFTQRIDFKDKILLEKNDGRFIDIYNNDLVDIYTFEKKEVLLKLTGLLRTFVINAKEDKMLKVKNPKFPIREDAQPKQYNNYVAVKKMCGIKKYKTDATGKVLGFYYLGRVLDDEKELFAKILSYKAL

SEQ ID NO: 1280 - protein, 1037 aa, unidentified
  REGION 1..1037: note = Description of Unknown: Cas Enzyme sequence
MLRLGLDLGTNSIGWAFLKLDDDNNPSAIVDGGVLIHPDGRNPKDKSSNASKRRLHRGTRRNRDRMLKRRRNLANLLHDLHLLAPTSDEQFRLDQQNPLELRALALDQPLQAYKLGRVFMTLVNRRGFKSNRKADTGEDGKIRQEIGELKRRIAQSRSRTLGEYLWKRHKKGKPIRARLGNGLYPDRAMFIEEIQKIVESQKPHHQNLADEDWKDIENILVYQRPLLPVERGWCSLLPGEKRAYKAYPYFQTYRIINEVLNIEVALPGQGYRQLNRDEIFLVVEALKNSPKKSFDQIINLLKLPEETRVNLQTDARDSLDGDKTAAVLRSKKRLGKAKWQLLALEEQQALVERLIEEEDQDVLVKWLIEEFDVDADAAIAIASAPLPPGTAAFSKKALEKLIPVMEDQGLRYHDAVTEAGLGHHSNKLETEKFDFLPYYGQALPNQVIGANSKGTSEQDKFGKIGNPTVHIAMNQLRHLYNAICKKHGKPDEVIIELARDLKSTNDQKKRYMLENKRNKERNDRLKEDASKVLNGAEPTPHQMRKLRLWDEQGPISARVCPFSNTSLSIERVLGDSIEIEHILPFSRSLDDSMNNLVLASRDANREKGNNSPYERWGGSDPDKYAAILKRAQLLPLGKRWRFDPDAMERFESKNDFLSRQLNETRYLSRISREYLTTVLPQNKVWVTQGRMTAMLRRGWGLNSVLGDSNTKDRTDHRHHLVDAIAIGLTSRSLLNNIAKLSERIVDNEGGRIGSTINDPWDNFRNDVRKCLENCVVRHRQKTFKFSKNNTTGSLHNDTAYGIVEGPDENGMMILVERKPLNDLTPKRLEDVRDLTLRDKLLSLWRQMEEANPNHKDNWKKFCKEASTDRNIKTSKVRVLLKLNQSSLAYISRSKNSEIYKVYKTDGNAYMDIWLLPDGSIKGETISRYSAYQSVEQSPIKTAHPTARKLMRLNTNDTIATGEGDERQIYRIQVLSGQSIIAVLHNEGGNLRERERTKDTETKYVPLRTSARPFVTAGYRKVSIDYTGDIKDGGPIHL

SEQ ID NO: 1281 - protein, 1013 aa, unidentified
  REGION 1..1013: note = Description of Unknown: Cas Enzyme sequence
MPSKHKTILGLDLGPTSVGWSLLSLLVNDEGNVSRNDDGQIVEARIIDSGVRIFPATTEDKTNAPKNHKRRSARLQRRQIRRKAARKMELKRILQKADLLPEIKDTNSAKVLNSLGDPYQLRVRALSQRLEPFELGRALYHLSKRRGFLSNRKSAKSKEDGVVYDGIKAIRAELESGKFRTLGELLSTKEKKRKYFTHRTMIEEEFEQIWAAQKPHHPHVLTDQLKSEIRKIIFYQRPLKLQRGLIGRCTFETDKKRCDLARQDAQRIRYWQDINNLQLQDPQSLDWRPLKDTEKELIANECEKVKEITYKRIRKLLRVGEDVRINLEANDKKFYGNRTGFVMRKALGDKWDAFNAEEQDRLIEEMIRIDTETALRKRLSGFWGFSEEEVESLERAWFDLEDGYSKLSLKAIRKVLPLMQEGMRYDEAVRLIYGDHRRQYGSEEFQKLSLPPKELRNPIVFKALCEVRKVVNAIIREYGRPDEIHVEMARDLKLTNKQKEAATKQANLNKKANEEADRFFYEHFGIGKEAVSGNDRLKYRLWKESDERCPYTGKQIPADALLDDGLVDIEHIIPYSKCFDDSYMNKTICDARFNREVKRNRAPAEIFDHESPEYQELLLRIKSLPFAKQRKFKMTAEEIEHPERFSKNKKDWIGRQLSDTRYICREVRGYLRQLYPPSPDENKYVQVVSGGATANLRKVWGINSILADGDVDEKNRWDHRHHAIDAIVVALCDRGLFQYISRLAARNREMMKRALSGIPEPWEGFRNDVNDAVQKIIVSHAPLRRKRGQLLEETAYGPTGTEGIYVTRKPLESMTHAAIKNIVDPVVKGIVELRLSQYNGDIKKAFSEPLFHKDGKTQIKTVRIFVTMSPETLVGINDETGKAYKFYPLAGNHHVDIFENIDSGERKAILVPRYHVNQKNWKPKDLGPEWNKLFSLCANDYVEFRGNDNRLSFYRVQKMSGGSQLRIDIRPLNDARKDYLPGLTYALTSSEALKRITRKLNVDPLGRLTQARD

SEQ ID NO: 1282 - protein, 1449 aa, unidentified
  REGION 1..1449: note = Description of Unknown: Cas Enzyme sequence
VAKRKNNNTPPLPGIDIPLSTGEKSRRSSILDALSAQESDIGRFSLHPDAAERIKRLEDLAPEKIKGGELSLALDLGVTSVGFALYRHESIKKEEGTPPPALADYGVYMFDSHYTGKSGESKQKIRRLKAAQRRIIRLKRYRRWVIYNALSGVFGDLDFSYADNVCPGDAFLKLRGEDAFTTRLSPKELFCLFRNLSKVRGYAPMTRDDRIMMIAREYGFDEFLPKKKQSKTGKKSNKGGGKQGTKDKDDSLSTLSGLTRYESFVEKYGDELRERFGTVTPGMISYRLSREGERSSLRNYGGKEKITVAREETEKEINAIFDAQERLGGWPTDERGKEARKAITEAIIRQDLPEFPETRKGFTGYSLSADIFQFLKKTNDISLKKIVEIEDEKHGGKKRKKISIWEALGDAEGEECLRSARESLFGYLSDLLQGEKRIEKEKDQEGKIFYSDVREVCAKSGSCLSDPDVLIYGEEDTRVVVTKKKGSKEEEATEIHNVFASFRLLHLLPSMPTLLAHIGAPAAFTEEGFVIDYDVLEKWDELSETASSGVPSIKRFEKLIDSVVGDESVDEETRRALARDLLFFMQKKNGKPVSYTREVLYALLGKMAEGIPEHEAKEMIADEVDGIETEENYSGFEKSLDLIAPEKLLKRYESDYDDQITNHGVKKIINRAIEVVRAASEIYGPLSEVVIESGRELRDKLSKQQSNRSKDRQDALRKEAESRLKELGISTAEKNVKKMKMLIAQRWFDPYLLHDRKKRIIRVGSQADLDALEIDHLVPRAFGGSSMFENMVVTRQYHNQKKGKRLPSDYMSSVLSPDEYQEWRRLVADYTYTPQKKSGTKGKGKDGTRSFDRELLSPKTRDILLAESMEDVERVISIGNKNMLQATMYAEKLLGRVLKMYYPFAGKTEEETFRRRAKGTGVRYVSGRIVQNVRYRFVPGLKKSRESNLHHIEDAVIAGLTDRSLLNRVTRDLRKAYEKMIAEGKSEIDKEAIVPKEKVAPRVLDRNGEEVSLKELIWRIRDGYFFFWMPNGPRPKEEEEFTPLYRELDITETMDFYIGAGGKIRAVSWYFRPGATDGTAIHEDTVIGIKVFDGEKFQIKRVPAGEGGDKNTFFGDYFFKKLKKLTPLLNKGLDTPLSREEILAEVEKAVSEEWEKTLAHFEMGRGVKGLDYERTYGACNLIKKKMVDFIDGIPDLYERLAEEEAEEEVKGRKVRQKRGADEAKKVVESLMRETIKKALKKKGLYSRKISLLLEKTSVSTKGVKVGAGYAEKTTDFIGLGVSPSLKECRCVEIVRLSSPDFERFRKKYREENIIWRGHYFSASPIKEPKKKLHGLLKSARRKKREEEPCTSFLVTRFCPLFPSAPPMQPKGKDIGIVRGDNSSLSEKTISLGKKEDIVRIEKLMFGSAFARVLGLIDLDECGIEGIKRADEMICSGKERSDGGVEKSIP

SEQ ID NO: 1283 - protein, 1069 aa, unidentified
  REGION 1..1069: note = Description of Unknown: Cas Enzyme sequence
MVQRYVLGLDMGTNSIGWAAVRLDGQNKPSGILGMGARIFSDGRDPQSKASRAVDRRIARGMRRRRDRYLRRRTALLETLTVLELMPGDETARNEIQKLDPYELRARALDAPLKPYELGRALFHLNQRRGFKSNRKADAGSSEDSQDGTTWASISELRTRISESGSRTLGEYLSSRKRKGRFVRARAYTYGLFPDRALYENEYDAIRKSQEHHHSLKPAQWDQIRQIIFHQRPLKPVEPGWCLFEEGEHRAPRALPAAQDFRIVQEVNNIKVRQPGDGSERFLTADERAMCVRHLRHSTALKFDRMLKILGLEHNTEVNLGRGGRESLKGDETSAVMRRRATKKRAALFGKSWDELPFGKHTDIVRTLLDEEDRSAVIEKAKTNWGLDGQSADALAAVRLPTGHMNLSVKAIEKLLPHMENDGFGLYEAVAEVPEYTHHSDFRPDTAYDELPYYGRVMPQDVFGANPDAPEKDEVARFGRLANPTVHIGLNQLRRVVNKLIEVYGKPEKIVVELARDLKLPPARINELNKTNRENQAANERRAQSLRDEGIAVTGDAIRRLRLWEEQGPPQARRCPYTGKNISFAMAISAATEIDHILPRSRTLDDSYSNKVLCISDANRRKGDRSPFEAFGADQASYDAIVVRTREFPQNKRWRFKSDAMDRFEDQEKFLDRQLNETMYLSPTTRTYLAHLYNEKKERRRRVDAVPGRLTAALRRGWGLDSLLNQIDDSGKTDDKPEARGRQGKQRSDHRHHAIDAFVVAVTSPALVKVMSEAAGQLPDVYDNRPLSKIASMLSPWNGFSRETLRPHVERIVVSHRQDHGTRGIPGKTSGQLHNETAYGLVEEIGDGRWRVAVRKSLVSFTRRTNVEAVRDPAMREALLGLWDSVVDDGLKPAEFAANAATGVQVNGRSFKVRTVRTTEEQRVIVIRDSSGKPYKGYKPDANEFAELWRLPDDEYQLTVVRRFDANRPGFDQSSLRPHPAARKLMRLQINDCVRSNDGPVELLRVCKITAGGPGYLYLAPVNEANVAARVTKGELKYVLKSGRQLGRGDFRKVGVDEIGRVLDPHRLS

SEQ ID NO: 1284 - protein, 1060 aa, unidentified
  REGION 1..1060: note = Description of Unknown: Cas Enzyme sequence
MKYRLGIDLGSTSLGWCIMALDKENRPSSIIDMGVRIFPDGRDDKTKEPLAVARRGARGMRRNLDRRDLRQKRLMTFMIENGLMPKDEKARKELESLDPYELRAKALDKEIPLHHLGRALFHINQRRGFKSNRKTDKRENDSSAMKNAIKDLDAKLLQTNSRTLGEYLYSQHQEKEPVRVKARMVGNKNQYNFYPGREMYLHEIEKILERQKTFNKELTGEVCDEIKDIIFYQRNLKPPAIGKCRFEPNELRIRKAHPLFQKFRILQDLNHLELVSMMEGDPALDEDDKKKILLALMSAKKKSFHQLRTLLKLSRDCRFNLESERRSELKGNETGSFLSDDKCFGSRWRELPIDQQEAVINLLFNEPDPDELVHKLITGWDLTQEQAEEIANAPLEDGYAALSRKAIEKMLPHLESGLIYSEAAEKAGYHHSDFRTGEIYDRLPYYGEVLPNAVIGGSYEVQDKEKPERYFGKLNNPTVHIALNQVRKLVNALIDAYGHPEEIVIELARDLKEPVDDVIADQTKNKKDNDRINKELEKLGVKQNYANRMQFKLWEDLAKDPIKRCCPFSGSQISETDIFSGAFEIEHLLPFSKSFNDGRGNKVLSSRHSNREKDNRTPYEAFSSKPEWPEILARIQNMPTSKQWRFKEDCWEIAKGQGEDIIARQLNDTRYMAKLAKQYLSAVFDNEKGKSKVWAIPGQMTSLLRDKWGLNDLLGEEDGAKDRTDHRHHAIDAAIVACTDRGTFKILADAARKLEEKESLWEKRRKLVTGMEEPFNGFRHQVAQKLEKLIISYKPDHGGAKQAIHAPRPYTVAGLHKSSAYGLIRKGEKKGTVVVAERVSLESLEKLSSIEEVADPVIRANLLKAVEGLKEKSADWKQALAGYSQKTGTKRVRIHFEKTEDVMIPVNQPEDRGPEKTRGKPYKYYALGGNYCVEIYCPDKGKKAGQWQCEIISNYHAHQKGFIPNWKKERDNVTAKLIMRLHINDMVAYEEDGELKICRVKKMTSGMIYLRPHIIAKEEADKLSWAASAKQLQLKNARKIAVDTLGRVKDPQAKKQAKAA

SEQ ID NO: 1285 - protein, 1101 aa, unidentified
  REGION 1..1101: note = Description of Unknown: Cas Enzyme sequence
MGINIGLDIGIASVGLAVVDSDTGNVLETVADLFNCAEVSENVKRREFRQARRLKRRQHTRLEDFKKLWGAEGFIIPKNINLYSLELKVRALQEKITMDELYVVLYNSLKHRGISYLDDFEESTEGGSEYQKGIQINQQELETKYPCQIQLERFKKYGAYRGQIIVEENGDKTVLSNVYAFSAYKKEIDTILEAQSKYYPELTNDFIEKYQRIFSRKRKYYEGPGTEKSRTDYGIYTTRIDKSTGNYITEENIFEKLIGKCSVFPEEMRAAAASYSAQEFNLLNDLNNLTIGGRKLEEEEKRQIVETIKNSQRVNVEKIICTVSGENAETIEGARIKGDKHIYHSFEAYRKMKKALSEAGKNIEEYERAELDEIGRILTLNTEHESIEKELIDSGIGMSKEEIDSLINLRKEDGKPFSKWHSFSLKLLNILIPEMYEQPKEQMTLLSEMKLLKSSDELYKGLKYIPQEAMTNEIYNPVVVRSARIAVKALNAVIKKYGNPELVVIEMPRDKNDEEQKQRIKQEQSRNEKELKEIIDKIKSEYGIQVTSAHFRNHKQLALKLKLWNEQEGICLYSGKQIDINQLLTASDMYEIDHIIPLSISFNDSRNNKVLVYATENQEKGQTTPYKYLTMLHRGWGWNEYVAKVNELHRKKNINYKKVENLLFMKDITKIDVLKGFINRNLNDTRYASRVVLNTLQSFFRANETGTKVSVICGAYTSQMRKNMRLDKNREESFAHHAVDALLIVYSQMGYNTFRKLQGEFIDFETGEILNPEMWKENMTDEVYEKCLYGQEGQKWLEIRNNIKEAEKHVKYWHKVDKKCNRALCNQTIYGTRNLDGGVYKISKIKDIRSIDGYKKFAEMIKKGKQNSFLMARNDPKTFASLLEICERYKDAKNPFVQYEKETGDWVRRYAKKNNGPKIVSLKYVDGEVNSCIDVSHKYGYERNSRKVILASLNPYRMDVYYNKNDSKYYLIGIKQSDVKFEAGKSVIDEEAYTRILQQEKMLQEGQGRADLEKLGYEFRLSFYRNNIIQYEKGGEIFTERFQSRTMPTQRNYIETKPVDRAKFNRQNLVGLGKTTSIKKVHVDILGNQYITEKEIFSFEC

SEQ ID NO: 1286 - protein, 1101 aa, unidentified
  REGION 1..1101: note = Description of Unknown: Cas Enzyme sequence
MGINVGMDIGIASVGIAVVDSETGNILEAAADLFECAEASKNAERREFRQARRLKRRQHTRLEDFKKLWVGMGFIIPENINIYPIELKVRALRGEITMDELYVVLYSSLKHRGISYLDDFEGTVEGGSEYQKGIQINQQQLETKYPCEIQLERIKKYGAYRGNIIAEENGEKAVLSNVYTFSAYEKEIAAILDSQKKYHSELTNDFIEKYQKIFGRKRKYYEGPGSEKSRTDYGIYTTKIDKSTGNYIKEDNIFEKLIGKCSVFLEEMRAAAASYSAQEFNLLNDLNNLTIGGRKLEEEEKRQIVETVKNSQRVNVEKIICTVSGEDAETIEGARIKDDKHIYHSFEAYRKMKKALSEAGKNIEEYERAELDEIGRILTLNTEHESIEKELIDSGIGMSKEGIDSLINLRKEDGKPFSKWHSFSLKLLNILIPEMYKQPKEQMTLLSEMKLLKSSDELYKGLKYIPQEAMTNEIYNPVVVRSARIAVKALNAVIKKYGNPELVVIEMPRDKNDEEQKQRIKQEQSRNEKELKEIIDKIKSEYGIQVTSAHFRNHKQLALKLKLWNEQEGICLYSGKQIDINQLLTASDMYEIDHIIPLSISFNDSRNNKVLVYATENQEKGQTTPYKYLTMLHRGWGWNEYVAKVNELHRKKNINYKKVENLLFMKDITKIDVLKGFINRNLNDTRYASRVVLNTLQSFFRANETGTKVSVICGAYTSQMRKNMRLDKNREESFAHHAVDALLIVYSQMRYNTFRKLQGEFIDFETGEILNPEMWKENMTDEVYEKCLYGQEGQKWLEIRNNIKETEKHVKYWHKVDKKCNRALCNQTIYGTRNLDGGVYKISKIKDIRSIDGYKKFADMIKKGKQNSFLMARNDPKTFASLLEICERYKDAKNPFVQYEKETGDWVRRYAKKNNGPKIVSLKYVDGEVNSCIDVSHKYGYERNSRKVILASLNPYRMDVFYNKNDSKYYLIGIKQSDVKFEAGKSVIDEEAYTRILQQEKMLQEGQGRADLEKLGYEFRLSFYRNNIIQYEKGGEIFTERFQSRTMPAQRNYIETKPVDRAKFNRQNLVGLGKTMSIKKVHVDILGNQYITEKETFSFEC

SEQ ID NO: 1287 - protein, 1104 aa, unidentified
  REGION 1..1104: note = Description of Unknown: Cas Enzyme sequence
MQYIVALDIGVASVGFAVIDKKTETVIEAGSNIFPEASATDNQMRRGMRQARRLKRRKRTRLDDFTKLWEEYAFAIPQVQETDIVGLKVKALRESISLDELYLILYSYLKYRGISYLEDAEDTSLSGTSAYANGLKLNAKELETNYPCEIQKQRLEQVGKYRGQIQIEDAQGEKLDLSNVFTIGAYTKEIQQVLCTQKNYHSEISDEFCEDYLEIFTRKRKYYEGPGNEKSRTDYGRFTTRLDENGDYITEKNIFEKLIGKCSVYKEELRAASASYTAQEFNLLNDLNNLTINGRKLEEHEKRIIIDKVKTSNTINMRKIIADVMGEKIEEFYGARIDKSEKEIFHKMEVYNKMRKTLAEIHVNIEEFSRENLDEIGYILTINTDKEAMMEAFEHANVKLSEEIKDCLISLRKTNGALFSKWHSFSLKIMKELIPEMYQQPKEQMTLLTEMGVMRGQTDKFEKNKYIPVDAADEDIFNPVVRRAVRISFKILNALMKKYGTLEEVVIEMPRDRNSEEQKKWEKERQKKNEKELAYIEKKLAAEYNILLSPTDFSNQKQLGLKLKLWNEQDGKCLYSGKTIEPEDLIKHSELFQIDHIIPRSISFDDSRNNKVLVYGEENQKKGNQTPYYYLTHANNEWSFDRYKAIVMDLSKKKEYGISKKKVQNLLYSEDITKAEVLRGFINRNINDTGYAARVVLNTVQGYFRAKEINTKVKVIRGSYTYQMRVNMKLDKNREESYAHHAVDAMLIAFSQLGYEAYRKLQGEFIDFETGEILNAEKWNAQMSDEIYEQYLYGKKWSNIRTQITKAEKQVKYWYHVDHKSNRGLCNQTIRGTRTYEGKTYKINKLDIRTKEGAALFKKLAFSEKESDREKLLVYKNDKKTYENLIQIAQEYSDSNNPFVQYEKETGDCVRKYAKNHNGPRIDKLKYTDGEVGSCIDISHKYGYEKGSQKVVLESLVPYRMDVYYKKEEQTYYLVGIKQSDVKCDNGEYVIDEDAYAINLVREKMIQPGQKRGDLEALGFEFQLSFYKNDIIEYEKDGEIVRERFLSRTMPKVKNYIETKPIDRAKYEKQKLVGLSKTKMIRKYRMDILGNYYMCSRENFSKYC

SEQ ID NO: 1288 - protein, 1108 aa, unidentified
  REGION 1..1108: note = Description of Unknown: Cas Enzyme sequence
MSYSIGIDIGVASVGMAMVDENEKIFDAVSSIFEEADASSNVDRRTFRGGRRTKRRKKNRIDDFKKLWEKYGYIIPEKNEIDIVQLRNKGLKEVLSMNELYSVLLYMLKHRGISYLDDAIDDTKGSAYEKGLMLNQKSLENKLPCEIQLERLQKYGKYRGDYVVDREGESEYHSNVFTISSYVKEIETIFENQKNMGNILPEEFISEYITIFKRKREYYIGPGNELSRTDYGIYTTKLDENGKYHTDDNIFEKLIGKCSVYPEEFRASGASYTAQEFNVLNDLNNLTINNEKLTEDEKRKIVEDIKNANTVNMRTIIKKVLGEEIEQFSGARIDKSEKEIFHTFETYRKMKKNLQLIDFNIEELSREELDKIGDILTLNTEKDGIKKAFKTSQLCLDDNVIDNLIIFRKKNSTLFSKWQSLSYKAMQELIPEMYLQPKEQMQLLTEMKVGNVKNEKYKGYEYIPVEEVIKEIYNPVVVRSIRMTVKMINKSIKKYGYPDEIVIEMPRDKNTEEQKKRINKIQKENEKEYANILKKLFDEYGIEISKSDYRKQKNLPLKLKLWNEQEGRCPYSGKKIAIESLLNDSELFEIDHIIPLSISFDDSRNNKVLVYRLENQVKGNNTPYMYLNGLNREWNFDRYKNYVLDLKKRKLISERKANNLLFMQDINKIDVLKGFINRNLNDTRYASKVILNELQAFFKAKEECNTKIKVIRGSFTHQMRVNLQIEKNRDESYSHHAVDAMLIAFSQKGYEAYKKIQEACYDFETGEIINQEKWNKCIDDEEYEQVVYNSKWGKIKNEILEAEKKVKYHHRVDEKCNRSLCKQTIYGTRVKDGEIYKIYSYNIYDDKECANLIKMIKDGKETKLLMFNNDIKTYNDMVKIIKQYPNEKNPFVAYNKETGDYFRKYAKKHNGPKIEKVKYYKEKVAGCIDISHKYGYEKESKKVILGDLNPYRTDVYYNKETGVYYLIGVKYNHIKCDGNKYKIVIEKYNELLRNAGALGEDDSFEDLEKLNIEYKFTLYKNDIIRYEKNGEYFTERFLSRTMEQNKNYIETKPIDKTFFKQKNKNGEWKNKQNLVGLGKTKYVGKIVTDVLGNSYTVDKEKFSFIIEK

SEQ ID NO: 1289 - protein, 1108 aa, unidentified
  REGION 1..1108: note = Description of Unknown: Cas Enzyme sequence
MKYDIGIDIGVASTGIAIVDEEGKVLEATSSLYSEADAASNVERRNFRDSRRTKRRQHTRIEDFKKLWNAYGYSIPESLDNNVIGLRNKGIIEKISMDQLYAVLLTMLKHRGISYLDDAIDETKSSNYAKGIALNQKELADKLPCEIQAERLEKYGKYRGDSIIKNGEEEEYHSNVFTISAYKKELEKLFDTQSKFNFEITPEFQEAYMKIFSRKREYYEGPGNEMSRTDYGIYTTKKGEDGKYITEKNIFEKLIGKCSIYPDQLRASGASYTAQEFNVLNDLNNLTINNRKLNEEEKRKIVDIIKESNSVNMRSIIKKVIKEDIEQFSGARIDKKEKEIYHTFEVYRKMKKAFEAIDVDINVFSREELDQIGDILTLNTEKDGIIKAFENSDKNYSKEIIDTLVDLRKKNSSLFSKWHSFSFKAMKNLIPDMYEQSKEQMQLLTEMGVFKQKTSKYYDYKYIPVEKVIEEIYNPVVVRSIRTTVKMINEAIKKYGYPENIVIEMPRDKNSTEEKEKIKKAQAKNEKEYESILKKIYDEYGIEITKADYRRQEKLPLKLKLWNEQSGKCLYSGKPISVEDILDNPQLFEIDHIIPKSISFDDSRNNKVLVYRAENQKKGNQTPYMYLSNLDREWNFDQYKNYVLEMKKKNGIANKKVQNFLFMEDINKIDVLKGFISRNLNDTRYASRVVLNELQSFFRAKEDCSTKVKVIRGSFTHQMRVNLRLEKNRDESYSHHAVDAMLIVFSQRGYDAYRKLQETCFDFETGEILNKEKWDECLEEDKYDQILYEAKWSKIKEEIQEAEKKVKYHYRVDKKCNRGLCNQTIYGTRMRNGEPYKICSFNIYDDKECAALLKMIEKGKESDILMYNNDIKTYQDMLKIIKEYSSEKNPFVAYNKETGDYFRKYSKKHNGPKIEKIKYYKEKVVSCIDISHKYGYEKGSKKVILGSLNPYRTDVFVNKTTGEYYLVGVKHNHIKCKGNLYVIDEESYNKLLLNAGAINEGETLKDLERLNIVYKFSLYKNDIIQYEKNGEFYTERFLSRTMEQKKNYIETKPIDKPFFKKVEKDGQIKNKQNLVGLGKTKFVGKLVTDALGNEYKVEQEKFSLVVDK

SEQ ID NO: 1290 - protein, 1104 aa, unidentified
  REGION 1..1104: note = Description of Unknown: Cas Enzyme sequence
MKLILALDIGIASVGWAVLDKESETVLEAGSNIFPEASAAGNQVRREMRQARRIKRRQRTRLDDFNKLWRKNNLSIPQYKSTEIVNLKVKALREEISLDELYLILYSYLKHRGISYLEDAQDDSLSSSNAYTNGLKENAKALEKHYPCEIQRDRLQTIGKYRGQTQITDDNNEKIDLSNVFTIGAYRKEIKKVLETQKLYHNELTDELCDDYILIFNRKRKYYEGPGNEKSRTDYGRFTTRLDQNGNYIDEENIFEKLIGKCSVYPDELRGAAASYTAQEFNLLNDLNNLTINGRKLEESEKHAIVQRIKTSNTVNMRKIIADCMGETIENFSGARIDKSGKEQFHKFETYNKMRKSLSEIGTDIDEFSRDELDKIGYIMTINTDKEALMEAFNESGLNLDDSVKECLISFRKANSSSFSKWQSFSLKIMNELIPEMYIQPKEQMTLLTEMGVAKGSSGDFAGLNYIPVDVISDEIYNPVVRRSVRISFKILNAVLKKYKVLDTIVIEMPRDRNSDEERKRITDSQKLNEKEMEFIEGKLAQIYNIKLSSSDFSSQKQLSLKLKLWNEQDGICLYSGRTIDPEDIIKNPDLFEIDHIIPRSISFDDSRSNKVLVYRSENQKKGNQTPYFYITHSNGAWTYEQFKANVMNLSKKKEYAISRKKVQNLLYSEDITKRDVLKGFINRNINDTGYASRVVLNTVQNFFKAKEADTKVKVIKGSYTHQMRSNMKLDKNRDESYSHHAVDAMLMGFSEMGYEAYRRLQGEFIDFETGEILKNDMWNEKMSDDVYVDYLYGRKWSAIRNEIVKAEKDVKFWHFIVRKSNQGLCNQTIRGTREYDGKKYKINKFDIRTKEGIKLFKKLAFSEKESDREKLLVYLNDRQTFNNLVKIFEDYEDAPNPFVQYEKETGDVVRKYSKRHNGPRIDKLKYKDGEVGACIDISHKYGLEKDSRKVILESLVPYRMDVYYKESDKMYYLVGVKQSDIKSQNGANVIDEDLYTGILINEKMIEPGQSRDDLEQLGYEFRFSFYKNDIIEYEREGKVFVERFVSRTMPKVRNYIETKPINKANFEKRNPVGLGKTKSIKKYRTDILGNRYLCEKEKFTKFC

SEQ ID NO: 1291 - protein, 1110 aa, unidentified
  REGION 1..1110: note = Description of Unknown: Cas Enzyme sequence
MGIRFALDIGVASVGWAVVNDEYVVLESGVNIFPCADASKNAERRNFRQLKRLHRRRKNRVSDFEKLWQEENLEIPKNNQINVLQLRVKGLSEKLTQEELFWVLKNELLHRGISYLDDALEEGAANESDYKKALERNQTELKQNEYPCIIQQKRFENYGEYRGNRSLETDGESISLSNVFTTNSYKKEIQAILKRQKEFHLFLTEKFQDKYIEIFSRKRKYYEGPGNEKSRTNYGKYTLRINPKTGEYITEKNIFEKLIGKCTIYKDQVRAAGASYTAQEFNLLNDLNNLTVNNRKLTEEEKRNVVNEVKTAKSVNIKRILKKVMGEDIETLTGLVLDKNDKEKIHSFEQYNLMRRAFEKNGWNIEKYTREELDRIGEILTLNTEKEGIIAAFQNKDNQDDFKMINISDEQIECLIELRRKNSAKFSKWQNFSLKLMKEIIPDLYENSKNQMQILTEKKLLKNNKEKYKEYTYLPEEDIIEQIYNPVVVRAIRITIRVVNALLKKYGSPRQIIVEMPRDKNEEEQKKKIKDAQKKNEKELDDIIKQIKEEYGIAITEQHFYHHKKLGLKLKLWKEQNEQCLYSGKKIEIYDLLNDQKKFEIDHIIPRSISFDDSRSNKVLVYSSENQQKGNLTPYLYLRGLKREWNFDRFKAVVVELNKKKSITKNKLDKLLCMENITKQDVLQGFVERNINDTRYASRVVLNALQDYFYSHEANTSVRVVRGSFTHQMRVALELNKDRDESFMHHAVDAMLMCYSQMGYETFHRQQKKLIDIETGEILDVEEWDKLMDDEKCTEIMYQQKRMRIIREIKVAQSRVKYWFKVDKKPNRGLCNQTIYGTRNVDGETYKINKLNLYNAKDVATIRKMIAENQQSKFLMYDLDRKTWDGLIKILEEYSDSKNPFLDYEKETGDAFRKYAKKHNGPKVVKLKYKKEKVGSCIDISHKYGFEKGSQKVLLDSLTPYRTDVYYQPETKQYFLVGLKHSDFKFEGGRYLISEEAYNQVLIAEKVIKEGQTRKDLEKMGIEFCLTFYENDIIQYEKGGKLHKERFLSRTMPRSRNYIEKKPLERQKWEENKLRLVGLANTKTIRKIRTDILGNQYVCEREKFRLEVDC

SEQ ID NO: 1292 - protein, 1387 aa, unidentified
  REGION 1..1387: note = Description of Unknown: Cas Enzyme sequence
MKNKNYFIGLDIGTDSVGYAVTDTAAQYNLLKSCGEPMWGVTLFDKGNLCDNRRAHRVERRRIDRRQQRILLLQELFAPAVSEVDVNFYKRIKESALVRTDSEEPYCLFNDKNYTDADYHRQYPTIHHLIAELISDSTAHDVRLVYIACAWLLAHRGHFLSDISTDNVNELRDFGSSYYGLMNFLQEYSQESDYRAPWVLDENGVKEFGEILKQKGVNRKIVRLQTLLNDGKKFKKKAGDETAFPFSIEGIIRLLCGGTYPLADLYSNPAYSDFGSVCLSADDESMENVIAALGDDGELIIRLKAIFDWAILDDLLNNCSYISQAKVNIYEQHRADLRYLKEFVRKNYPAETYNKIFRKFDKNNYVAYCGNIKNCPDTDKYKKCLSREDLCKYLRNVLELDNGTGENAIDPEILNRIRNNDFLPKQVSTENRVIPYQVYYVELKKILENASGYLPFLKEKDADGYVTREKILSIMRFRIPYYVGPLNKNNNEHAWIVRREGESGRILPWNFEKKVDLDASNEEFIKRMTNTCSYLAGEEVLPKSSLLYSRFEVLSEINNLKINGVSIDIKEKQMIFCDLFMKKKKVTPKAVKEYLIRSNMCSKQDAETLSGIDVDIKSSLSSRIAFERLLASGALTEADAEKIIKAKTYTEDKNRFNKWLGENFGYLTADDRKYIGNLKFKDFGRLSKTLLSGITGRKIDSETGEIGSAENTVIGFMWESNATLSELLLSEKYTFAQTIQQMNAEYYSKHPKTLEDRMKDMYISNAVKRPIIRTFDVVNDIVKVMGGAPEKIFVEMARGGDKEKKNKRTVSRKQQLLDLYKSIRDTDLREIAGELEISLEKEEENRLQSKRLFLYYTQLGRCMYSREPIDIRALMNGNKEYNIDHIYPQAKVTDDSIINNKVLVLSKINGDKKDIYPINREIQSKMHGFWSKLKANGLIGEEKYNRLTRTKGFSQEEEWGFINRQLVETRQSTKAVATLLAEKYPDTQIVYVKAGMVSDFRQEYKLPKSRALNDLHHAKDAYLNVVCGNVYHEHFTRQWFLKNRSNYTVNMKKLLEGPVYGGGVRVWDGASSIAAVKRTMLKNNCHMTFYSVMKKHGQNGGFFDQNPLRAGKGSVPRKADLPVEKYGGYNGLTTAFSVLVHYQLGKKPVAEFVPVALINAERFLADSDYALNGYIRQHLDPKAADIKLLLGGRPVKIGTEFALDGLHMLFGGQGTNDTRIGMKVFTPLVLPEQDVQYVKAVESFVQKTEENEKIEYSENETVSKDRNIALYDLLIEKYSSRPYSLRPENQCIKLTKGRDTKRQDTEEREIKGRDKFIALGVKEQCVVLLHVLSQFNRTVIADPTLKLTDKCRLPSILNGWKYGDVRIIDRSASGLWKKTSDNLMELI

SEQ ID NO: 1293 - protein, 1134 aa, unidentified
  REGION 1..1134: note = Description of Unknown: Cas Enzyme sequence
MIKILGIDVGTQSLGWALISANKDNDFNAIIDSGVVIFPKGNNEDKQGKEFSRSQARTTFRGTRRLRQRRKLIKYRIVNFFKQYNVDIENEIFFENKTNQSSDPMRLYSLRNQALYEKLTLHEIAQLLVFFNNKRGFKSNRKNQEKDEDKGKVKESIKSLYEKLAIEHSETLGQYYYNLIQAHRRGERLQERILGNYTARQMYVDEVEKIWQKQSEFYPEILNEEHYNSLIKKGIFYQRNLKSQKHLISKCTFEPEKRVAPKSHPIFQSYRLLTNLHNIKINYADGNLRTLSENEVIDIFNAIKYLAVINEKSNYDVAKTRSAIKKQVSSILKLGKKDKLTDIELIPLTTEIRIKQALGETFFNTLNEENLLNLHHCLHFFEDDEKLKFWIKNKYHVNDEQAENFANIVLEQDYASISVKACNKLLPYLAQGFSLTNAKAQVYMDGEKNKSKRGENPNKHYQEWLNDNPIKKDKISYYNFNELRNPVVQKSLSECIGVVNAITAKYDKPDLIRVELARDLKKPRSERDEIKQKQSFTEEKREQLALFLNNKKIFQKQVSKFDSIIDKYLLWLELGNDDSKLNEQIEEVKKVKKLKKPKDLLSKFSYWLECNRQCPYTGDIISLSDLFSGKYEIEHILPYSRSLDNSQSNKTLSQRAFNQQKGNQTPMEYFETQGKQALEQFKKRIAHFNESKREKFLCTDNLNDDFTNNQIADTAYTARLLKNKLKEILPQNQIQITKGGITSLLRKFWKLNHLLHIDLSISNEKLLQTLKNRKDHRHHAIDAIVIACTSRQIINIVNKHTHFRDNTDIVFKNDKNNKAGLHIENSILKAPWFGFVEDVHESINNILVNYRFRKRLVQQKTNRIKTKEKGKFIEQKAIGVRDVMHAETVMGKMLTCDENQYVKTKPINTFTEAKHLESIVDKPLRDFLQQLVIIHGIGILKSNSIQWPENHTGRILRNVKIFEKSNSMIEIRKGAFVEPDNNFCIAIYEGETETMKKGVSTITTKRDYEVVSFYKAVQKKLNGELLFPKSKNGLALKMSLKQGDMVVMYKTSPDEIDWDKKKNIFDSTYKLVKMNQTNGQIIFSKHFLANTNADKDANPVILRPNYNTLNCIKIKLNRLGEIYWRSDIGYLDKK

SEQ ID NO: 1294 - protein, 1003 aa, unidentified
  REGION 1..1003: note = Description of Unknown: Cas Enzyme sequence
MSSKMRYRLALDLGTTSIGWAMLRLDQQDRPCAVIRAGVRIFNDGRVPKTGEALAVQRRLARQQRRTRDRSLRRKNKLINMLVRFGFFPENLAERKSLERLNPYELRAKGLEHQLKPEEFARALFHLAQRRGFKSNRKTDRGDAESGVMKTAIVETKQEIETLGCRTIGEYLYKRLQAGLGTRARLRDKPKVKGGATKSYDLYLERSQVETEFDALWDVQSRFAPELFTQEKREALRDTIFHQRDLRPVKPGRCTLFPEEERAPLALPSQQRFRICQEVNNLRKIDEHLCSIELTQTEKAKLVQALSGARKKTFEQLRKVIGYEGQFNLEEAGAGRADLKGNETAVVIGKIIGKDWLKYSLSEQDKLVLMLLNIESESELIGKLQEEFDLSEAVAKKLSGAPLVNGYGSLSRKAIDLILPFLEQGMTYDKAVAAADIPSHSDLTWQVKSDELMDQLPYYGEVLQRHVGFGTGNPEDAPEVRFGKIANPTVHICLNQLRLIVNLIIKRYGNPDGVVIEVARDLKLSREKKNEIVRKQKKNQEKREQVRKEIAAILECDETLVTSEDIEKWLLWEELNPGNALDRRCPYTGRQISAVDLLSKAFEIEHILPRSRTLDDSRANKTVSYWEANRLKSNLTPWEAREIFEAHGWNYEDILKRAENLPPNKRYRFGADGYKTWLREDSDFLARELTDTQYISRIAREYVSFVCPRNTYVIPGRMTAMLRHCLGLNTILSDDDKKNRNDHRHHAVDACVIGITDRSLLNKIAALSARGEEQNDRKFQRSVEEPWRGFRESVCRAVERINVSHRPEHSYEGQMHDQTAYPIDKNGQGWKKEVKSNGQTEWKKISVIPIVSQKAAQRHGYLSDGTLRPYKGYSGNSNFCIEITVNEKGKWQAEFVTTYDAYQIARKSGKDKLYGKESQSGHKLVMRLMKKDVVAMEDVDGCRRLYLLHKFSTNGVLSFAPINESNVSARVTEGSFKYVSKTAGSLQRAKARQVMLSPLGDRS

SEQ ID NO: 1295 - protein, 1100 aa, unidentified
  REGION 1..1100: note = Description of Unknown: Cas Enzyme sequence
MRYRVGLDVGTASLGVAAISLDKQGQPTDLVWKHVRIFDEPLESGQAGLKSKKAGRRTARMQRRQIDRRKSRTKQIAQLAPLLGINMQASPDSGRTLLEIRAKAAREKIDLSDLIRVFIRIGKRRGYAGEFRGKKEGAKLGEVESGSSDLKKELKSMAESKGLAEVTLGEFLYQRWLDKKPTKLKIKESTDKSTEYPNLYALRSQLEAEFEQIWQTQAAFYPVLNSQHQDKPLKEIFHQTIFYQRPLKSVGGMVGQCNLEPTLTRAPRAQLAFQRFRIEKTLSDLRWGAGKRAEKLTPEQKTVIRQLCDEKKSVKFNAIYKALESANYAKPETKGLNLDRLSRDEIPGNKTNHVFRKLELDKEWLALDERTQIQVINFLADLGSPEQLDDPVWHTRFAKADGTPRILPEPFVIFINQLKDHKDFDRLSKLGFEGGRASYSIKALNKLTDWLETPWWPENWQNEMHPDEDTAVRVCYPHRFGQARQLLNQLNPQPKTGNAVVDGSLRQIRYVLNRMIDELGEPPEQIVVEMAREMGVGISKRNQRETENNNNRNARLAAEQAIREHGVTVTPSRVRRYLLYVEQGKGHCPYCSVKINLGDALNGAETEYEHILPRSLTQVGLKRSEIVLAHRSCNQDKGNRTPFQAWGHDQERWQIIQARAKYFAANKHHRKAKLLLLEDYEAEVLTDKSIDGFADRQFHQTSWIAKEAAQWLQTISKTPVSVSRGELTAGLRRKWKLETVIPQARICEGLPVLDEDGLVITPEDFEKYRDVWEGHKVDKSRYTDRKLNKRIDHRHHLIDAITVALTSRSLFQQMARQYKLDSEHVINGEKPKLRIGEFLPLKNLRELALAAVKECPLSIKPDRYPDGAMFQETAYGVAVKESGGRSMLTLRKKITDLIDRKKGTTEQARKAIESIVSKTVRELVSQAFETRIAGGFSAPEALAQPIFQTLYGEPMEIKKVRCFTGNYADDVAIIKHPNKDKSEFAHIKYLPHAGYAYLETEMRDGRIERQELVNIQQAMKQKSTPVNDGTFRFHKGDSVVDLEDGKRYKICYFKVSGIIALLPLCEPRSFKEANEKAPTEAKVGKTISFKPAAKRLKAID

SEQ ID NO: 1296 - protein, 1111 aa, unidentified
  REGION 1..1111: note = Description of Unknown: Cas Enzyme sequence
MNRILSLDLGVTSCGFSVLDEVETNQYSLIDYGVVMRDNPNEGGTQSDWKAYIQQRKLKDKKKQRVKDLKDIFKSFNLNFVEKNYSNLWELRAKDSFERKLQIDELFAIFRYLAKHRGYKSLKMEDLIAEIESQEKIGNCESDDVIEPNSEEFTETLAYLDALKCKFKEKTVAQIIYDIESQKENPNFRNHNNYKYMIRREDTKDEIEKIVEAQKLFGFFKDEKEAENFKNSIIDEIIPQDPVLLNPNLINNCLIYKEEKSAPIYSYSFDIFNFYKHINDLKIGNKNATNEQKEILTNDFELKLKELKNISSYTIKGIKELLDIKDDIKISGLRETKIVKGKSVDNYLVKFNFLAHWAKFDKEIVVALKDKINYFDKIATIFHININPNALIEGFSKYFKENNLFFEEEKIKNFALSLYKNKVKGTSAYSFKALNDLIVHMKDGKNESDAKEILGISKSEDYSSFEKSIKYLKPIDKNGTLRYEIDENSISNHVVKSLISWACRIIIDLHEKYGSFDMIKLESTRELSQPDEKKREIKSANDRIQKEWEDLKDRYKSHFEALGLNMGNNKEYLLKIKLWEQQGEIGIYSGQSLGIADILSDKTEIEHIVPRECGGANAEYNKAIDTKNENAIKARRLPLDYLVEEKREVFLQNIDELKNSKKINFKKWLNLKAQTLDETFKEVKDDVSMHATSYTEKLLGEILKRYYPFTDKQKENQKVMHISGRATSYLRKILSIENKSRGTNFHHAEDAILIACMSKSYLQNISTNFEKNYELTRENAKDNFKKIVPFINGANPNEIFSYLQKSYTQDIEENPFYTNVIDNTLRIPAFWVSKKPIGTKAHNETIQSKKNLAYRVNIDSLLERVKPNHKMSAENFFEQYNKEILEKVQVFKDNPKDFTAQAFIKKRDNIIQLLQEANFITSKDEKADIDKKLRDEMKKPIEDVNGNTIRRVKRVGEDATIEVRNGLAYTAPSLVCLRCSFDEPKLQLQRIDIRSHVQNRNKNDTQIDIFNNDLIEIYVIKSKKIEYKAIGVLKGFTESKGGRANLRNPKYPLLKDKQPKLFQGEFSIGSTCGIKKYKTDASGRVLGFYYLGRVLEGDKELFSKVVTYRKM

SEQ ID NO: 1297 - protein, 1106 aa, unidentified
  REGION 1..1106: note = Description of Unknown: Cas Enzyme sequence
MRYRVGLDVGTASLGVAAFSIDADNNPIDLVWNHVRIFDEPLEKSQAGLKSKKAGRRAARMQRRQIDRRLSRTKQIAALAQILGIEIEPSIDSGASLLAIRAQAARVQISLSDLMRVFVKMGKRRGYGGAFKAKKENAVLGEVEGGSKDLDKAMALIAETRGLNTITVGEYLFERWQQGLPTKLKIKEKRDKEDSLQNLYALRSHIEAEFEQIWQTQAAFYPDFNAEHNGQAVKEKFKHAIFYQRPLKAVGGMVGQCSLEPTHARSPRAQLAFQRFRIEKTLADLRWGAGGRAKNLNQAQRAVIRQLCDEKEVVKFEAIYKALKAAGCPKPDGKGLNLERLSRDEIPGNKTNHVFNKMDLGEDWANLDNRTKIQVINFLADLGSPEQLDDPLWHTRFAKTDGTPRSLPEPFIAFINTMKDSGKLERLSKMGFEGGRASYSIKALDNITEWLDAPWWPDDWDDAIDGAKNVGEDGAIRVVYRAQFIKQRETTLKTQLEAPPATGNSVVDGSLRQIRYVVNRMIADLGAVPEQIVVEMARDMSVGVSMRNERESDNNKNRKARLTAEKAISDAGVTVTPSRIRRYLLWVEQGEGHCPYCSRTINLSDAMYGAETEYEHILPKSLTQVGLKRSEIVLAHRSCNQEKGNRTPFQAFGNDAERWQIIQMRAKFFSDKKAFCKAKLLLLEDFENEVLTDDSIAGFADRQFHQTSWIAKEAALWLQSISKTPVSVSRGEMTAGLRKKWKLETVIPQVRVEEGLPILDEEGAVVSAEDFAKYRDVWEGHKVLDNHGKLDKTRHTDRRLDKRIDHRHHLIDAITIALTSRKLFAEMARQYKIDSERVGVHEKPRLRIGETMPLKTVRELALKAARECLLSIKPDRYPDGAIFQETAYGVAVKEGEDKARLTLRNKVESLIDPKKGTTDQAYKAINTIVSAATREVILKAFEARIAAGKTATQALSEPIYQQFYGQKMAIKKVNCFTATYADNVAIISHTSKDGREHSKRMINGGYAYLEAEIREGRLIGQPNLVKIQQAMKAKKLVKREGFLRYYKGDTVLDMSDGKKYRIGMFKAAAGFFLVPITEPRAYNAIEEPNSGKKSLSFNQVAKLRLI

SEQ ID NO: 1298 - protein, 1064 aa, unidentified
  REGION 1..1064: note = Description of Unknown: Cas Enzyme sequence
MGYILGLDIGVASVGYAIIDENYNVLISGVRLFREGTAEENVARRGFRSSRRSMRRSRHRLDRLKELLSSALGVSGDQFYTNLYEIRVRGLSNKLSPDELIAAIIQLAKHRGIFYLSPEDLATEDGSNQSSADIIRTNENKLKDGIYPCHVQLEKLNTTGKVRGIENKFTHGSYRSELIKLLEVQSSFYPKLKGIMDEVLCIYDSKREYYEGPGSYKSPTPYGSYQLDESGNVIKINLIDKMRGTCTYFPDELRAPKWSYSACLFNLLNDLNNLTIQGVKITEVQKQELISEYVNKGKSVTIPAIAKVCSAKKEDIFGFRIDKSEKPIFTKFEGYNELLKIAKSVNEEDAIEGKKLLVDDISEILTKEKSIDVRERKLVDDLNLSTSLAKEIAKSGGFTTYHSLSFKAINLILDDLLKTSKNQMELFTEAGIKPYNHKFSQNYQLSANLSDWIVSPVVKRSINETIKVFNALRKYLKTQNGDDTEFSDVVVELAREKNSQEKKDLIKKIQKANEEKRYKIMELVKNRKLTSAEFERINLLLEQDFKCAYSLAPIELSDVFKAGLLEVDHIIPLSISLSDAQSNKVLVYQGENQAKGQRSPFQYFSSGKAKITFERFKEYVTKSLNFSNAKKRNLLYLGNPVEDMKGFIDRNLVDTRYASRETYNLLKSFFDYHNINTKVKVINGSATSYFRKKAYLSKNREETYAHHAQDAMIIAGFANTKLMKFFSKIGAFSESLNNKDSIVEVDGNIINSETGEVLEQELFDKSENVSNYIQFLKRIESIEPLYSHKVDRKPNRALYDQQIKATRSFVEDNKEVTYIITKYNDIYNTGTGNSGSKLKKMILESPDKLLMYHHDYKTFEIFLKIVEQYVEESNPFAAYKEDHGPIRKYSKKGNGPIIESVKFREKQLGSHRVNTKQQGNNKSVFLKIKSLRTDIYQEGKNYLVLNVPYDMVQFINGKYLINQSQYYKAKKNQNISEDAKFVTSLYRGDFISYEYKGEVLSCIFKCMNSEKEHKVEISFIDRPTNKQERLSIKTSIKNLTRYNIDVLGNKYKVTDEKLEFDVTI

SEQ ID NO: 1299 - protein, 907 aa, unidentified
  REGION 1..907: note = Description of Unknown: Cas Enzyme sequence
MHIERIKKIGTNNLSVYQLLKSNGFGDEAIKALQKANFEEKDYGSYSAKAIKKLLPLMRMGKYWIEQNIHPQTKNRIEHIINAEFDETIKDRVRNKAINLNDIKDFRGLPLWLTSYIVYDRYAEDGEVKKWKTVQDLESYLNEFKQHSLRNPIVEQVITETLRVVRDIWKIYGNSAENFFDEIHIELGRELKNPADVRSEITRKNTENENTNLRIKALLAELVNDNSIENVRPQSPSQLEILRIYEDGVLNSGIEIDDDILKISRTAQPSKNDLIRYKLWLEQKYRSPYTGEIIPISKLFTSSYEIEHIIPQSRHFDDSFSNKVICEAEVNKLKSNLLGFEFIKNHSGEIVQIGLGKTVKILTVDAYEKFVKEYYNKSRGKMKKLLLDEIPEAMIERQLNDTRYISKVVKNLLSNIVRAEQNDDGITSINLLSTNGQITSALKQDWGLNDVWNEIIAPRFERMNQLTQSNDFGSINEKTGKFLPTVPLLLSKGFSKKRIDHRHHALDALVIACATRNHINFLNNQNALQKGKTKEEKQKSREDLRSILCTKKFNADNDKNYKWIFNKPWETFTQDAKNQLETTLVSFKQNLRVINKTVNKFERWKEINGLFEKVIEKQTKGDSWAIRKPMHKDTVSGKVSLNRIKVPKGKILTATRKNLDTSFDLKSIESITDTGIQKILKNYLKSKGDNPEIAFTPEGIDELNRNISLYNDGKNHQPIVKVRVFELGSKFAIGLEGNKKHKYVEAAKGTNLFFAVYQDEHGKRSYDSVPFNEVVESQKMSASLKEKPSSVPLKNEKGDNLLFHLSPNDLVYVPTDEEKENSSLVSFNKLSKEQLSRIYKMVSSTGNECHFIHNSISALIKSYDAKSKIGEFGSLNKMETTIDNNIRIKERCIKLKVDRLGNIKTAL

SEQ ID NO: 1300 - protein, 1072 aa, unidentified
  REGION 1..1072: note = Description of Unknown: Cas Enzyme sequence
MKTNTPSQLTLSFDIGHSSIGWSVFSTDAEFPNLLGAGTVLFPKDSCLANARRENRRTRRNIAARRSRVERLKKYFEGLGVLSREDLNENATSSPWFSASRVLASGGKEKLSWKELWAVVRWYAHNRGYDGNALWAGDGATAEEKEDTEKVKAANALMEKYGTGTVAETICAFLGLNPTGEKRSSRKYFKGQNVAFPRDVVVDEVQKILEAHKGILPKLDDKCIRVLLKNATEQSVVKLPARFRGGLLFGQYVPRFDNRIIGKCRITGKNTPLKSCKEFLLYRWGRLLNNLTVMDLIKGIRVLEPAERKALHAEMLERGFFDKKSINEALTRITYCEPANTESYFLTEEMEEALVLDPVKKYLASKKDKDLKELLPLFSEQGRKIFATKLSRGKTVRLCNFIEKMKKMGEWDSSALEAKIAEIQSKKDKKGNANKILTKPFSVAFPDGRAPYSKEILKKAFEESLHGKDPTMEGGCLYETPEIRKRLLEMSLSEQTNNHMVRHRLMIFERLLDDIVSEYADGNAERIGDVIVEVVKELKEFSGCSSKDLGAKENEKMKNFRMVSEKLEKDATELGVPVTGSLIRKARLLEDQDFTDPYTGTPLSYNELFKKPETGKKEERLLDVEHIIPRSLRLSDALDSCVMTFKAVNDMKGQRTAMQFIKECEGQNVPATNLTVSTLKDFEKWCEAHGKKKLGRGYGKEDVDRCKRRAKLLLLEKYEERNADFTNRDLTQTSYLNKMAIRLVEQKFKGVKARHLPGVITGFVRKKMNIADALVSAVPRMQKEAKDGITKTKMRELTHLHHAMDAITQALTGIFFRTEDWKILAQRRIGKFDRARLENRYSKILKFSADGEVLMSELPKALRENIRQRLEECRVVQHVPARMNGMVVDQTTWSVEKFDEDAGKVKLSQKQRDIKDGKRIPPKPATEKPSKLLGYGVPAGKLKSIKGVVRISENWGCVLDPEPCVIPFFKVFPKLRELIAKNGGKRVRILRKGMLISVPNGKKRGMWIIRSVKDAKNGVMVDMTAVDRIDIATGGVTDSACNVSLKTLLKDGLKIEKPKLTGVPQCRSTLLQ

SEQ ID NO: 1301 - protein, 1081 aa, unidentified
  REGION 1..1081: note = Description of Unknown: Cas Enzyme sequence
MNATTKSPDTNLELAFDVGHSSIGWAVLQHTNGSATVPVASSVNILGCGVVTFRADDCLASTRRSYRRQRRHIRSTRQRIARMKRLLLHLGVLTEAQLNSPGCGWPWKLAAKVLVTGGQQTLTWRELWDVLRWYAHNRGYDANRRWSRGDAAGEDDDTEKVETAKSKMKEYGVQTMAETFCRYLGIDPLGPKLSSTARFKGLNAAFPRELVVDEVKRILEAHFGKLNGANETLVKSLFTDWRATPCPSIKVPKRYQGGLLFGQLVPRFDNRIIAKCPVTGEKVPSRNTSEFLNFRWAMQLANVRVGKSGNAEFRALTPEERKKVDAVMRAQGRLTEKEFKKAVRDTTGTERDNLDALLLHPDAKKALLLDPVQDCISSSRLQAVWPKFTPRMQKRVRGQLRRGKLLTLATIRADMERLGEAIASLDGEIQRMLDAAAARGSKKSKLLTRESLLAEMFQAERLDGRAAYSRPVLQKAFDEVMAGTHPKEEDGCLFVTEQMRQAQLQRSLAEQTNNHLVRHRLLILERLLRDIIKEFANGEKSRVGKITIEVNRDLREMSGRTAKEKAQDLGRRIADHHRVAEKLEEAFKGQRFSGQPIRVTPGLIRKGRIAEDLGWTCPYTGQKYEPIDLVTRKVDKDHIVPRSSRLSDSLDSLVITYSTINKWKGKRTAYRFVEQEQGKPVPDLPNQMIVSLTRYKGFVEALDVKKGHGDDQRRKKNRQRLLLTPSYEEEEFVPRDLTQTSQLVRLGAQALKRGFSGLDNPPTMVSLPGSVTGVVRKGWNLLGCLTQACPQVLDEAGDVRTKTEIRDITHLHHALDACVLGLASYFIPSNGSIWQMIIKRKLDDGEKLQLRGLGIFDFDSEGRFGLREAPDAIKAEIRKRLSEKRVVQHLPKRTTGMPVDQNMWRLRGWNDKGKAILEKHSRDASGKRKRDNPKAGADSKDRLVGWQPENGSGKLQRLKAVLISNENFGVALTQPKPVIVPFHKVHKRLEELKHSNAGKMPQVIRAGALVQIPKGTHNGSWRVFSIKNNANGVAFALGQRDALHPDPSKQNVLVRQLEKDGMVVQGTALTGIPVCPTTSSA

SEQ ID NO: 1302 - protein, 1132 aa, unidentified
  REGION 1..1132: note = Description of Unknown: Cas Enzyme sequence
MKTESSLPNIQLAFDVGHSSIGWAVLRADGTAPAAAKKSTENNASIEILGCGAVTFRADDCLASARRAYRRQRRHIRSTRQRIERIKLLFIHLGLLTRKQLDQPGCAWPWQLAARVLSSKTGSNPSVLLTMQELWDVLRWYAHNRGYDGNRRWSAAETGAAAEDTEKEENAKTLMGKHGVNTMAETFCAALGVDPLGKKKSSIARFKGLNAAFPRETVEGEVRQIIHAHSGSLAGVDANLEKALLENWQVIPFAEMKLPKRYQGGLLFGQLVPRFDNRIISKCPISGEKVPSRNCPEFLNFRWAMQLANVRVARLGEKELSSLSAAERQQVDAQMRQQGGMGVEEFKKHVRQVSSAIRDNLETMFMHPDAKEALLLDPVQKLTQSNELKSIWVLLPEQLQKRIRGQLRRHRKPVSLSTLRQQLADLGGNVSAFDTEVTRQLDTANTKGRKKDKQLTREELLNRTFSVRKLDQRAAFSRQLLKKAYQEVLAGEHPKEEGGCLFVTEEIRQAQLTKEIAKQTNNHLVRHRLLILERLLGDILKEYAGGDKTLIARITIEVNRDLRDMSGMTAKQKAQDLGQRIANHHHVVEKLEEDTSLMKVLNDRRTKITAGLIRKARVADDLNWMCPYTGQRFEPVDLVTKRVDKDHIVPRSDRASDSLDSLVITFSAINKWKGKRTAWQFIHQEQGKAVPDLPNLSVMSLSRYKELVESLETFKGHDDDKRRKTKRKELMLLPTYEEKEFVPRDLTTTSQLVRLGAMALKKAFIGCEKQPAVVSLPGSVTGTVRKAWKVLGCLGLACPQVIDLNGEVKKKDDIRGITHLHHALDACVLGLASHFIPNNGRVWELILKRNPNDAEKRELMALGVFGSNSENRFEMRDLDNRLKEQIRQRLAEKRVVQHVPARMDGLRVEQNIWGVGARNQDGTVLVHQRIRQADGSRKKKEVPEKKVKLLGLAPSSGIGKLSANNGVLVIPDNYGVAILDHAEEKNDKFVIIPWHKVWVRLFRGFKEKSGKPLEKSLIERNKGKTPRILRNGQIIRVTGGTYKDKGAWKITSIKNQKTGIKVNLGQPDTVNTEEEVLDEAKGKKIRKVRDDCKHEASLASIISGGLEILSLPLTGFRIQPPDTKEPKRQETV

SEQ ID NO: 1303 - protein, 1122 aa, unidentified
  REGION 1..1122: note = Description of Unknown: Cas Enzyme sequence
MGAKLSQDLELAFDVGHSSIGWAVLQKTGAQASNLNILGCGAVVFRADDCLASSRRAYRRQRRHIRSTRQRIARIKILLQHLGILTEKELAQTVSSSPWQLAARVLQGGKLLTWPELWDVLRWYAHNRGYDGNRRWSAAESEAQKEDSEKEANARTLMGKHGAQSMAETFCKELGIEPLGKKKSSTIRFKGLNAAFPRNTIEAEVGKILQSHFDKLKNANVNLEKTLLDDWRIIPCGNLKLPKRYEGGLLFGQLVPRFDNRIISICPISGEKVPSRNCSEFLNFRWAMQLANIQVGKFSDRELKPLKMEHRVALDKLMRERGYLTPTELKKAVRELTGCERDNLDTMLMHPDAKEALLLEPVQKLISSDDVQPFWKLFPERLQKRLRGQWRRKKVFSLAQIRKQLESLGGDVGAFDVVLQNQLDAHNTKAKKKEKQITREEFLKKTFPAHPIKLDGRAAYARHLLKQAYEEVLAGKHPKEEGGCLFISEEIRLKQLNRGIVKQTNNHLVRHRLLILERLLADIVKEYAGGKKELVTKITIEVNRDLREMSGKTAKEKAQDLGLRISNHHAVAEKLEKAFAEERNGKSIPITAGLIRKARVADDLGWRCPYTGIDFEPKDLVTRRVDKDHVVPRSQRASDGLDSLVITFSEINKWKGNRTAWQFISEEQGKPVPNLPNLSIVSLTRYKQFVESLESYKGHDDDKRRKKKRKELMLLPKYEEKEFTPRDLTQTSQLVRLGAQVLRKNLSHLTTGDVTSLPGSVTGTVRKNWKLEGCLGLANSQVLNENGEAKTKTEIRDITHLHHALDACVLGIASNYFKNQKLGASSLWELLVKRKYNEQEKSILRALGIFQFDENGNSQLKELPKEIKAQIRQRLAEKRVVQHIPARMDGLRVEQNVWGIAAKNNDGTTTIRQRIRQPDGSRKKKEVPEKDVKLLGLKPLNGVGKLAANNGVLVIPDNYGVAILDHTTDKRDKLLIIPWHLVHKRIFKGFKDKDGKVLEKSLVERNNGKMPRILRNGQLVRANSGTYKGAWKITSIKNQKSGIKVNLAQPDTVNTEVEVFDELKQKKIRKVRDDCKHEASLETIVSGGLEILELPFTGFDCPSPKMKEPKRENRLGSESRQS

SEQ ID NO: 1304 - protein, 1075 aa, unidentified
  REGION 1..1075: note = Description of Unknown: Cas Enzyme sequence
MSIKGKISNGADANLQISFDVGHSSIGWAVLEKTGQQVSDIKINGCGSVVFRADDCLASSRRAYRRQRRHIRSTRQRIARMKILLKHLGVLTEKELDKPGCAWPWKLAAQILQGGKLLTWPELWDVLRWYAHNRGYDGNRRWSAAENDAQSEDSEKEENARSLMGKYGTKSMAETFCAISGINPLGEKKSANLSGDKRPKGQNAAFPREIVELEVRQILQKHFGKLKNADENLEKVLFTDWQTISCPDLKLPKRYEGGLLFGQLVPRFDNRIISTCPISGQKVPTRNCTEFLNFRWAMQLANIRIACAGEKELRPLTAAERKIIDQAVSEKGGVTPFQLKLIVREKTKCVRDDLEQMLMLPDFEKALLLNPIQKMISADDFQPYWKLLPDRLQKRLRGKWRRGKVFSLAQIRTQLESLGDASAFDAELQRQLDAHNSNAKKKDKQITRENLLQKHFPSKPLKLDGRAAFARHLLKQAYDEVLAGKDPNGKGGCLFRSEEIRQKELNREISDQTNNHLVRHRLLILERVLNDIIKEYAGGKKDRIGKITIEVNRDLREMSGKTAKEKAQDLGLRIANHHNVAEKLEKAFAEEGIKQTITAGLIRKARIAEDLGWHCPYTGIQYEPKDLITRRVDKDHIVPRSERASDSLDSLVVTFSAINKWKNKRTAWQFVTDEQGKTVPDLPNLSIMSLARYKQFVESLESYKGHDDDKRRKKKRKELMLLPKYEEKEFMPRDLTQTSQLVRLGAQVLKKNLPHLTTGDVTSLPGSVTGTVRKGWKLEACLGLANPQVFDGNGGAKTKTEIRDITHLHHALDACVLGIAANYFQNQKLGASSLWELLIKRKYNEQEKTILRALGIFQFDKEGNSQIKELPKEIREQIRQRLAEKRVVQHIPARMDGLRVEQNTWRVVAVKDGEVILKQRIRQPDGTRPEKIAEEKPGKLLGLNPTNGNGKLAANKGALVIPDNFGVALDPQPIVIPFHKVWTRLQELKKANAGKLPRVLRNGQLIRVKDGTYKGVWRVFSAKNNATGMALDIGSPDVVRLKNKTEGHKINVLLSSLIKGGLEPIQSSFTGITSK

SEQ ID NO: 1305 - protein, 1110 aa, unidentified
  REGION 1..1110: note = Description of Unknown: Cas Enzyme sequence
MNATGKNHISKAKPDLQLAFDVGHSSIGWAVLQKTGTQASDIKILGCGSVVFRADDCLASSRRAYRRQRRHIRSTRQRIARMKILLKHLGILTDAELDKPGCAWPWKLAAQILQGGKLLTWPELWDMLRWYAHNRGYDGNRRWSATETEAQSEDTEKEAKANSLLDAFKTKYGREGSMAEVFCDIQGIKPLGKKKSANLSGDKRPKAQNAAFPRKIVEGEVRKILQAHFGKLKGIDEKLERALLGKDSNDKTAWQAVECSDLKLPKRYEGGLLFGQLVPRFDNRIISICPKSGQKVPSRNCPEFLHFRWAMQLANTKVGKIKDRELHPLVADHRVALDKQMRERGYLTPTELKDAVRNITNCERDNLDTMLMHPDAKDALVLDPVQKLTSSDDFQPFWNLFSERLQKRLRGQWRRGKIFSLEQIRKQLELLGGDVGAFDAELQRQVDAQNSKAKKKEKPLTRDDLLKKLFPSKPLKLDGRAAFARHLLKQAYEDVLAGKPHPKEEGGCLFITQEMRDLQLNRAIAEQTNNHLVRHRLLILERLLKDIITEYAAGEKERIGKITIEVNRDLREMSGKTAKEKAQDLGLRIANHHAVATKLEQAFAEERNGKSFPITAGLIRKARVADDLGWKCPYTGIDYEPIDLVTRRVDKDHIIPRSQRASDGLDSLVVTFSEINKWKGNRTAWQFVSDEQGKPVPGLPNLSIVSLTRYKKFVESLETYKGHDDDRRRKKNRKQLMLLPKYEEKEFTPRDLTQTSQLVRLGAQVLRKNLPHLTTADVISLPGSVTGSVRKAWKVLGCLASANSHVLDENGEMKNKTEIRDVTHLHHALDACVLGLASHFIPNNGRVWELIVKRNLNELEQRQLMALDIFGFNAEKRFELHDLDKKLKEQIRQRLAEKRVVQHIPARMDGLRVEQNTWRVISVKDGEATIQQRIRQPDGSRPQKPPVKEKVTKLLGIEPANGKGKLAANKGALVIPDNYGVAILDSAKNDEDKFVIIPWHLVYVRIFKGFDDEKSLVGRNSGRMPRIVRNGQIIRVLGGKNFKGVWKVFSVKNNAKGVALDIGSPDVVKLKNKREGNKINVRLATLVNNGLEIIQTPLTGIAASPDSLSA

SEQ ID NO: 1306 - protein, 1071 aa, unidentified
  REGION 1..1071: note = Description of Unknown: Cas Enzyme sequence
MAQTNLQLAFDVGHSSLGWSVLQTAIRAPSQAQAPSVDILGCGVVTFRADDCLASARRVYRRQRRHIRSTRQRIARMKILLRHLGVLQKEQLDLPGCAWPWQLAARVLRGGVLLTWPELWDVLRWYAHNRGYDGNRRWSAAEAEAQKEDSEKEANARTLMGKHGVSSMAETFCKELGIEPSGKKKSSMRRFKGLNAAFPREVVEREVRKILEAHFDKLKAVDKNLEDVLFSDWRAIPCPGLKLPKRYEAGLLFGQLVPRFDNRIISKCPISGQKVPSRNCPEFLNFRWAMQLANIRVLRFGEKELAPLTVPERKQLDTLMRQQGGMGVEEFKKQVRQTTSAIRDNLDTMLMHPDAKDALLLDPVQKLIQSTELKSFWPLLPSPVQKRTRGQWRRGKNLTLAKWREQLGTDTAAFDDQVTRQLDAENIKGRKKDKQISRDEFLNRPFSVRKLDQRAAFARHLLQKAFEEVMAGRHPKEEGGCLFVTAGMRNEQLQREIAQQTNNHLVRHRLLILERLLADIVKEYAAGDKTRIARMTIEVNRDLREMSGMTAKQKAQDLGLRIANHHHVVELLEKNDSLMKALQKQKSRISASLIRKARVADDLGWMCPYTSQRFEPVDLITKRVDKDHIVPRSDRVSDSLDSLVITFSAINKWKGKRTAWQFVEQEQGKPVPDLPNLSILSLTRYRQLVNGLETFKGHDDDKRRKKRRKDLLLLPAYEEKEFTPGDLTTTSQLVRLGALSLRKAFIGCKDQPVIVSLPGSVTGTVRKAWKLLGCLSITAPLVLDENGELKTKNDIRDITHLHHALDACVLGLASHFIPNNGRVWELILKRKWTPAEENELKALGIFAKDSEGRFQMRDLDKALKDQICQRLAEKRVVQHVPARLEGLRVEQNTWRVISVKDGEATIQQRIRQSDGSRPVKDAVEKTSKLLGLEPVTGNGKLKAEKGALIIPENFGVALDPQPTIIPFHKVWTRMQELKAANFGKKPRVLRNGQLIRVPNGKNFKGIWKVFSAKNNASGMAVDIGFPDVVRLKNKTEGHKINVRLATLIKDGLEILKTPLTGIAAYPIPSSA

SEQ ID NO: 1307 - protein, 195 aa, unidentified
  REGION 1..195: note = Description of Unknown: Cas Enzyme sequence
MNQKRFEDNPKRFLEELGYTNIQKDSIIILPKYTLFELEDGKRRRLASHQELQKANELTLSDTFTLLLYHALHRDDEENKEHREYLDQHRSNFIDLFDVIIKKSEQWIVKPKVVERLKKVMENKFDNASIDEISASFLSLLSFMRAGASSGFKFFEEQITMDSLRYQSVTECLTSSIIYQSVTGFYETRIDLNLE

SEQ ID NO: 1308 - protein, 1149 aa, unidentified
  REGION 1..1149: note = Description of Unknown: Cas Enzyme sequence
MRKNYSIGLDIGTNSVGYSVIFDDNYKVPVKNAKVLGNTSKKSIRKNLMGSVLFDSGETAMARRLQRTNGRRIERRRNRIRYLQEIFAPYMMQVDENFFARLQDSFLWEEDKPHSKYPFFGNVEQEVAFHDNYKTIYHLRKELADGKEKADLRLVYLALAHIVKFRGHFLIEGNIDIENNDIQQLFDEFLAFYSAYFEDSSVLEKKMEVREILTEKISKSAKKDKIVQTYSLDKKSPISKFLELIVGNNPNFQFIFDLEEKFSLQFSKESYEDDLTALLEQVGDEVADVFLAAKKVYDSVVLANILSIKDKNTKAPLSAAMIERYTNHKKELAELKQFFKATLEREIYKEFFNDPKKDGYAGYIDGSTTQEAFYTKLKKLFETTGTPELFKEKIDQEDFLRKQRTFDNGSIPHQIHQKEFEAIIERQGVFYPFLLENKDKLIKIFEFRIPYYVGPLAKNQQSPFAWATYYTDEPVRPWNFEEIVDTKVTAEEFIHRMTNYDIYLPDQKVLPKHSYLYELFTVYNELTKIKFVDDQNYKSYFNAKVKKDIIDNVFKKERKVTYEKLMNYLRVAYADFRIESIVGLNKDTNAFNALLGTYHDLLKLKVNKEFLDNESNLPIIEDIILILTIFEDRKMIRERLSQYASYFDEKVMKRLERRHYTGWGRLSKKLIDGIRDNGKTILDYLKDDPAGNRNFMQLIRDDYLTFKKQIAEAQVVGEVDSLVEQVQSLPGSPAIKKGVLQALKIVDELVKIMGYKPTSIVIEMARENQTTKKGQKQSQPRYTKLSKSFNILSSNILKENSITKEDLMKEKIYLYCLQNGIDMYTGKPLDINCLSNYDVDHIIPRSFLPDDSIDNKVLVSSKLNRGKADNVPSLEVVNRMEAYWRVLLNAKLISESKYNRLTKAKSPEGGLSEKDKEGFIHRQLVETRQITKHIARMLDERWNQNVDESGKKIFEVKIVTLKSSLVSNFRKMFDIPKIRELNHYHHAHDAYLNAVVGNLLIKKYPRLAPEFIYGQHLHLSRKSNEEEKATKKVILYSNVLNFLNDEEEQRDFEGNVIWNKNQHIGMIKKVIFNNQVTVVKKTEIQSGSFTKETVKKKGTSDKLIPRKNGWEIKNMEVFRGKMMLTVYCLKVKIPKRRKVLRITCWEYLL

SEQ ID NO: 1309 - protein, 937 aa, unidentified
  REGION 1..937: note = Description of Unknown: Cas Enzyme sequence
FLGKIDKEEFLRKQRTFDNGVIPHQIHLEELKAIIGKQSKYYPFLAENKEKIEQILTFRIPYYVGPLARGNSRFAWLTRTSEGAIKPWNFKEKIDEGKTASEFIEKMTNRDQYLPEEKVLPKHSMLYEKYAVFNELTKVSYVDDRGITQNFSSVEKREIFEELFKKNRKVKLKDLENFLENQYMIEVAKINGIEKSFNASFGTYHDLLKIGIKKEMLDNPENEQMFEEIIKILTVFEDRKMIQEQLNIYAEYFEPSIFKDLVRRHYTGWGRLSAKLINGIKDKQSKKTILDYLMRDDGMPKNKNRNFMQLINDDSLSFKEIIAEKQRITETEDLHELVKNLAGSPAIKKSILQSLKIVEEIVNIMGYPPKNIVVEMARENQNTDQTKKRKRKLEEAIKELGSNILKEYPIDNADLKRNQLYLYYLQNGKDMYTGLDLDISQLSKYDMDHIIPKSFIKDDSIDNLVLVSSKDNRKKLDNVPDIDTVKKMKPYWERLKKADLISQRKFDNLTKAERGGLSDEDKAHFIKRQLVETRQITKNVAQILHQRFNRGDKEQAENTTRIITLKASLTSQFRQIYGLYKVREINDYHHGHDAYLNGVVATALLRVYPKLEPELVYGDYQQFNSLKENKATAKKEFYSNLMLFFKNNKPKVDGNGEILWGQKHISTVKKVMNYRQMNIVKKTEIQTGRFTKESVKPKGDSDKLIERKTGWDPKKYGGFIEPTIAYSVVISYEKGKKKKITKDIVGITIMEQKEFEKSPIPFLENKGYTNPNIKMKLPKYTLYELENGRRRMLSSASEAQKGNQMVLPKHLVDLLYHAKHCEELDEKSYEYLNKHRADFDELFEIVKAFSTRYIIAEKNLKNIEQLFEENYEMDTKTLAKSFLNLMQFTAIGAPTDFNFFEKTISRKRYTSLKELLSATIISQSITGLYETHTKLGD

SEQ ID NO: 1310 - protein, 1059 aa, unidentified
  REGION 1..1059: note = Description of Unknown: Cas Enzyme sequence
MEKEKNNHVWGFDIGKGSLGEAVRIGGDFKHIASVLLDPEFGEIKTAALARRQMRTRKAHKAREKWLEECLEGTGVEILKRREVGIVDGQWQLISKGDERLEREFPPSGEDVCYNSIALRCKLLLGEKLEGWQVFKALNSAIQKRGYDENIPWGEAEEKSSKKDDDDYAQKLSQYEKEKSELFESFADGEKYDFPCFFKAYKMGLWSPENPTRVEVRIDCRAQKAKSYVIARKYVEREFECLVEAAAKFFPKLKGRAKFILYGVSETPYASYYGNMRKKFGLKRGAESDWTALGQKVPRFDNRIIDKCRFIPRMNVCKIRPLNEARNEKDLLYYEVTLALKLLNLRFFRNSNIEQLTFEEFKKAFEIAAGAKYKMTKTAMKKFLKSISATALGDDYAEIEPPKESGRASFSRPAMEILKELIFSGMPPREFYGRKISEISNTDKNKGVVSSDLDFIKLMGDCPWGGIFIPDVQTYQFANAAFPDPDAQINKLIGSQNNPIVRHRLTFFFERIKFLESKYGVPDKVVLEFVRDDFMGEKEKKEMRIAMKKRAEEKMRIAKDLDEHGFKGGNLLLKMELYRKQNGICLYTGDALPLSELATLEIEHIVPRSRGGPDAQYNYVITREKTNKLKGDKTPYEWISSDAKEWASYTDRVNACAKALGKKRCRLLLEKDAEELVEKYTALAETAHIAKLAQKIVCMHFGFQFGGLSGTKRVFTVPGALTSRIRKFYGLDRILHNSAAESENLSFEEFLKFSEDLEKKNRKNKKHHALDAMCLCFAPTGVDSRRAKLGEILPEKLRSEKAAREFFKSYLDKIMPVDVAPKKPRLEDGIYSKRIIGGKACMVKRNNLVDLAYKSGLKPVFDIPTLIKLVDKKEKGIINPQIRKMIGEFAATNPDESAWRKWCEEVRLPSKSGLGARVMRVLVYYGEADEYKDLSKDGYGAYRKGDGHKGQVIWESVDGKYYVEPVYVHASKAGVMAALNANPKKKRICGMFNSHCTVDVGDVYNDKGDFILPAGRYMVNTIRSDNQCVLTNADGEKRNPININYLMRAGMRRVDLSEL

SEQ ID NO: 1311 - protein, 1333 aa, unidentified
  REGION 1..1333: note = Description of Unknown: Cas Enzyme sequence
MSKLSIAIDMGAKHNGVLFIKSNHDEIEDKKAVDIAINENSINFSKKSRRENRHKDRSIQRRKVAKRLLKELIDWKSFNQAQQELILGLLNNRGYTFISVENEFEALEDITAEFIDTYLPELSVLKDDKTKSYTNQSVDIYLTSAFENENELLEFIDNTINALEKQRENLDSFSNKKKILSDLSDLQDGKFDKLKQWGYVKSLLFKYGYRDFGKNKDEAIQNLKDKKLTLEQIDFEKEIDYINSLDFKEDFTKAKKLINDDIKTFIEFLQNIAKEIKTGAKPRKQYLKEIKNEIETFDFIEDKERFFRLVGNISNLQLRVLRKFFNFNSSHKSKYEILKRYFRTFHYKKEDEKQRIIELKPYLDKHTDLKSFLEDVPPHLTIPPYEDMNNRNTYKCHSMLIKPELITDELKNTIDFLLSKPEFEVLKRDENGELKIKPLIKTKPSSGNKYIKTDYTYSKYLQRILDATDDITIRELNPRNVFKYQKKFERGSIDSVECFKKEFGEEHYRNLKEIAEDYYKQEALVLNGIYIERDSIFTKCNTNTPYKNNAKHLLLKPVYSYNFTPDEANELLESIQNTKGLKTALERVAEEAKKYQNSFYHIIEACYENQKCINDKEIKTIVKNLDKNFKELKEITKDKDTYLSSEEKLTKENLKRFLNTMLQTYNILFKDISGFNKTCKHCTLENSIRSDEGRVIAKRLLSDVAKPIDGMLDMMLDRVAFEISEEVESLDDVNEIEIILEQNRFEFEENLNAIKRSSDPTIKKYKREHKDILAPNICPYTGEKFDKGEWDHILPQSKGLYNSKANLIYVSSEGNRNKGNKSYILDEIKQEHLEKIFDKKTLQEIKEVISKGINSIDEDKFTNFDNLSLNQQIAFRYALFMRDTPEFNKAYELLKRDKLKTFSNGTQKRLARLINEKLDKKFPKEMKKIDVDSKVIDAKLVSAMRSHLSKDATTGEVNHLFKEEKQDNHSHCIDAMVAFYLANGKLVGQKHRQKENVALFEPRYEFNEIYIENSREIKVAKTNIKEKIKQNKPMDSIGSVEMLFRENMIRTKYLNIFKIDEKFYFGENQKSVMPFSGFKQEALEYFLENQLLQEYEHNSYRVAKTNLFNFLFENKVEVISKKNFFKKIDELRYTTQKKSIEALIDKLLNPTSNDEKKFIKSQITLNDENKLTKLEQVNKENLYKFFAKGSKTEHKKIQLKLDKTWRMVAKYLSDNKDYFIKEVTNDKDKKRLVCDYEKLIVLLKEFTIFKITHKRKRKVKKEYSLPLKDTTEKPFLLKRKSSFGDTIYQTVFANNSARGFVDGYYIHTNHKNIIPLKFDDYLKAFENETHHHQ

SEQ ID NO: 1312 - protein, 1166 aa, unidentified
  REGION 1..1166: note = Description of Unknown: Cas Enzyme sequence
EWRVKALSEKMELEQIVIVIQQINIQLNSSSGYLGAISDRSKELYFNKQTVGQYQMAQLDKNHNYSLKNQVFYRQDYLDEFEKIWEIQSKFHKELTCDLKKEIRDIVIFYQRPLKSQKGLISFCEFENKQIEVEIDGKKKIKTIGLRVCPKSSPLFQEFKIWQILNNLQISCKIEDNEDISGKFIKKEIEKRNLEQDEKEALFTELSVQEKMSKTDVLKFLFKNYKEFDLNFKEVEGNRTQAALFKVYQQIIELSGHGEYDFSKMSHSQIIEIVESVFKALKFNTEILKFDSSLEEKEFEKQASYQLWHLLYSFEGDNSKSGDDKLINIISTRYGFDKEYAKLIAAVTFQPDYGSLCTKALRKIVPYMKEGSEYSVACGFAGYHHSKKSLTKEELEQKVYKDKLELLPRNSLRNPVVEKILNQMINVVNGVVDAYGKPDEIRIELARELKKSAKEREELTKAISKTSAEHEQYRAILQKEFGITNVSRNDIIRYKLYLELKGNGYKTLYSNTYIPQEKLFSKEFDIEHIIPQAKLFDDSFSNKTIESRGVNIDKSNATAYDYVKGKYDAKELAEYQNCVEALYKNGFISKTKRNKLLMQEADIPSGFIDRDLRDSQYIAKKAREILEDMVKFVVPTTGSITDRLREDWQLVDVMQELNWDKYLKLGLTEFVQDKDGRQIRRIKDWTKRNDNRHHAMDALTIAFTKRSIIQYLNNLNARIGKSVDDYIDLANYDLQNINPKDRTKVVNAIEKSELYRDRNNHLRFNPPMPLDEFRTEAKRQLENTLISIKAKNKVTTTNVNKAKNNVTTIIADKDGKQKTIKGQLVKTPRGQLHNETIYGSIKQYVTKEEKVGSNFNGEKIATVSSQKIKALLLDRLSQFDNDAKIAFTGKNSLDKNPIFLDVAHSQQVPERVKTVSFETVYTIRKAVAPDLKIDKVIDVNVRKILETRLKEYDGDAKKAFVDLEENPIWLNKEKGIPIKRVTITGVSNAIALHDKRDKKGNPVLDKDRNTQPADFVSSGNNHHVAIYRDTAGNLQENVVSFFVATTRVNSGLPAIDKEYKKNEGWQFLFTMKQNELFVFPNKETEFDPNEIDLMNPANYALISQNLYRVQKLASKDYFFRHHLETTVNDNTNLKGITWKRCNLAGVVGIVKVRVNHIGQIVSVGEY

SEQ ID NO: 1313 - protein, 1193 aa, unidentified
  REGION 1..1193: note = Description of Unknown: Cas Enzyme sequence
  MOD_RES 69..72: note = Any amino acid
MRGKRYRIGIDVGLNSVGLAAVEVSDENSPVRLLNAQSVIHDGGVDPQKNKEAITRKNMSGVARRTRRXXXXAIISVDGFSIGTNFSAVASCFNNIGPGFELVGATQNFSIYSDLSKIILSLDMLLGKFGYPVIEPESLDKPFEEWHVRAELATRYIEDDELRRESISIALRHMARHRGWRNPYRQVDSLISDNPYSKQYGELKEKAKAYNDDATAAEEESTPAQLVVAMLDAGYAEAPRLRWRTGSKKPDAEGYLPVRLMQEDNANELKQIFRVQRVPADEWKPLFRSVFYAVSPKGSAEQRVGQDPLAPEQARALKASLAFQEYRIANVITNLRIKDASAELRKLTVDEKQSIYDQLVSPSSEDITWSDLCDFLGFKRSQLKGVGSLTEDGEERISSRPPRLTSVQRIYESDNKIRKPLVAWWKSASDNEHEAMIRLLSNTVDIDKVREDVAYASAIEFIDGLDDDALTKLDSVDLPSGRAAYSVETLQKLTRQMLTTDDDLHEARKTLFNVTDSWRPPADPIGEPLGNPSVDRVLKNVNRYLMNCQQRWGNPVSVNIEHVRSSFSSVAFARKDKREYEKNNEKRSIFRSSLSEQLRADEQMEKVRESDLRRLEAIQRQNGQCLYCGRTITFRTCEMDHIVPRKGVGSTNTRTNFAAVCAECNRMKSNTPFAIWARSEDAQTRGVSLAEAKKRVTMFTFNPKSYAPREVKAFKQAVIARLQQTEDDAAIDNRSIESVAWMADELHRRIDWYFNAKQYVNSASIDDAEAETMKTTVSVFQGRVTASARRAAGIEGKIHFIGQQSKTRLDRRHHAVDASVIAMMNTAAAQTLMERESLRESQRLIGLMPGERSWKEYPYEGTSRYESFHLWLDNMDVLLELLNDALDNDRIAVMQSQRYVLGNSIAHDATIHPLEKVPLGSAMSADLIRRASTPALWCALTRLPDYDEKEGLPEDSHREIRVHDTRYSADDEMGFFASQAAQIAVQEGSADIGSAIHHARVYRCWKTNAKGVRKYFYGMIRVFQTDLLRACHDDLFTVPLPPQSISMRYGEPRVVQALQSGNAQYLGSLVVGDEIEMDFSSLDVDGQIGEYLQFFSQFSGGNLAWKHWVVDGFFNQTQLRIRPRYLAAEGLAKAFSDDVVPDGVQKIVTKQGWLPPVNTASKTAVRIVRRNAFGEPRLSSAHHMPCSWQWRHE

SEQ ID NO: 1314 - protein, 983 aa, unidentified
  REGION 1..983: note = Description of Unknown: Cas Enzyme sequence
MRVLGLDLGTNSVGWALIEVPQTDDELGQIIGIGSRVFPAGLEIKAGSQVSRAATRRVARSMRRQVSRRRERKSLLRTELSKIGLLPVDGEQLAELLKIDPNTLWADSSSHPLTLHEIGRLVYHLAARRGFLSLRSGGAEVEAEDEEESSQSQIRLRKVQEAKLQKLWTDQTPYHPDLLSQQLLYGKRGQLTYPVRPVPREDYLASKGSPIDEFGVHGLVFFQRKVYWDQNTIGVCELTGKPRANRADRIAQEFRIWQTVANIRIYGDKRPLTPEESQTLVDKLMRQKSMEMSKVRQILKITDDAFLNFDRHEDSKFAGHETDCELRKKLGGVYDTLTEQQRDELVGILLSTDTTARILTALQSRYGFTEEIALKALTAKFSSARARYSRKAMRLLLPKLKDGSDLYAAIQGSTFESAMPKSDLTTTLDDESDSNSVHVLALPPTATSPLVNRTLHEVRKVVNGVIREYGLPDVIRVEMSRDISMNKRQKEEYEKRGRANEKEREIAKKFLLDYGGNPNSGSDIERVILWREQNERCLYSGRPITPAMVLNNNQTEVDHILPRAQTLNNARSNKALVLTSENQNKGDRTVAEWLELNPEKFEEILLRAKEWKLPRPKQLALKRQRVTLDLEGNAPSALLVQTGHINRLVRSWFTRDLGFEPQVSNGRLTSVLSTMSGLRSIGLDKRTDLAKDFRRHAIDATIIAVTDRRMALRLAAIYARKDHRKESAGGGPSLEPWPYFRYDVKKAFDGIIVSHRVARKRSGQLHKETLYGAVRDQPSLVVVRRKIEDIDSAKRLLEVVDPAVRAALVDHLRGRGIDPESFKTKVFAKESPPTLPSGVPINKVRCHLSEPGARQLSNRRPTVMVLPENNHHGIVSKFADGRFQIDVVKLMDLVEGRLPLIEGVTEQFTLARGDVLRIDDSAGLRFVRVVSLDGSNRRVFITSVQADQVPQREQVQVNATWFKRMNATKVQVDPIGRVRRAKG

SEQ ID NO: 1315 - protein, 1144 aa, unidentified
  REGION 1..1144: note = Description of Unknown: Cas Enzyme sequence
MSTYSANVQRRHYRIGIDVGLKSIGFCAIEVDGRGTPTKLLNSTVHLHDGGAEPGDRKEVSRKKTAGIARRARRRGLRNKRRLRELDAYLSEELGWPLPDLEEFTDQHEPWHVRAELLDSYVSDPAERKEMLAIAVRHIARHRGWRNSYTSVASLARAPYPSKALITVNQRVCEALGVTIDAEATQGQLASAYVADERYAFQALRGTQGLFRGRQYQSDTYHELTQILRFQRVESSQIDELMKRVFHVINPRDGVRRNMRVGCDQLPGQESKFRAEIAQPAFQKFRIVAALANLRIRSGRQERKLSADELRRVTQYILDSSIALEDNDWSDIAEQLGIERNSLTGTAKAVFEGEPALRRPPTDAVSVIVMSSKLTKLKRWWKSATEDDRGDLVKFMANSTLGEGEDFENDEVDGFLGSLNDEDLAKLEEITFPPGRAAYSLDSLQRLTERMLADGCDLHEARKCEFGVSDSWVPKPDPIGAPVGNPAVDRVMKEVNRWLKMAVDRWGVPEVVNIEHTRSGMMSTEKARELMDSNAARQKRIEALAQELGAQACGSGKLNQVTKIRLLAVQRQGCKCLYCGDAISFETADMDHIVPRSGLGSTNDRNNLVAVCRECNESKRNQLFSEWAKTGGRKDKVSVDDVIERVWSWERDPGVSPKQHKAFRAEVVARLKSKTPDQEFDARSMESVGWMAVELGKRIRGFFASEYSVDDGLVPPSVGLYRGRITAAARIVSGFEGCVRLTGGNGKTRLDRRHHAMDALVIALLDDRVAQLLALRDNLRFAQLLTSGSNEWRLYLQSHTSENALMHAWSQHMQVAAKKFNAALESGMVRFTMNQRLRLGSSRVHMDSVTSFEHAYLDRDSDRKPKVDKNGVRKVKEHGEFRLLSDPLPVDLIDRAETPALWTALVKNEKFDPKLGLPADSERTIVVHGRSIGPMDRIRFFGATPDGKWSASMAVRGGYVSISNTIHHVRIYKIADEPARYGMLRVYQVDLRRARGKDLFSFPIPACSISMRTADKDIREALLAGTAEEIGWVAVGDELRVNSAFYSENKIGKFFKEYPEAVEWRVVGFEGPTKINLRPIRISEEGFDEATPKEVRDIAGSSGSWRVAISALLGCGGVTLIRRNVLGEERWKSRSGLPCCTALE

SEQ ID NO: 1316 - protein, 1134 aa, unidentified
  REGION 1..1134: note = Description of Unknown: Cas Enzyme sequence
AQNAPADGLTSVGFLFTKGFALNSANVNYRVGIDVGSYSIGMAAIAIDDDGKPAEILSAISLIHDSGVDPDSAKSAATRLATSGIARRTRRLYRRKRKRLAKLDKFINSQGWPLKEFEEYEDPFYPWRVRAELATTAIADQQELGEKLSIALRHIARHRGWRNPYSKVTALYTVTEPSDAFLAMQEECAKRLGRSIPKTIMVGQLVAGMNLGKTRLRGKEKPPNKANPHGKEAGLFTANKLQQSDYANEIHTIAKVQGLSDELVKQIIDHVFAAESPKGSAAERVGKDPLQPTKKRALKASDAFQRYRIAALIGNLRIRGGKENRRLTAEDTRLVFNYLRSLPAKQEPTWQLVAEQLGIDRGNLVGTAIMTDDGERAGAKPPVHETNRLLESTKIKPLATWWKSADADARAAMVKALSNAEVDDFDSQAGVQVQEFFFGISDKDHEELDKLHLPIGRAAYSEDTLVRLTKRMIDKGMDLYEARQAEFKIPNDWAPPAPEIGERVGNPAVDRVLKATARWLNAAERQWGTPKSVNIEHVRDAFMSESSARKLDQDNQQRAKRNEEIVAEMQEKLGIEGRPSRADVWRFQSVQRQNCQCAYCGTQISFKNSEMDHIVPRAGEGSTNTRDNLVAVCHDCNSSKSNIAFAVWAENTSRPGVSVKEAVERIRHWVTDSGLRKPEFDKFRKQVCDRLRRKATDEPIDARSLESVAWMANELRSRIAQKFKDGDTKVRVYKGALTAEARRASGISGKLEFVDGKGKSRLDRRHHVVDAAVVAFMSNYVAETLALRSNMKFDYELRLNEKSKQELERKKPKYKTFTGPTPAHQIEWVKWKDRMQDLAELLNNALTQDHIVVMHNLRLQLGNGAAHEDTIGKLTRLKVGDAISTTDIDRASSEALWCALTRDPDFDPKTGLPENPNRTIRIHGTHLAASDEITVFPEAAASIPIRDGFAKLGKNYHHVRLFRVPNGKKYKYCLMQVYTVDLLKFRKEDLFTVELKPQTISVRTCEAPLRKALANGTAEYLGWLVSDDELLIDTSSSDTPGIVKLREEYGQVNRWRLAGFNSIKQMRLRPLYLSKEGLKPDVDPEIKKIIDNRGWLVSVNKLFSTNHVKIIRRDALGRPRLYSAAHLPICWEVK

SEQ ID NO: 1317 - protein, 1147 aa, unidentified
  REGION 1..1147: note = Description of Unknown: Cas Enzyme sequence
MSKRLYRLGIDVGLNSVGLAAIEVDESGMPLRILNAQSVIHDGGVDPQKNKEAITRKKQSGIARRTRRMRRRRKARLARLDNVLERLGFPIVESESLTEPFEEWAVRGRLAERYIEDDDERLEDISIAIRHIARHRGWRNPYQRVESLLLDTPYSDNYAELKSRVENRIGNVIDDDPTPGELVCQVLQQGFDESPRLRTTTRSSNPKTGLLPTKLMQSDNANELKRIFEVQRVDESHARELLLAIFDSQTPKGSAESRVGKDPLDKTQSRALKASLVFQRYRIANVITNLRIKEGSIERPLNMGEKNIVFDLLASTDKEDYTWGDVAQKLGLERSQLRGIGQQTRDGEDRVSSRPPRMDSIRAIQSCSDSKLRKKLNAWWAQASDNGQESMIGLLSNTVDIDKVQDEVTYSEAIDFINTLSDEELSKLDTIDLPAGRVAYSAKTLQVLTERMLQTDDDLHEARKHVFNVADNWRPPADPIGMPLGNPSVDRVLKIVNRYIVNCVKRWGTPSSVQIEHVRDGMSSVAVARKNKKDYENAIAKRSEYRKDIGKQLHLEEKVERVRESDLRRWEAVQRQNGKCLYCGAMITFKTCEMDHIVPRKGVGSTNTRTNFAAVCAECNRLKSNTPFAVWARSTPAQARGVDMSETIQRVEAFIFTRGSYTPAAQKNFKQEVIARLRQTEADEPIDNRSMESVAWMADELHRRIDWFFNHESYQYPDVLLNTTVRVFRGRLTSDARKAAHIEDRIHFIGGGGKTRLDRRHHAVDAAVIALMQPGIAQTLAERDSLREAQWMAGRLYPNEIPWQEYPNPGTERYESFHKWLEQMHKLLELLNDALDNNRVAVVQSMRLALGNSVVHDDTVHKLTKVPLKSAIDADTVRKASTPALYCALTRLPEYDEQDGLPENDERSITVHGRYVGPEDEVSFFTSAAAQIAVRGGSADIGSAIHHARIYRCWEQKAKGKTKIFYGMIRVFQTDLMRYRNEDLFHAPLFEQSVSMRYAEGRTAKAVLDNRAEYLGWLTVGDTIEVDFAEAQLTGQIAEFRDFVQSLPNGNSRAYSCWVVDGFESESRLKLRPRLLANEGLSAVCESLKCEAPNGVSQILGLKGWRVAINVLAMFKPVCIRRNAFGEPRWADKTAMPISWRWCAGKA

SEQ ID NO: 1318 - protein, 1092 aa, unidentified
  REGION 1..1092: note = Description of Unknown: Cas Enzyme sequence
MNNVNYVVGFDVGLYSVGCCALEVDESGRPVRILSALSHIHDSGLDPDKQKSSTTRLATSGLARRTRRLYRRRSKRMKTLESFLKQQNWLTRPFEDYDDPYYPWRVRASLATEMEKDPSVLGEKLSVAIRHIAGHRGWRNPYVSVKSLYTVTPDSPAFLEIKKNIQNATGKPLNADVTVGQAICAIELGKIKVKGENNKILTARLFQSDLANEIWKISQVQGLPETLTKQIIDHVFHQRTPKGSFYERIGSDPLAPSHKRALKATDAFQRYRIVTVLSNLRIHESDYRPLTPDELQKSFSFLIQAKAAKRPTWNDLANLLGIPRNKLRGTAVVTEDGEVSRNQPPIHETEAILSSTTIKPLKAFWKEATREEKDELIQALSNSGTPDVNSRVGNVVSEFISGLSDDEIAKLDTLHLPFGRAAYSEATLEKLTDEILSKGETLPAARSKCFTVPSDWVPPKPAIGEPVGNPAVDRVLKIVNRFLHAAEKKWGQPQSVNIEHVRKGFVSVKVTKEIDKENKKRAEKNQATRIEMAEKLGLDGAIRDSAVRRFQVLQRQNCQCLYCGAPIDFKTLEMDHIVPRAGIGSTNKRENLVAVCPSCNRSKNNLPFATWAKNNPNPQITVKAAVERTDFWQCDPDMNKKSFKKFTKHVQDRLKRTDADEEIDARSIESVAWMANELRARIAQYFNDKNSDKKTKVRVFRGSITSEARKASGIERRIEYINGPGKSRLDRRHHAVDALVVALMSSFVAETLTIRRNLKDAQRATESEETWRDFKGVDASHIKQFNNWSNNMKVLVRLLQQALDQDEIPVTKNLRLRFGNGRVHEDTGQALIKLPLSSEISSQMVKRSATEAQWVALTRHPDFDAKDGLKENSEREIRIHGQILSSDDDVAFFPKDAAMMLVPQGAVELGNAIHHARVYKYAKGKKESFGILRVYTVDLLKHQHEDLFKAKIKPQSVSMRYGDPAVVRAIQAGEAQYLGWLVTDDELYIPNIEALATGQLKTLLDEYGPIRHWTVDGFPSPQKLRLRPRLLSKEGLSEESHSDIRKLLDSPGWRVSSNVVFGKGEVRVIRRTQLGWPRTQSASHLPITWEVK

SEQ ID NO: 1319 - protein, 1203 aa, unidentified
  REGION 1..1203: note = Description of Unknown: Cas Enzyme sequence
MNAAPLIHKHYRIGIDVGLNSVGLAAIEVNDTGKPISILNMESIIHDGGLDPTANKSAGTRKAISGAARRMRRLYRQRRNRLHDLDKTLNDLGWPIVDLEKVHDPWYPWKARAKLVTTKVHDNNELTRLLSIAVRHIARHRGWRNPFMSLNSLLGTSAPSKEFLTLTDAIAKKLDRAPEELQTLTVAEIVQLARDLSINERNESSINTRTGEITYTTFYDISRTLRGAARVGKDDRKRVGLLQSRIHQSDNVRELRRIWDKQDLPDELFTTIVTKVFQAKSPKGSSEKYIARDALDRTQKRAEKASLAFQRFRIVNILTNLRIQESDGQRLLTTDERQLALAFLWNPLDNDGQLLPEVTWGDLSTKLGIARNRLKGTAQLTEDGERLSARPPLNVTGARIQESDISELVNEWDSADEPYQEAIIEMLGNGSGSGAEPGLISRAQEFISDLPEAILSKLDDLKLPEGRSAYSAKTLRKLTNQMLTTEDDLHAARKAIFHVCDDWKPPAAPIGEPVGNPAVDRVLKIVNRYLLACQRQWGNPLSVNVEHTKEGLMSEKVARSIDRENNMHFARNRQIANEIESYTGHKGGASGRDITKWGIFERQHGQCLYCGDPLQYPTFEIDHILPRANGEASNRQFNLAAVCRECNHSKLNIPFATWAASGIRPGVSLQDTLDRVDHFEFFGIDARNRGYQFHFKKEVKDRLLRTDYDEELDNRSMESVGWMANELHHRIEAHFARANTGTDAVTTVSVFRGWITSEARKAAGIERRIFLVGEQPGKNRLDRRHHAVDAATIAMVRQGAAQSMVTQQKARRDDPSDLDVPSILAERDNMRRTYELTTHDYEKPKDERPRPAWTLYKGSNPELFDAWKEQMRNLADLIQECLTQDRVPVMEFLRLRAGNSAGHEDTIRETLKVRLGDQLPIALIDRSATPQQWIALTRHPDFDKDHGLPSDPQRSIRVKDKWYEANDRLDFFPTGSGCVAVRGGYAELGSSFHHARIYRCRKKLRSGTETFFAMMRVYNLDLLPFRDRNIDLFSVDLPPQSISQRTAEERLRQALSTGDAEYLGWIVPGDELLLDMSTQTTGAIGTFLDQFPNTTHWVVQGLFAPSRLHLRPRYLSGEGAISVDAEQTDYDARIQMPASSVKILNGQGYLPAVNVIFGKCHPTIIRRTILGHIRTASAAHLPVTWSVRKDGNEISESCTSMEE

SEQ ID NO: 1320 - protein, 1139 aa, unidentified
  REGION 1..1139: note = Description of Unknown: Cas Enzyme sequence
VLYRIRKRYLIGIDVGLMSVGLAAIEVDESGFPIRILNLQSVIHDGGIDPQAGKKKSISRKAVSGIARRTRRMRNKKVARLRQLDLLLEELGFPIVEPDSLDARDAWRVRAKLVDSYILDDEIRKEDVSIALRHIARHRGWRNPYSSVESLLIDTVPSKQYEELRSKAEQKLGRKFLGNPTPAEIVCRVWEEQGETARLRTSRHKDKNGKVVAREGLLPVKLMQSDNAKEIRRIFETQRIDDATGRRLLKAVFKASSPKGSAAQRTGRDALAPELPRALKASMAFQEYRIANVLTNLVISVKGVERKLTVEEKRRVFALLSSDKRNDVTWIDVAEELGVERNQIQGVGRLTADGEERISSMPPRNVTVSRIRSVKLVRKKLAAWWKSASVAERETMVEILSSAVDIDRVREHMDYASASTFIDSLDDEELVALDSMNLPSGRAAYSIQTLKCLTERMLNTDDDLHEARKSVFGVGDDWKPPVDAIGVPVGNPSVDRVLKIVNRYLLACQRRWGNPQSVQIEHVREGFSSVAKAKKTEKAQAERAQYRNDLKEQIRREKLAKIRESDIRRWEAVQRQNGECLYCGRPIDFNTCEMDHIIPRKGAGSTNTRVNLAAVCAVCNKLKDNTAFSVWARTQEAIAQDTSGYKVSLRDAIERVKVFNFDQSVPSPRDQRVFRQAMISRLKQTESDPAIDNRSIESVAWMADELHRRIEAYFNRDADTSKNTIKTKVWVFRGRLTALARKACGIEGRIHFAGKQRKTRLDRRHHAVDAAVIAMLNHSVAQTLVERDSLCLSQWITRRPETWTEYPFVEGQKKTRFEEWLCRMDGLLDLLNNALDADCVHVIRNQRLALGNSQAHDAIIRKMEHVELLSSMDSDLIRRASTPALYCALTRLPDYSPENGLPENHNREIVLNGRRIRSTEMVDFFASGAAQIAVRNGSTEIGNAIHHMRIYRYRKNGKSTQEYTYGMIRVFQVDLIHASSKDLFTVQLPPQSVSMRYGDRNTVQAIQEKRAEYLGYVVPNDEIVINFEGVQMKDSEKIGAYARDFSGTASELAQRRHWVVVGSDVSKLALRPAYLAEEGLENLESDRFSEQTRKVIGKGWVVAINVLAKYRPVVIRRNALGEPRFRSNSGMPISWRWNG

SEQ ID NO: 1321 - protein, 1054 aa, unidentified
  REGION 1..1054: note = Description of Unknown: Cas Enzyme sequence
MSIRAFSFDIGTGSLGESVRVNNEIIEAHSFIIPPDFAETKTQATRRRQFMTRIAHKKREEWLKEQCKLAGIPVLEGRTPKNKKKGIPFKAGDPRLEREFPSKNDSAIYTSCLLRIMLIEGKKLEGWQIYKALHSAIQRRGFDTDVPWKRTRAKKAKDTGDKTTNNEKDNDDEADNREKTAVYMAEMLTISAGNPDFQYPCYYDAFKMGLWSPESGVVSTRIDNTAGRARNTVAPRTLVEKELRALLVNAAVQYPRLKDKIDYIIYGPTEQAYGFYFQKNRKTFGIKEGSGKKKEIKEGTEEDWKGLLGQKIPRFDNRTPDKCCLIPRYNVCRADDYLVIQATFLMKLINLRFEDAAKREARLTARDISRLFVEKQKEANEKRNQMKQDGKSPQNIAVSTADIFSMKLRKLNAWLKKYKAGKALSKNDIIEPPKTSGRSRFSRPALKLLIELILSGESPHTYHDRILKTLATTDPKKGLVESDLAFLTRMPDDWGKIHIPAVSLSDTYQGEGEAADAAVRMIIGRQKNPVVRHRLGFFHQRLVMLKEQYGIPDRVVLEFVRDAFMGEKDKAELKKRQRENKKKRDAAREKAAEIGITGNNAVTKIRLLEEQGCECLYTGQMLSINGIDEYEIDHIVPQGDKYRGADAWWNKVVTTRAINHEKGQRTPHEFISPGDTWTAYCQRVNKHKTALGRKKVRLLLSEHPEEYNERYASLAETAWIARVARDIVCLTFGWQYGEEGVKNRVPVVSGGMTSRIRRKYKLDALLHDEIPADPDELVKKNRNNPLHHALDAMVISFLTGGERTPHLPEGVTREVFASALRSLYPEPAAFSRPALEDTIYGKRDVAGFGEIMVRRVALSSLFPEERTLNVAKAIKYARKILDAPIREQIMAFLEKEPSSQNFQRFLGSLQQACGKGSFVSKVAIFKGKPKEYADFSKTDGHGQYRRDEEHHGQFVCRDAKGKYKVRPVYAFESIIKIREELISSGLDIHGFFRTGCLVEIGNSFDYNGRLIPAGRYLLSSILANGQVHIKSSFKVLDLPVHINDLMRNGFKRIQ

SEQ ID NO: 1322 - protein, 1457 aa, unidentified
  REGION 1..1457: note = Description of Unknown: Cas Enzyme sequence
MKRILGLDLGSNSIGWALVQQNFENKQGQIMAAGSRIIPMDQSILGDFEKGNTISQTAERTAYRSTRRLRERHLLRRERLHRVLHILGFLPPHYDSQIDFSKRYGKFIDDAEPKIAYNKGNFIFMDSFNEMIEDFRKHQPQLFYKKSNGEESKIPYDWTIYYLRKKAPSQKITQQELAWLILHFNQKRGYYQLRGEEKIENPNKEIAFYSLKVVEVEAEAPNKKGEIWYTIRLENGWIYRRTSKIPLDDWRGKTRDFIVTTDLNDDGTIKVDKEGKEKRSFRAPDENDWNLLKKKTEHDVDFSRKTVGAYIYDHLLQNPNQKIKGKLVRTIERKYYKDELKAILAKQIALQPEFFTENLLADCIRELYCKNQTQQQNLLSKDFLHLFVEDIIFYQRPLRSKKSTIANCPLEKRSYIDKETNERKDAPIKVCAKSNPYYQEFRVLQWLQNLRIYEIETDREVTAEFIGTAEDYETLFNFLMSQKEIDNEGLLKYFLLAKNPQIKDKVAKSELKKWLTTYRWNYVYDAADNSSKKYPMNETGYDLQRYLQKVEGLPVNFLTFDITYQLWHLLYSVKDKVEFEKALKKFAQKYQLDEASFVDSFKNFKPYPNEYGSFSEKAIKKMLPLMRFGKHWNFKNIDVHTQKRIDDIINGMANEDIRTIIREKAEKYQLNSETCFQGLPLWLAQYIVYNHHAEATDIEKWTSVSDLEAYLEDFKQYSLRNPIVEQVVTETLRVVRDVWQQYGGGQANFFDEIHIELGRELKNTSKERERLSKQNQENENTNLRIKKLLAELKEDTNIQNVRPYSLVQQELLKIYEEGVFSSTDEIEEDIQKIRKKAEPTTPEIRRYKLWLEQKYKSPYTGEVISLTKLFTEEYEIEHIIPQSRYYDDSLSNKVICESAVNKLKTNQLGLEFIQNHHGEKVRIAGNKEVTIFTEEQYKEFVKKYYANNSAKQQKLLLNEIPEKMVARQLNDTRYISKYISEILSKIVRSDEKDEGVNSKNIIPCTGKITTALKQDWGLNDVWNELILPRFERMNQLTQTQLFTSYNDRLQKNLPTVPIKYSQGFQKKRIDHRHHAMDALVIACVTREHINYMNNQHALDKSKDKKEKQQSRIDLRTILCEKKNNNWQFKKPWRTFTQEAKEALEHIVVSFKQNLRVINKATNYYEKWEEKNGVLVKKKVKQEGTNWAIRKPLHEETFSGKISLNREKVGKGNILTATRKAVDSSFDVKKISKITDTGIQKILLNYLKYKGSPEVAFSAEGLEELNKNIAQYNDGKKHQPIYKVRIYEKGSGRFVLGEKGTKSKKYVQGAPNLYFGVYQGKEKRTYATIPLNEVIERQKQGLPSVPERNEKGEPLLFSLSPNDLVYVPMEGEAPEAIDFSNLSKEQKERIYKIVSFTGKECHFVKSTIASLIKSYDAKSKIGELGSLNKLEVTISRDSRIKEVCIKLKVDRLGNITKA

SEQ ID NO: 1323 - protein, 1400 aa, unidentified
  REGION 1..1400: note = Description of Unknown: Cas Enzyme sequence
MKNILGLDLGTTSISFAHIVEDENKQKSEIKELGVRIVSLTTDEQSDFEKGKSITTNANRTLKHGARLNLDRYQQRRKYLIDLLQKANLITSSSILAENGKNTTHSTWQLRAKAVTERVEKEEFARILLAINKKRGYKSSRKAKTEDEGQAIDGMAIAKRLYDENLTPGQLSLQLLQQNKKLLPDFYRSDLQKEFDLVWNFQKQFYPNILTDSFYKELQGKGKDATSKAFSKRYHFDTAENKGSKESVRLQAYQWRAEAISKQLSKEEVAYVLTEINNNLNNASGYLGAISDRSKELYFNRQTVGQYLYAQLQENRHNSLKNKVFYRQDYLDEFERIWETQASFHKELTEELKKQIRDVVIFYQRKPKSQKGLISFCEFESKEIEIEKDGKTITKNIGARVVPKSSPLFQEFKIWQILNNVICKRKGIRKKKISAKTTQLDLLNESSQTIFSLDMECKQLLFDELNLKGDLKSDKVLKLLGYSPQEWEINYNQLEGNRTQKALYEAYLKIVEMEAHDVKDILQIKSAKDDWSLDESPLSASEIRESVKAIFQALGICTKILYFDPLLPVKEFEEQDSYQLWHLLYSYESDDSTSGNETLYRILEKKYAFKREHARILANVALQDDYGSLSTKAIRKIYPNIKENQYSTACEMAGYKHSKLSLTTEELEARELKDIIPLLKKNALRNPVVEKILNQMINVVNALIEKNSERDAEGKITKYFHFDEIRIELARELKKNAQKRYEMTQNINKAKSEHQKISEILQKQFGIKNPTKSDIIRYRLYQELEHNDYKELYTNAYIAPDVLFSKNIDIEHIVSTAFDYITSLNSEEELNQYLTRVENAYKTKSISPAKYKNLLKKASEIGDDFINRDLRDTQYIAKKAKEILFQVTKNVLSTSGSITDRLPEDWGLVDVMKELNMPKYQSLGLTEIIERRDGRKVEVIKDWTKRNDHRHHAMDALTVAFTKPSYIQYLNHLNARKDENNKLYTDILGIERKETIKIHDENGNEKRVFIEPIPNFRQVAKKHLEEIFISHKAKNKVVTKNVNKPAGTDKQQITLTPRGQLHKETIYGKYQYYVNKEEKIGVKFDERTIAKVSNPVYREALLKRLQANDNDPKKAFTGKNALSKKPIYLDEAKTKTLPEKVNLTYLEEDFSIRKDISPDNFKDLKSIEKVIDQGVKRILIKRLQAYDNDPKKAFVDLEKNPIWLNKERGIAIKRVTISGVNNAQPLHIGKDHLGKTTLNKEGKEIPVDYVSTGNNHHVAIYRDKEGNLQEQIVSFFDAVVRAQQGLPIIDKTYKQAEGWQFLFTMKQNEMFVFPNATTGFNPAEIDLLDPKNKKLISPNLFRVQKIATKDYFFRHHLETNVETDNVLKNTTWKREGLSGLKDIVKVRINHLGDIVSIGEY

SEQ ID NO: 1324 - protein, 1331 aa, unidentified
  REGION 1..1331: note = Description of Unknown: Cas Enzyme sequence
MKKEWYLGLDIGTNSIGWAATDPNYKVLRKSKRKLIGVELFDAADTAEERRLARNSRRVLGKRKWRLSLLKSLFEDEIKKVDSDFFLRLEESKYHLDDKRVNSKYVLFNDKNYTDIEYNKEYPTIFHLRAALMTEENPDIRKVYLALHNIMKSRGHFLFDGLSVDTGSFDSTLGTLLTKLGVEGIDITKVKAICTSKGNTTAKVKDFKELTNNVRVQEIFRLLFGGSVALEKIYGVEEYKELDSNVKTISFKNKVYDEVRSDYEAVLGTDIELLDNIKRVYDSLILMGIKQEGMSLSQSKMVVYDKHKSDKALLKEVIRLDNKLSDKDKKELIIKVFSKDEKGLDNYVAYTRNSGINKSCSGDAFRTFVNKVLDELQETETIKSIKEELTLGLFLPLQKVKDNSVIPNQLHREELIAILENASKYNSFFTDELKTKVIELFDFKVPYFVGPLNATSKYAWAVRNEGYENVKVTPWNYKEVINESKSAAKFIDNLVGKCTYLEGELVLPDNSLLYSEYKVLNELNALKVDGDRVSIETRNLIIEELYLNSVGVVTKAKIKKLLVAKGIIDKGAELTGISNVLGSKLKSRVDFTNILGANFDEADVEKMIYWLTVYGDAKYLIRDRIIEAFGSKYTEQEITAILKLNYKDWGRLSEKFLKGIYSKCFVDTTTGEMLNIIDIMRSQTIILMEILGNAYDLTEAVEALNSKVVGNVVEITPALVENLYVSPSVKRAIWQTIKLVERLKKLIGCEPKKIFIETTRTNQAPKVETDSRYKALVKKYSALKSKDFEKFDIDVESLYEMLKNEDPSALKSKRLYHYYSQLGKCLYTGKTIERSQVDSIALYDLDHIYPQSKVKDDSLDNMVLVCRVANGYKSDTYPLSEDIQKEHKALWSVLKANKMISDTKYERLVRVDGFTTDELTGFIARQLVETSQSVKTISKLLGKLNTTSRVVYSKAENVDQFKHNFGKIKDGNRKSTSKEKILKVRELNDLHHAYDAYLNIVVGNVYDVRFTANPRNFVSNKENRNYSLNTLFYYDVKGAWVMGETVKMVESVLNNPYVQVNKMAVRKTGKLYDATIYKANKAKPESYHPLKTKDGRMLDVTKYGGYSSVSISHYVFVGYTLVKPKESISSTYLVPIRICDVARLKTDSVILDYAKKVIPCKAKESIEDLHIIKDNITTYTKVKLGNIPVYLGGKTGNYITYRSALQIRFDVESTEYMKILTNYNGWRIANRSCEVWKSITLEKNLKFYDKILEKMQTKVIHELNPKKFDALLDNKYRELFAALDLLNQTKVLLELVNLITQRLVPNADVLKLIDFKASVGKISLVNPGIKV

SEQ ID NO: 1325 - protein, 1101 aa, unidentified
  REGION 1..1101: note = Description of Unknown: Cas Enzyme sequence
MERIFGFDIGTTSIGWAVIDYDAERGEGRIVAKAGVPGMGVRIFPEARDPDGTPLNQQRRQKRMVRRQLRRRRQRRRLLNELLCSAGLLPPFSKDKDSEWTKVMRLDPYPLRDKGVAEPLSIHEFGRAIYHLSKRRHFKGRDLEGDDPLEAKVDGAQGAALDAEEPKRLKKEKPQNATGNGDDEKKLKEEILSTHRMLEKSGKTLGQWLAAKYADAKKGAPPQERRRMAHAHRVDVEDEFERLWAAQAIHHKSLDDAGLKERVMGAIFAQKPVFWRKATLGKCRFVPDQELCPRGSWLSQQRRMLEKLNDLAIAGGNARPLDAEERTAILEKLQTQALMTWGGVRRILKPILRKKDQAEDPKFNLELDEGGALLGNPLEAKLAGIFGEGWREHLRKQDIRDAVQERLWDADYDTVGDRDGGPAQRVVVRASSGPKGRKTLRAAAAQSFIADFGATEEQAATLRDLNLPTGWEPFSTSALKAILVELEKGEPFGALVNAANDDRIMRTRENTTKETYGAWREANFPDRERPTGVELDVLPSPAVKEERERIKTLRNPTVVRTQNELRKVVNNLIRVYGKPALIRIELARDVGKSKREREEILADIRKNEKKRTAGIKDLESKGVLGPSRDVVEKWMLWKEAAEICPYTGDKISFDALFREGRFEVEHIWPRWRSFDDAARNKTLCRKDINNLKRNKTPFEAFAHDEEKWTEIRNRLDGMTAKKGGPGMSPGKVKRFLATAMPKEFASRQLNDTGYAARQAIAFLKRLWPDEGPMAPVYVQPVSGKVTAQLRRRWGLDYILADDGEKTRADHRHHAIDALAVACAHPGVTNKLSRYYQLKDELSAKAPPLDPPWPNIRKDAEAAVAKIVVSHRVRKKVSGPLHKETTYGDTGDDVKTKTGVYRQFVTRKKVDALSKNELHEIRDSKVRRLVTAHVAANGGEPKKAFEAYPTVSESGPPIRKVRLLMKQQMNLMAPVATGFADAGLNHHLAIYQLPDGRSDYEVVSLFEATRRHGRREPIVRKERPDARFTMSLSPGDAVEFPDGERKGFRIVRSVWQAGPVVTLDHRDADGASVWRPSPGSLFASNARKVSIDPIGRVRPARD

SEQ ID NO: 1326 - protein, 1138 aa, unidentified
  REGION 1..1138: note = Description of Unknown: Cas Enzyme sequence
MITSSENVPGIRYRVGIDVGLKSIGFCAVEVDRNDQPVRLLNSMVFIHDAGVDPNENKAAKSRKLTAGVARRTRRLYRTRHQRLVNLDRVLSAEFGWPLPDFSSFKYPTEPWHVRARLLDGYISDEGKRKEALSIALRHIARHRGWRNPYAKVETLLQPSEPSDFLKGLKDRISKELGRVFPADATPGQLVDAYLAHPNYVKKPGTPKVRGPEGILAGKLHQSDNAEEIRRICDVQKIAPAERDRLIRVVFEAKSPKGSAKERGLVGYDELPGQGKHVRAEKAHPAFQKFRIVSVLANLRIREGREERPLTPDELEGLVDFINQVSLKQEVTWQDLADNLGIERSDLRGTAKASFDGSPVLRNPPTDVTTEKIMACKVKWLKEWWKAADDEQRGYFVDAFSNSGGSEDGTDVNDEVAELLEQATEEDQLEFEKISLPQGRAAYSLDSLRRLTDRMLCDGVDLHTARRLEFNVGDDWKPAVEPIGAPTGNPAVDRVLKQVSRWLHAATERWGEPTVINIEHARDGLGSEKVARELMRDNEKRRQANAAAVADMAQQLGLSGKVHRSDQIRYFALQRQNCQCMYCGAPITYATAEMDHIVPRADGSSTNDRSNLAAVCRTCNHMKGKIPFAAWASSEKANEGVSLKGALERVKMWERDNGMSPKQFKQLQREVSARLKSRKPDEEFDGRSMESVAWMAVELRTRIEGFYRSRNEEFVPSVGVYRGQLTAEARKASGFENRVNLIGGRGKTRFDRRHHAMDALVIALMNPSVSRTLALRLNMRDAQRLTGVEETWKNFYGKPGEASQRFESWRESMLSGVELFNIALSENAIPFVENIRLRVGSSVIHDATVHSFCPPKTPEGQQIMTKGYGEQHALGSALPVELIDRAETPALWTALTRCPDFDPKKGLPENPSRRISVNGTRVGPEDLLNFFGSSAACLKVRGGYVELGSSIHHARIYRIDGKKIAYAMVRVFQVDLMRMKHQDVFTTPLKPSAISMRTAEPKIRLALAEGTATQIGWLVEGDELRIDTSKYRGGFIGEVLERYPEATSWRVAGFMTPAKLRIKPLLLSKEGFVDEKQAVQLGIEATSEADQKIIDSPGWLPAVNVLFGAGAVRVFRRNCLGEERWYPSNSLPVSMMVE

SEQ ID NO: 1327 - protein, 1238 aa, unidentified
  REGION 1..1238: note = Description of Unknown: Cas Enzyme sequence
TAWRLAKLPPRTTPALENPRAEGVGWARGQVRHEVACVSCLAVLCCRRLILSKSRLVSGSECSTGSFFARDPVFFRNPPEVCVGCATIGCMTYAANDKAIRYRVGIDVGLRSIGFCAVEVDDEDHPIRILNSVVHVHDAGTGAPGETESLRKRSGVAARVRRRGRAKKQRLKKLDVLLEELGWGVSSNELLDSHAPWHIRKRLVSEYIEDETERRQCLSVAMAHIARHRGWRNSFSKVDTLLLERAPSDRMQGLKQRVEDRTGLRFSDEVTQGELIATLLEHDPDVTIRGFVRKGGKATKVHGVLEGKYMQSDLVAELRQICRTQRVSETTFEKLVFSIFHSKQPAPSAARQRNRVGLDELQLALDPAAEQPRAERAHPAFQKFKVVATLANMRIREQSTSERSLTSEELNRVARYLLNHTESEAPTWDDVARKLEVPRHRLRGSSRASLETGGGLTYPPVDDTTVRVMSAEVDWLADWWDCANEESRGHMIDAISNGCGSEPDDLEDEEVNELISSATAEDMLKLELLAKKLPSGRAAYSLKTLREVTASILETGDDLSQVITRLYGVDRGWVPTPAPIEAPVGNPSVDRVLKQVARWLKFASKRWGVPQTVNIEHTREGLKSASLLEEERERWEEFEARREIRQKEMYKRLGISGPFRRSDQVRYEILDLQDCACLYCGNEINFQTFEVDHIIPRVDASSDSRRTNLAAVCHSCNSAKGGLAFGQWVKLGDCPSGVSLEGAIKRVRSWSKDRLGLTEKAMGKRKSEVISRLKTEMPYEEFDGRSMESVAWMAIELKKRIEGYFNSDRPEGCAAVQVNAYSGRLTACARRAAHVDKRVRLIRLKGDDGHHKNRFDRRNHAMDALVIALMTPAIARTIAVREDRREAQQLTRAFESWKNFLGSEERMQGRWESWIGDVEYACDRLNELIDADKIPVTENLRLRNSGKLHADQPESLKKARRGSKRPRPQRYVLGDALPADVINRVTDPGLWTALVRAPGFDSQLGLPADLNRGLKLRGKRILADFPIDYFPTDSPALAVQGGYVGLEFHHARLYRIIGPKEKVKYALLRVCAIDLCGIDCDDLFEVELKPSSISMRTADAKLKEAMGNGSAKQIGWLVLGDEIQIDPTKFPKQSIGKFLKECGPVSSWRVSALDTPSKITLKPRLLSNEPLLKTSRVGGHESDLVVAECVEKIMKKTGWVVEINALCQSGLIRVIRRNALGEVRTSPKSGLPISLNLR

SEQ ID NO: 1328 - protein, 1042 aa, unidentified
  REGION 1..1042: note = Description of Unknown: Cas Enzyme sequence
  MOD_RES 46..49: note = Any amino acid
MYVPVCWMGISQKRARARRRSRSRCVISPVTEAGGIPTRRWRRCCXXXXALRHIARHRGWRNPYAKVETLLQPSEPSDFLKGLNERISKELGRAFPADATPGQLVDAYLAHPDYVKEPGTPKVRGPEGILAGKLHQSDNAEEIRRICEVQQIDPKDRDRLIRAVFQAKSPKGSAKERGLVGYDELPGQGKHVRAEKAHPAFQKFRIVSVLANLRIREGREERPLTPDELEGLVDFINQVSLKQEVTWQDLADNLGIERSDLRGTAKASFDGSPVLRNPPTDVTTEKIMACKLKWLKEWWKAADDEQRGYFVDAFSNSGGSEDRTDVNDEVAELLEQATEEDQLEFEKISLPQGRAAYSLDSLRRLTDRMLRDGVDLHTARRLEFNVGDDWKPAVEPIGAPTGNPAVDRVLKQVSRWLHAATERWGEPTVINIEHARDGLGSEKVARELMRDNEKRRKANAAAVADMAQQLGLSGKVHRSDQIRYFALQRQNCQCLYCGAPITYATAEMDHIVPRADGSSTNDRSNLAAVCRTCNHMKGKIPFAAWASSDKANEGVSLKGALERVKMWERDNGMSPKQFKQLQREVSARLKSRKPDEEFDGRSMESVAWMAVELRTRIEGFYRSRNEEFVPSVGVYRGQLTAEARKASGFENRVNLIGGRGKTRFDRRHHAMDALVIALMNPSVSRTLALRLNMRDAQRLTGVEETWKNFYGKPGEASQRFESWRESMLSGVELFNIALSENAIPFVENIRLRVGSSVIHDATVHSFCPPKTPEGQQIMTKGYGEQHVLGSALPVELIDRAETPALWTALTRCPDFDPKKGLPENPSRRISVNGTRVGPSDLLNFFGSSAACLKVRGGYVELGSSIHHARIYRIDGKKTAYAMVRVFQVDLMRMKHQDVFTTPLKPSAISMRTAEPKIRQALANGTATQIGWLVEGDELRIDTSKYRGGFIGEVLERYPEATSWRVAGFPTSARLRLRPYLLSAEGLDKDADKAMKDLLEGSGWRPSVNVVFSSGTVEVVRRNCLAEPRYGCRASLPTSFVVE

SEQ ID NO: 1329 - protein, 1128 aa, unidentified
  REGION 1..1128: note = Description of Unknown: Cas Enzyme sequence
MIDSSANIQGVRYRIGIDVGLKSVGFCAVEVDQRDQPIRLLNSMVFIHDAGVDPNENKAAKSRKLTAGVARRTRRLYRTRHQRLVNLDRVLSKEFGWPLPDFSSFKDPREPWHVRAGLLDGYIADDEKRKEALSIALRHMARHRGWRNPYAKVETLLQPSDPSDFLKGLNERIGTALRRSFPEDATPGQLIDAYLAHPDYVGRAGTPKLRGPEGILAGKLHQSDNAQEIRRICDVQQIGPADRDRLIRVVFEAKSPKGSAKERGLVGYDELPGQGKHVRAEKAHPAFQLFRMVSVLANLRIREGREERPLSPDELQGLVDFIDQVSLKQEVTWQDLADNLGIERSDLRGTAKASFDGSPVLRNPPTDVTTEKIMACKVKWLKEWWKDADDEQRGYFVDAFSNSGGSEDGTDVNDEVAELLEQATEEDQLEFEKISLPQGRASYSLDSLRRLTCRMLSEGVDLHTARRLEFKVGDDWKPAVEPIGAPTGNPAVDRVLKQVSRWLHAATERWGEPTVINIEHARDGLGSERVARELMRENERRRKANASAVAEMAAKLKLSGKVHRSDQIRYFALQRQNCQCLYCGVPITYTTAEMDHIVPRADGSSTNDRSNLAAVCRTCNHMKGKIPFAVWASSDKANQGVSVTGALERVNMWQRDNGMLPKQFKQLQREVSARLKSRKPDEDFDGRSMESVAWMAVELRARIEGFYRSRDEESVPSVGVYRGQLTAEARKASGFESRVNLIGGRGKTRFDRRHHAMDALVIALMNPSVSRTLALRLNMRDAQRLTGVEETWKNFYGKPGEASQRFESWRESMLRGVELFNIALSDNAIPFVENIRLRVGSSVIHDATVHSFCPPKTPDGKQIITKGYGEQHTLGSALPAELIDRAETPALWTALTRCPDFDPKKGLPENPQRTISVNGTRVGPTDLLNFFGSSAACLKVRGGYVELGSSIHHARIYRIDGKKTAYAMVRVFQVDLMRMKHQDVFTTPLKPSAISMRTAEPKIRQALANGTATQIGWLVEGDELRIDTSKYRGGFIGEVLERYPEATSWRVAGFPMPANLRLRPYLLSAEGLDKDADKAMKDLLEGNGWRPSVNVVFSSGMVEIVRRNCLAEPRFGCRASLPTSCVVE

SEQ ID NO: 1330 - protein, 1128 aa, unidentified
  REGION 1..1128: note = Description of Unknown: Cas Enzyme sequence
MIDSSENVQGLRYRVGIDVGLKSIGFCAVEVDRNDQPVRLLNSMVFIHDAGVDPNARKSMETRKLTGGVARRTRRLYQTRRHRLANLDRVLSKEFGWPLTDFASFKDPLEPWHVRSGLLEGYIAEEAKRFEALSIALRHIARHRGWRNPYAKVETLLQHAEPSDFLKGLNERISNALGRTFLADATPGQLVDAYLAHPDYVKAPGTPKLRGPEGILAGKLHQSDNAEEIRRICDVQKIAPSERDRLIRVVFEAKSPKGSAKERGLVGYDELPGQGKHVRSEKAHPAFQKFRIVSVLANLRIREGREERPLTPDELAGLVDFIDQVSLKQEVTWQDLADNLGIERSDLRGTAKASFDGGPVLRNPPTDVTTEKIMACKVKWLREWWKNADDEQRGYFVDAFSNSGGSEDGTDVNDEVAELLEQATEEDQLEFEKISLPQGRAAYSLDSLRRLTDRMLSGGVDLHTARRLEFKVGDDWKPAVEPIGAPTGNPAVDRVLKQVSRWLHAATERWGEPTVINIEHARDGLGSELVAYKLMKANEKRRKANAAAVADMAQQLGLSGKVHRSDQIRYFALQRQNCQCLYCGAPITYATAEMDHIVPRADGSSTNDRSNLAAVCRTCNHMKGKIPFAAWASSDKANTGVSLQGALDRVKMWERDNGISPKQFKQFQREVSARLKSKKPDEDFDGRSMESVAWMAVELRTRIEGFYRSRNEELVPSVGVYRGQLTAEARKASGFENRVNLIGGRGKTRFDRRHHAMDALVIALMNPSVSRTLALRLNMRDAQRLKGVEETWKNFYGKPGEASQRFEAWRESMLRGVELFNIALSGNAIPFLENKRLSMNSSAVHEDTLFSFSHARPVEKGSKTLKEKGQQRELGSAISVELIDRAETSALWTALTRCPDFDPKKGLPENPSRSISVNGTRVGSTELVNFFGTSSACLKVRGGYVKLANSIHHARIYRIDGKKTSYAMVRVFQVDLLRLKHQDLFTTPLKPSTISIRTAEAKIRRALADGTATQIGWLVEGDELRIDTSKYRGGFIGEVLAKYPEAVNWRVAGFADKAQLRLRPYLLAGEGLESDAMQGMKELLEGKGWRPSVNVLFAPGSVEVVRRNCLGEERKVLGRGLPASALMR

SEQ ID NO: 1331 - protein, 1142 aa, unidentified
  REGION 1..1142: note = Description of Unknown: Cas Enzyme sequence
MIDSSANVQGARYRVGIDVGLKSIGFCAVEVDQHDQPIRLLNSMVFIHDAGVDPNENKAAKSRKLTAGVARRTRRLYRTRHQRLVNLDRVLSKEFGWPLPDLVSFKDPREPWHVRARLLDGYIPDEGKRKEALSITLRHIARHRGWRNPYAKVETLLQPSEPSDFLKGLNDRISEKLGRAFPADATPGQLVDAYLAHPDYVGRAGTPKLRGPQGILAGKLHQSDNAQEIRRICDVQRIEPAERDRLIRVVFEAKSPKGSAKERGLVGYDELPGQGKHVRAEKAHPAFQKFRIVSVLANLRIREGRKERPLTSDELEGLVDFINQVSLKQEITWQDLADNLGIERSDLRGTAKASFDGSPVLRNPPTDVTTEKIMACKVKWLKEWWKAADDEQRGYFVDAFSNSGGSEDGTDVNDEVTELLEQATEEDQLEFEKISLPQGRAAYSLDSLRRLTDRMLRDGVDLHTARRLEFNVSDDWKPAVEPIGAPTGNPAVDRVLKQVSRWLHAATERWGEPTVINIEHARDGLGSEKVARELMRDNEKRRKANAAAVADMAQQLGLSGKVHRSDQIRYFALQRQNCQCLYCGAPITYATAEMDHIVPRADGSSTNDRSNLAAVCRTCNHMKGKIPFAAWASSDKANKGVSLKGTLERVKMWERDNGMSPKQFKQLQREVSARLESRKPDQEFDGRSMESVAWMAVELRTRIEGFYRSRNEEFVPSVGVYRGQLTAEARKASGFENRVNLIGGRGKTRFDRRHHAMDALVIALMNPSVSRTLALRLNMRDAQRLTGVEETWKNFYGKPGEASQRFESWRESMLSGVELFNIALSDNAIPFVENIRLRVGSSVIHDATVRSFCPPKIPDGKQIITKGYGEQHLLGSAMPVELIDRAETPALWTALTRCPDFDPKKGLPENPQRTISVNGTRVGPTELVNFFEFSKSGPKACLKVRGGYVDLSGAIHHARIYRIAGKKTAYAMIRVFQVDLLRLKDHDVFTTPLKPSTISMRTAEPKIREALANGTATQIGWLVEGDELVIDTSKYSGGFIGEVLARYPEATSWRVAGFMTPAKLRIKPILLSKEGFVDETQAALLGVEATSEAIQKTVDRPGWLPAVNVLFGAGGVRVIRRNCLGEERYRSSASLPVSMTLE

SEQ ID NO: 1332 - protein, 1158 aa, unidentified
  REGION 1..1158: note = Description of Unknown: Cas Enzyme sequence
RSIYFPETYRSIRENPRFRTHFLTLNPHVSMIDSSENVPGIRYRVGIDVGLKSIGFCAVEVDRNDQPVRMLNSMVFIHDAGVDPNENKAAKSRKLTAGVARRTRRLYRTRHQRLVNLDRVLSKEFGWPLPDLTSFKDPREPWHVRAGLLEGYIADDEKRKEALSIALRHMARHRGWRNPYAKVETLLQPSEPSDFLKGLNERISTALRTTFSAEATPGQLIDAYLAHPDYVGRAGTPKLRGPQGILAGKLHQSNNAQEIRRICDVQRIEPAERDRLIRVVFEAKSPKGSAKERGLVGYDELPGQGRHVRAEKAHPAFQLFRMVSVLANLRIREGREERPLTPDELEDLVDFINQVSLKQEVTWQDLADNLGIERSDLRGTAKASFDGSPVLRNPPTDVTTEKIMACKVKWLKEWWKEADDEQRGYMVDAFSNSGGSEDGTDVNDEVAELLEQATEDDQLEFEKISLPQGRAAYSLDSLRRLTDRMLRDGVDLHTARRLEFNVGDDWKPAVEPIGAPTGNPAVDRVLKQVSRWLHAATERWGEPTVINIEHARDGLGSERVARELMRENEKRRKANASAVAEMAAKLKLSGKVHRSDQIRYFALQRQNCQCLYCGAPITYTTAEMDHIVPRADGSSTNDRSNLAAVCRTCNHMKGKIPFAVWASSDKANQGVSLTGALERVNMWQRDNGMSPRQLKQLQREVCARLKSKKPDQEFDGRSMESVAWMAVELRTRIEGFYRSRDEESVPSVGVYRGQLTAEARKASGFESRVNLIGGRGKTRFDRRHHAMDALVIALMNPSVSRTLALRLNMRDAQRLTGVEETWKHFYGKPGEASKRFESWRESMLRGVELFNIALSDNAIPFVENIRLRVGSSVIHDATVRSFCPPKTPDGKQTITKGRGEQHALGSAMPVELIDRAETPALWTALTRCPDFDPKKGLPENPQRTISVNGTRVGPTELVNFFGSSAACLKVRGGYVELGSSIHHARIYRIDGKKNTYAMVRVFQVDLLRLKDRDLFTTPLKPSTISMRTAEPKIRKALADGTATQIGWLVEGDELRLESDKYTGGFVGDVLASYPQMTSWRVAGFPDPAKLRLRPYLLAGEGLDGEASKAMKDLLEGQGWRPSVNVVFSPGSAVLVRRNCLGQERRNSGGTLPNSSELR

SEQ ID NO: 1333 - protein, 1177 aa, unidentified
  REGION 1..1177: note = Description of Unknown: Cas Enzyme sequence
MLHRVLLREGPGNFLKRTQMYVRCDTMCPMTTSSENIPSIRYRVGIDVGLRSIGFCAIEVDDEDHPIQILNSVVHVHDAGTGGPGETDSLRKRSGIAARARRRGRAQKKRLKRLDALLEDLGWGVVSNEMLESHAPWHVRKRLLNEYITDDVERRQCLSTAAAHIARHRGWRNPYSKVDTLMLEHEPSDRMRGLKNRVEEQTGLCFSDQATQGELIATLLEHDKDVTVRGFVRKGGKATKELGVLQGKYMQYDLVAELRQICVKQKVSDEVFKQLVSTIFYSKEPQSDKKNQRKRVGIDELQLAVDPQAVELRAERAHPAFQKFKIVATLANMRIQEDGVGERALRPDELHAVTAYLLDESGVGIPAWEEVAGQLGVPRHRLRGASKASLETGGGLRYPPFDETTARVAESEIDWLVDWWMQADDESRGHMIDEISNGCGSETNDIEDEEVIELISSATAEDAAKLELLAKKLPSGRAAYSLKTLREVTSSILETGDDLSRVIERLYGVEPGWAPTPAPIEDPVGNPSVDRVVKQVARWLKFAEKRWGIPQAVNIEHTREGLKSASLLEEEKENRIKFEERREERLKKMYAQLGISGPFRRSEQTRYEILYLQDCACLYCGCKIGFETFEIDHIIPRVDASSDSRRENLAAVCHSCNSAKGGMPFGQWAKLGDCPSGVSLKDALKRVGRWDKDRAGLTDKAMRKRKAEVKSRLKTETPYEEFDGRSMESVAWMAIELKRRIEGYFNSDRSKVCAAVQVNAYSGRLTACARRAAHVDKRVRLIRLKGDNDHHKNRFDRRNHAMDALVIALMTPAIARTIAVREDRREAQQLTHAFLSWKNFLGSEERMQERWESWIGDVEYACDRLNELIDANEIPVTENLRLRNSGKLHADQPESLKKARKGSKRSRPQRYVLGDALPVEVINRVTDPGLWTALVRAPEFDAETGLPANPARSLSIRGSRISADFPVSYFPTDSPALAVQGGYVGLEFHHARLYRIMGPKEKVTYALLRVCAIDLCGIERSNLFAVELKESRISMRTADPKLKEAMKEGTATQIGWLVLGDEIQIDPSKFPKQSIGKFLDECGPISSWRVSALNTPSKITLKPRLLSNEPLLKERNGARKSDLVVSECVEKIMKKTGWVVEINALLKSGSIRVIRRNALGEVRTSAKSGLPISLNLR

SEQ ID NO: 1334 - protein, 1142 aa, unidentified
  REGION 1..1142: note = Description of Unknown: Cas Enzyme sequence
MITSSENVPGIRYRVGIDVGLKSVGFCAVEVDQRDQPIRLLNSMVFIHDAGVDPNENKAAKSRKLTAGVARRTRRLYRTRHQRLVNLDRVLSKEFGWPLPDFSSFKDPREPWHVRAGLLDGYIADDEKRKEALSIALRHMARHRGWRNPYAKVETLLQPSEPSDFLKGLNERIGTALRRSFPEDATPGQLIDAYLAHPDYVGRAGTPKLRGPEGILAGKLHQSDNAQEIRRICDVQQIGPADRDRLIRVVFEAKSPKGSAKERGLVGYDELPGQGKHVRAEKAHPAFQLFRMVSVLANLRIREGREERPLSPHELQGLVDFIDQVSLKQEVTWQDLADNLGIERSDLRGTAKASFDGSPVLRNPPTDVTTEKIMACKVKWLKEWWKDADDEQRGYMVDAFSNSGGSEDGTDVNDEVAELLEQATEEDQLEFEKISLPQGRASYSLDSLRRLTCRMLSEGVDLHTARRLEFKVGDDWKPAVEPIGAPTGNPAVDRVLKQVSRWLHAATERWGEPTVINIEHARDGLGSERVARELMRENERRRKANASAVAEMAAKLKLSGKVHRSDQIRYFALQRQNCQCLYCGVPITYTTAEMDHIVPRADGSSTNDRSNLAAVCRTCNHMKGKIPFAVWASSDKANQGVSVTGALERVNMWQRDNGMSPKQFKQLQREVSARLKSRKPDEDFDGRSMESVAWMAVELRARIEGFYRSRDEESVPSVGVYRGQLTAEARKASGFESRVNLIGGRGKTRFDRRHHAMDALVIALMNPSVSRTLALRLNMRDAQRLKGVEETWKNFYGKPGEASQRFESWRESMLRGVELFNIALSDNAIPFVENIRLRVGSSVIHDATVHSFCPPKTPDGKQIITKGYGEQHTLGSALPAELIDRAETPALWTALTRYPDFDPKKGLPEDPQRTISVNGTRVGPTELVNFFEFSKSGPKACLKVRGGYVDLSGAIHHARIYRIAGKKTAYAMVRVFQVDLLRHKDQDVFTTPLKPSSISMRTAEPKIREALADGTATQIGWLVEGDELVIDTSKYSGGFIGEVLARYPEATSWRVSGFKTPSKLRVKPLLLSKEGFVDENEAAKFGVEATTEAVQKTVDDPGWLPAVNVLFGAGGVRVIRRNCLGEERYRSSASLPVSMMLE

SEQ ID NO: 1335 - protein, 1138 aa, unidentified
  REGION 1..1138: note = Description of Unknown: Cas Enzyme sequence
MIDSSENVPGIRYRVGIDVGLKSIGFCAVEVDRNDQPVRMLNSMVFIHDAGVDPNENKAAKSRKLTAGVARRTRRLYRTRHQRLVNLDRVLSKKFGWPLPDLTSFKDPREPWHVRAGLLEGYIADEEKRKEALAIALRHIARHRGWRNPYAKVETLLQPSEPSDFLKGLNDRISEKLGRAFPADATPGQLVDAYLAHPDYVGRAGTPKLRGPQGILAGKLHQSDNAQEIRRICDVQRIEPAERDRLIRVVFEAKSPKGSAKERGLVGYDELPGQGRHVRAEKAHPAFQLFRMVSVLANLRIREGREERPLTPDELQGLVDFIDQVSLKQEVTWQDLADNLGIERSDLRGTAKASFDGSPVLRNPPTDVTTEKIMACKVKWLKEWWKEADDEQRGYMVDAFSNSGGSEDGTDVNDEVAELLEQATEDDQLEFEKISLPQGRAAYSLDSLRRLTDRMLRDGVDLHTARRLEFNVGDDWKPAVEPIGAPTGNPAVDRVLKQVSRWLHAATERWGEPTVINIEHARDGLGSERVARELMRENEKRRKANASAVAEMAAKLKLSGKVHRSDQIRYFALQRQNCQCLYCGAPITYTTAEMDHIVPRADGSSTNDRSNLAAVCRTCNHMKGKIPFAVWASSDKANQGVSLTGALERVNMWQRDNGMSPRQLKQLQREVCARLKSKKPDQEFDGRSMESVAWMAVELRTRIEGFYRSRDEESVPSVGVYRGQLTAEARKASGFESRVNLIGGRGKTRFDRRHHAMDALVIALMNPSVSRTLALRLNMRDAQRLTGVEETWKHFYGKPGEASKRFESWRESMLRGVELFNIALSDNAIPFVENIRLRVGSSVIHDATVRSFCPPKTPDGKQTITKGRGEQHALGSAMPVELIDRAETPALWTALTRCPDFDPKKGLPENPQRTISVNGTRVGPTELVNFFGSSAACLKVRGGYVELGSSIHHARIYRIDGKKNTYAMVRVFQVDLLRLKDRDLFTTPLKPSTISMRTAEPKIRKALADGTATQIGWLVEGDELVIDTSKYSNGFVGEVLARYPEATSWRVAGFMNGTQLRLKPLLLSKEGFVDEKQAERLSVEPTSEAIKKTADSPGWLPAANVLFGSGQVRVIRRNCLGEERYRSSASLPVSMMLE

SEQ ID NO: 1336 - protein, 1361 aa, unidentified
  REGION 1..1361: note = Description of Unknown: Cas Enzyme sequence
MTSLISLDLGGKNTGFFSFTAKDVSIIDTFQSGTIIYDESFVLSQVARRGKRHGKRNNLRNTLVKRLFLLLLQKHYGLSLDFLPDEILGLFNKRGYTYASFEIKEDEKENLESDILKEFLNDKLNYTIQNDDEVEEFLNQIASNEETFKNYKKDFENLFGASTHQPKKQIELIDEIKKDLEKEDAKELLDGLKVIKKIIDEFHKQQNQGNLPRAKYFEELYLEIEYNLKIQKFFTCNHLHINDMQYLIGNLSNYQLKELRRYFNDEAMAKEDFWSCEKLHRITWRFIQSWHPKSPEDKQRQKENLANLKTKSIIEFLTTTNPLMTIPPYDDMNNRGAVKCQTLRLNEEYLDKHLPHWRAIAHTLASETQKENLEGVTVKGYSEDSTLLHRILDTSSIIDPYRLRSDEIDSYCDVLTKDNAFALKKFAKEYYQLVKEKVRTGIWTKDDDMFKKCDHNPPHKNNQIHNLVAGILGKPIAKERFEAFENELWNVKFGNKKLSSYCKNIEEFRKSNGNLFKQIVELGEDKEVQKYQKELNEWVRKIGEFFNIETPYRARFNNLFSMAQLHTIIDTTRSGFNATCKWCSCENQYRASTRIEIDEQTGEITTNANCQRLPADTQRPFSGKIERYIDKLGYEIAKVKAKELEGIKEDTIDLKIILEQNAFAYEESIRNAKIKNANAKAKKALEEAQKRGLKNIEDKTKRIKDFSNSICPYCGQSLGEDGEIDHILSRSYTLKKYDTVFNSEGNLLYVHQKCNQAKLAKTDYSLQDLKIDISQKWIEEQIATIKTYKTFSVLTQEQQKAFKYALFLDNSNEAYQKVISWLRTDQSSRVNGTQKYLAKKIQEKLKAMFPAKTFNFEFILADANDVHDLRIKAYQLPEKPKDSKQETYSHTIDAVMSLVSVWDKVLPKTEKPTKEDILKFANVENWSALNNEFLTKGKSANQKIEEMIQANDFGQKNMRQVFSKPIFKDESIGERYKPFVRYHNQFYIGYPISIKDGYDMQHCQAMISKNDISRVEEILKDTSLCTLLKEKNGIKLYSINKQSINELSNQFFNLNYQNLNDAQKKKSELAEFVINHCKYYVKKTSVINAPQFIDKDSMKPYPFYKDWQKFHEAYKKELDAEPKTKKDNGKLVYDISGIDDFWTEFCKKYFGIKTKDNRNKARKVFSIVALTSAPGTVFRIKRKTPKGHIYQATAIDNQQISGDYANVLLAGNSKTLALAGQKPSSDLKKELSVKESKDIRDIKLEPSRFFKEGFDCRGIEVIVNKTSATIKNFPLTKIDKKIKKLIFKTLFEKKDGKRQKQKTSISLKEKNTMQETLKKLLKDSIKVTIRDGSISGIEISKKTVNFTLPFKSENLAKLLDD

SEQ ID NO: 1337 - protein, 912 aa, unidentified
  REGION 1..912: note = Description of Unknown: Cas Enzyme sequence
VQRRGFLSNKKTRLGGEMLDDPDVQAVLAELGDDDADDGADAEETAFKTDIKELRNEIEKSGKRTLGEYLASRNTDEGKRNRQRNGGHLRTDRQMYRDELDKIWQQQAKHHPVLTAAVKGEIEEIIFHQRPLKPPKNIGKCSLETRNKRCKVARLEYQRFRYLQDINNLKYHCPHSEGDIRPAEDPDKHTKMVNIFERKAAPTFAEIRKALGLKRIKFNQEYENSVKKLKGNATACAIREILPEWDGWTEDKRIRLVEDLLTIRKQTALKARLMGHWKFPSKTAVQLCMLEFEPGYGDHSLKAIRKLLPHLEHGKIYSDAREAAGYGYEQQKTLSANRLGPPPEIPNPIVQKGLHELRRVVNAIIAEHGKPDVIRIEMARELEMNTKKYKAFLKQQKANTDANDRAIKAYEAIAKRESGLRMSSHVGKTNKIKYRLWEEQGERCVYSNRPISQTALFSDEVEIDHILPFSQSLDDSYMNKVVCYAKENRYKGNRTPKDAFSGDPAKWGQITSAISGWPKQELKSKHKRFYMTEADILKRDFIGSQLTDTRYISKEAGKYLESLGAEITYTRGAMTAWLRHHWDLNRLISETDKKERTDHRHHAIDAVVTACIDRGFYQALAANAKREERTGVRMRDLITDAPWDDLRSETEDKLNQIIVSHVPQRKISGALHEETGVGFIDGVGTVYRKNLDGNFTQKNAESIIDPVIKERVTQHLKAYGNDSKKAFADNVTVYHKNGRTPIKRVRVVQAKTDEAKLKKNKFGVRNKQGEIFRWMAYGNIHHVEIIRNKKNGKYEGVFVTTMEAAQRARGINSSKEPIIRTNHKEDREFVMAIHINDLVSIKVDGNTQFYRVQKLDRGPKQIKLRLHNAATIKNEAETLTAKESTIPALMKKELRVCKINAIGKLQDDKTHS

SEQ ID NO: 1338 - protein, 1114 aa, unidentified
  REGION 1..1114: note = Description of Unknown: Cas Enzyme sequence
MRYRLGLDVGTASLAAAALSLDTENQPQDLVWRTIRIFSEPLENDQGKLKSKKATRREARMQRRQIDRRRARAKRVAALGNLLGLTHQPPQPANGSNLPQLRALAARGRVELNDLLHIFLRLAKRRGYAGEFRPKKEGAKLGEVEGGSNDLKAAMRHLAEAKGVETITLGEYLYHRLQQGLPTKLKVKENNSDASTSLPNLYALRGQVEAEFDHLWQTQAAYHPVLNSADNGRPLKTIFHEAIFYQRPLKSVGSMVGQCSLEPTLPRTPRAQPAFQRFRIEKTLADLRWGAGKRAEALSAQQKNIIHQLLDEKEKVSFTSIYKALEKAGCPKPETRGLNLEGLSRDELHGHKTNHVFHKLGLESEWRSLDARTQVQAVNFLADLGSPEQLDDPQWHTRFVKRIKTDTKDKDGKWIYEERPRQLDQSFVDFINLLKQNEKFDRLSKMGFDSGRASYSIKALNRLTEWLSEPWWPGDYSGEMRVDEDAAIRMCYPQSQAKPSAQLARLPAPKSTGNAVVDGALRQIRYEVNRLIDKLGAPPAEIVVEMAREMSLGPTRRNEREAENAKNRYARLAAEKAIREANATVTPSRVRKYLLWREQGEKFCPYCERPINLEDALSGAETEYEHILPRTLTQVGMKRSEIVLAHRSCNQEKGNRTPWEAWGDGRDPARWAIVEQRAAWFEDKKNWQYHRKARLLRLKDHEAEVLTDESITGFADRQFHQTSWIAKEAALWLQSICPSPVSVSRGQLTAMLRRGWKLETVIPEARIAEGLPVLDEENKVITPEEFERYKPIWEGHRAPSRELHTNRKLNKRIDHRHHLIDAIVIALTSRGLFQDMARRYKLESENCAEGERPRLKTPEPPLKTVREAALAAVQDCPLTIRPDRYPDGAMFQGTAYGVAQKDGEDKLRLTLRQPLAELVDRKKGTVEQARRAIAAIVSDDIRGLVSKAFEKRVTEGKSAPAALAEPIYQEYFGKRLPIRKVCCYTEKYAEEATVIVHNSRNGEHKKYLLNEGYAYLECKPEERPRPVPIREAILMKTKRVNNGVTRIYKGDTVKDMDDGLLYRVCYFKAAGTIALLPICEPRSFKEANEKAARECKVGKTISFGPAAKRLVVIE

SEQ ID NO: 1339 - protein, 1244 aa, unidentified
  REGION 1..1244: note = Description of Unknown: Cas Enzyme sequence
MTAQFSFPAELVEQRAAAWLSHEFYTSAVVLGIDIGIEGIGVYLRKGPEELWARSIQMELPEAEPLKNRRQMRAARHCRNNRKLRTRRLRALMEKHGLPWPDDKQMGNDGRSDPFILRHRALNQGLGSPIALAICIRHAVTHRGYDYSLGGESTEGDYPWGESNSMDEAKKWMATATLDDETAKQLREIGPELEWKGMHSGSEEDRERKQAEVLAAWEDLISNRLEYSRDHNIARVLADHAKSDKHTNLRARARTWNFPRSAVQEHIRQIVMHERHAAYLPDREGFLAALFLKPKTKEEKDRAIFHYNRKTRAEMEQHWKKKTRACPYVEPLGIKSTTKDDKCAPLSDWSIRRWLILEFIATRRLMIEAPAAKPKGAALIKKRGSGLPHRPSADAIAAILARAQADHAVRTGGATTGNPLTRAEVRELLLDDARRVTGIEKAKLSSATKETDPNYSYFNQLWDLVCPSAAGMRGTSSLCSSSAEALFAIATGLRDGGVTPDYDPTSIHRRLTECEYYLWKRRPRFEYGCFPQVEKLTGPYPALCKSYQAAKAASTPGRRIQGLHCGGLLGRIFNECRERLPAGCTAPDYCVIEVVGDPPRNSEQKKEILKEQAKRRADREAAFAEASKADSGVASRRRRIALHRQQGGICPFTGEELGDPLGDGLEIEHLFPQSRGGLSVDDNLVLTTRKVNAAKGNRVPSAFAKDSGVSWDEMLEFTRAMKWSAKKREIFAWDAPRNSGESEQPAFPDFGNTTRVSQLARQLKAAVQMWMGVFDDADESTRRIGTPTGWHTAQARRTWLPPLNNGTSKVRDDNVHHLVDAAVLSHIPPGVGLNSVACGGVFYSEMEQFTLLVPSTGNTREVWRPVTRALPGLLPHERIAHWRPENLDYLTCPILKLSSPNKWRSLGDSTFWRQVHPNRPTVAQRTPLKPEDYQDADALLADLRKMTPSDPDAAALWERNLPSVSAVSEWLRKATAATKKEAKDIQLANVPLLLRDGTPIRTVWKFDSKGSMKTGLGWTGEPSEDQRIHHLRSLTDKYDRIELWLGYNQKKKEWQYQTRLVPAASALKHLKRMGLKWWRDKSVKAPVFLQPKPDAPPEQWKSLREIICSPLLPFSVKVGSIARGDTFRLALDATGAITQSGQPVWAGWYSVTAINASGKTELKSIQFKDQATTPLGHLKRNILSHEPSSPPVLAYITGLLSACEQAAILALQPPKNKGNDSPPDSGRGRRRPSFRSGETDLGLA

SEQ ID NO: 1340 - protein, 1121 aa, unidentified
  REGION 1..1121: note = Description of Unknown: Cas Enzyme sequence
MADKTLGALTFGFDIGIASVGWCVLGENRIVDLGVRAFDKAETAKEGESLNLARRTARLMRRRLRRRAWRLTKLARLLKREGLIADAFQMHQPSATSPWKLRVEALDRRLTDDEWARVIYHLCKHRGFHWISRAEEKKAEGDAKGESGRVKKGLSDTQRRMGEKGYRSAAEMVLAEFPEAQRNKQGDYGKALSRVLLSEELALLFRRQRELGHTHASKELEAAILGNGDRKGGLFWAQKPPLAGADLLKMLGKCTFEKDEYRAPKASFTAERHVWLTRLNNLRVVVDGTTRPLTEDERRVALPLPYGYADAKLTYKQLRAALSKAGLSNFSFAGIADDKEKDTLTKLPAWETLSKTLKGKGLETEWEGMAGAATGGDPTLLDEISRVLSVYKDGDEVDVELRKLPLPGGEKMVETLSEISFDKFHALSLKALRKIVPHMETGLRYDEACAAAGYHHSQLHEAGAGGQKYLPPFYTRRDKDGRMVFDEELDVPRNPVVLRALNQARKVLNALVRAYGSPSAVHIEMARDLSKPLVGHPTPNGGYIEGRRDIEKLQKEYRERNEKDKAAFAAEHGIAAKSREFEKFQLYREQQGKCAYSLKPLDLHRVLHDIGYAEVDHALPYSRSYDDGKNNKVLVLTEENRNKGNRTAYEYLCAFPGGENGERWRNFVAYVESNKSYRLAKRTRLLRKDFGGKAAEEFRERNLNDTRYICKFFKNFVERFLQLKVGADGTAAKRCVVLSGQTTAFLRARWGLLKVRGASDRHHALDAAVVAACSHGMVKRLADYSRTKELAKVRDGFPDPETGEIVDPAMFQQLHAHFPDPWPHFRGELEARLQLDDSAELRAQLEMFGTYPAEALETLRPLFVSRAPQRRNGGAAHKETIYAQPERLKEQGGVTQKVSLASLKPTDIDKLIDPHRNEKLYAAIRARLEAHGGKSDKAFPADNPLRKPDRDGNPTGPIVRAVTMVIDKLSGIQIRGGIAKNDTMLRVDVFRHKKDGKFHLVPLYVHHAVAQELPNRAIVAFKDEDEWTLIDDNFHFLFSFHPNDFIRITQKNKAPILGYYASCHRGTGNLNLWAHDRNQKVGKDGQIEGIGVKTAVALEKFHVDVLGNIYPAPPEQRHGLA

SEQ ID NO: 1341 - protein, 1068 aa, unidentified
  REGION 1..1068: note = Description of Unknown: Cas Enzyme sequence
MEYKDNLIFGIDLGVGSIGWAVMDNDKKIIDKGVYKFTQANSAQDRRTARCTRRRYHRRKYRLERMQILLEKNNMPSKKNTDSELLDKRIKALNEKIELNDITNIIYYFTLHRGYIPTKKEDRESELIINLKEKYEYPCLIQKELLKINNKYRSTENPILHKDFEKELLEILNVQSKYYNNINENFINNVIDIINTKRKFWEGPGAPREDALSPYGRYRNKIDLEEYNKNPNYRKYLFQDLIGNCSVYANEKRASMANYYAESFNFYNDFVNLRIPKSQVNENNIQYLSYADGKDESKLYNFTTEAIYMIANQIMEEKRVDIKKIIKKMFGIEEFLGYKVDSKGSMEISRFQNTKEIRNKITNTNLYNMLFENKDIYNKIVNMIQISPDITSRREMIQDILKNSNVKELNNEDFINELSEIEIDNKYHSFSEKALKIYLEYMLRDNMNSSKIERIYKEEIASDFEDEIIDEYLANINDGELKYINDKFIDDTISSPATKKSLRKAIAILNKLFSKYGYPKYICIETTRDLLSQDRQKEYEKKTLDNARLRKKAQEELGENATETNIIKYMLLKETNNKCAYCGIDLKVENCEIEHILPLSITSDDSYDNKTVSCHNCNNIKKNKTPYQYLRNDGRYDEYKNRTLSNKEFSNKKKYYMTFEEELNKYEKKFKNRNLNDTAYATNELSNQIEIFKKAYTISRNKDLKTQVLRIPGQFTHNLRVKFNIEKDRSEEYHHAVDAVIIANYANTKIGKLMDLIQNHKDKYWMVSNMEDYRNENEMFDNIFMNKLLINELKNADWSNTRFSREVVKRTNGQLFDADIRKAIMLDNQYYFIEQIDNIYELSKKDAENIFDKKLLIKTKNPKLYDKLKNIVEQYKGSKGNPFVEFCKENQDIDWTSTVFNPSIHGIRVTNKQNSDVVIKLRFLTKVNTPFILDKKSVNKKDGTINIRTSLNSYGTRIFTDGEKYYFLPMYKVFTDLKTGKIDVNNDYYKTIYNIYVGKENVDFVIDLFNNDYVRFEDKNGNINEGYVSYFHKTLNKVEIKNSNSITSTSKNIKKIKSDILGLYNLNI

SEQ ID NO: 1342 - protein, 1058 aa, unidentified
  REGION 1..1058: note = Description of Unknown: Cas Enzyme sequence
MSELQFKTSFELALDLGHSSIGWAVFQKGKTFDLLGTGVVLFPADDCLAIKRRAYRRQRRHIRATRQRIERLKRLLLHVEALSEAELNEPGCAWPWKLASEVLNGSGRLLTWPELWDVLRWYAHNRGYDGNARWSRDKNEEDTEKEEWAKSLMKEKGATTMAETFCAVLHINPVGVKKASRERFKGLNAAFPREVVYTEVKRILEKHAGMLSRLSPELIRALVSNDNYETREWDDDAWKALSVPEIGVRWPKRYKGSYLFGQSVPRFDNRIISSCPITYQRVLAETGDSRKAARDSKVPVKKCREFLLYRWAMILANLRVNKGRGMEPLTGEERKAVHAVMVKEGHLTKRELKKVLNEQTGALLGNNVDTCFLVPRAEEALVLRPDKLPSGRAPYTRQVMKQAIREVFEGKHPTEKGNSLYLGDDIKEAQLQRTLDEKTNNHLVRHRVLITRRLVQDIIKSYASADASRIGRITIEVNRDLQAFSGKTNKEIESELNQMLKDHSGVVKQLEKKFNEASKPYRITAGLIRKARIASDLGWRCPYTGKDYDAIDLAERAYDKDHIIPRSLRPSDSLESLVITSPEVNKMKGNRTGMQFIRDEGGKDIEGSKSVGQMRPNLFSEKEYRQFISKLDIRNGHKQDRDRKKKRRDLLELEKYEEKGFLPKDLTQTSHLVRLAAIEIEKEFGGLENKPRIVSLPGSVTGEVRKGWKLYGCLAAHNPEVQKLLEREKTEDLNIKKELRDITHQHHALDACVIGYASHFLPNDGGLWEILVKRNRRPDETQMLIAQKIYSSDSEGRARLRDLSPALKQQLTDRLAECRVVQHVPKRMGGLAGLEENTRGIVSIEVPDAEASPGKKPKESKLKEIWNNQNGQPMPDLQNTEGVIVHLRQYGPRDPKNHDKRARKPSREKASKLLGLRPENGNGKLRAIKGVRVVEANFGLALWRKNGKADGEPMARIILWNKVWPQLKAIAVKENGGKWPDVLRAGQIIHVPKSGKQSNYQGFWKIKGAEDQEQRGMTLKISRVDSASTEKIAAAVKTLLECGMMVVKSGLTGVPLNM

SEQ ID NO: 1343 - protein, 1447 aa, unidentified
  REGION 1..1447: note = Description of Unknown: Cas Enzyme sequence
MGKNTSLELISPIAIDLGAKNTGVLIAQGGVTASPDTYERLGCTFVFPEVGLELSQKNRLAKRHQRRGFKRRRLSKRLLQLVLKQIYAGADEAFFADFQKLRTFLNRRGYTYLTLEEAQDILEGIQSIDQDTRIAIIDVIGTKSGLVANKNFLQQLEKTDQKPLEFYRTLLENCEHATSRENKSIDKDLKKMIRSIQEYCLGIVKAEEEGHKTRSEYLRNVRSDLQMPEYANLANKFGLESGQLANLTGNIANLQLRVLRRYFNDPKMAESDYWDEKRMERIFVRYLKSWHVRKNDKEYTARQQIIEYIKKSGLYKTFTETNPELTIPPFEDQNNRRPPTCKSLHLDEYRLDSLYSAWRTWTKKLVEPKRNLYEMVQADADPEIQWISGYYDRSAPATEHGVPKSVDAIVLQRLLDRSSALDDYKFRVLVQVERMVEAGEPPAEGLKRAYESGKKELVEALGAAAASEFTELARRYYAETARAKRGLWLPGEDGNLLFRCDRKPRQKKNLKEELVGHILGTDLRREGMWQKWESLYDEAKSINGRSSVASVCRNLEEARKDLGDEFHFYWNRVQRKTFKANPGDRVEKEVLKHIDSAQKAAALIATVLEHNQEASARYTNPYSLAQIYNLMEGDAAGFHSTCPACTRENFWRSSPAAVAVAEADGQTTARASRLTADTMRPFDGFLARYLDRLGEKIARQKWQQLQTIENADRVLVPILLEQNRFRFGSDLAEIKQSARRKQAREKLERAEQREHDKWERIRKAGHGICPYTGERIGSVGEFDHILPRSYSRARFGSVFNSEMNLVYASPKGNRQKLDNRYTLKDLNKTYLQKVFGTTEIDAIRKQIKGTLNKHTKPNSVYFHTLDSDEQRDFRHALFDDELTGRVQPLLQTQYKMRVSGLQGYLARVIYAKLRELNANKKMPLAFTVFGYDAGEPTLVARRENLSVHKDAYRKPRETQQAPGSHIIDATMVWAQALERGDVPGLPAGLLLEGDALEELLPNTVQIVSLESRKQYRRKRPQSMQIFKDTIYAERYLSLIVGAKECGFGFDLKNMAAFDYENLPFVFELLKPFCAFRGEALTEPLEHYLAALNKKKKFVYFNIIREKAAEFQQQLAYAPSLTSVQTNQMNLLGGVRYFTLKKEIFGAMSDAQGKATPVFQDPKAREKFAVKVNFSLTPEGKKPLRIANRISLPQAYGWDQLSKDKTVTAITRKGMRWQELSDAEKEALTGRHFPKTIAHELKHHGVRKVYSLPVPEGPSGGFRVQRRRTVRQFHVQAIEGAKFSGFAVNEGRVDFATPTIMPALTKAGSLAPTDGYVGQAATSLVFMDDWREIPLANFPAAWRGVEKLSLQPNSESRMRVRLQISNKVIADGIEAWHLVAPMAVSTARKSEDKAIAQIQQRLTGLLEKIALKPRDKVNLVSATRENTVYEFIVQSTNSEMKEWYNLGQ

SEQ ID NO: 1344 - protein, 1122 aa, unidentified
  REGION 1..1122: note = Description of Unknown: Cas Enzyme sequence
MEYRLGLDLGTASIGAVAVTPDKKDGSLHILAQQLRIFAEPVENDQGTLQPKKAARRQARQQRTQIERRAKRLKDIAKLSQHWGLDRKAIAPDNGQHLPRLRALAVTERVELEDLFRIFLKLAKRRGYAGGFRTQGDESGEVKSGVERLRNIMQERGCETLGQYLYDRQQRHLPIHLKIKTTGGSTGNKKGKQEITDPESENLYATRDLVMEEFDKLWDMQATFHTVLNNEHEGKHLRTVFREVIFHQLPLKSVSGMVGKCPLETNLPRAPRSHPVVQAFRIEKQLSDLRWGIRKNAEALSPEQKTIIRELLTKQKSTSFSSIEKALEKAGCPKPMGKSLNLQTITRDELQGDTTIAAFRTMGVEQAWLDIPTNAQTQVINLLADMGSPEQFDTDHWHTQMVGANGKTRTFTPETVQFINTLITSGKFGRLAKMGLEGGRSAYSIKALQTLTEWLQNPWWPENWSGEMIVSEDNAVRVYYPQANQQPTLQDTLPLPPKTGNEVVDGALRQLYRTLNIIRTELKAWPSSIVVEMSRELGQGITRRNEIMEQQGKNQLARKNAKAKLEENGCTASERNIKRYLLAAEQDFKCPYCQGQNTLKISDIVNGHETNFEHILPRSLTRVGLKRSEIVLAHRHCNDEKGDQTPWQAWGDGKNPVRWKAVEVMANWLSDKSNKARKDRSRAIAMSRKAKLLIMQDFENDVLNDESIANFTDRQFHESSWIAKEAAQWLRSICPDVSVSRGQMTAHLRRSWGLETVIPEARLKEGFPILDDEGKPVSAEEFADFRQAWEGHAKSKSGQYVERKLDKRIDHRHHLIDALTIALTSRSLYKKMADHYRNDCERNQRGEKSRIRLHAEPPYKKVRDAALSMILTCEVSHKPDRYPSGQLFYDTTYGRKLHPGTGKATFTYRQTLASLVGEKDNADKAYKQVQSIVSDDVRQLVLKALDDGIAKGMTPFTALQQPIEHPQYSREGKPVYIKKVKCYGNSAENAKEVKHRNRQGQVLTKYLNSKGYAYLEIRVENGKLIGEPNLIPLHQAASQKNRTKPSNVIRFFKGDTVEDSKTGKHYVVRQLKSQGGGMLVLSPVTEPRSVEGLSAKDGAFRPSGKSVVRFRGVEKCLNTVSF

SEQ ID NO: 1345 - protein, 1140 aa, unidentified
  REGION 1..1140: note = Description of Unknown: Cas Enzyme sequence
MATKKSPVLHLAFDVGHSSIGWAVLTPGDPHPQILGTGTVLFPADDCLASQRRAFRRQRRHIRATRQRIARMKTLLAHLRVLTPEQLDAVTSSAPWKLAARVLAGGPFLTWPELWDVLRWYAHNRGYDGNRRWAGGDGASEADKDDTDKVKAADGLMMQFGKETMAETVAAALWDAPPPDPGNDGRPHERMQFRFKGANAAFRREVIEAELRQLLRRHAGKLPSVDASLERALLGTENDLQDDDAWKAVACPDLKLPRRFKGSLLLGQSVPRFDNRLIGTCPFTYQSTLAAELAKGSDPATAKHRAERMAKVPVADCPEFYRYRWAMTLANVRSDGAPLSLEHRRALDVQMQAAGSMTAKPFRDAVRDLTGHKRDNLDNLLVHPDVERSLVLDPARQAMKREDVQSFWNLLPEKSRLIVLNKLRRGKRLSVGDLLHGQAEARAALEKWHAAGGKKGRGKKDAPPPTLDQVLASAIAVKPASGRAPCTRRVMQAVHTHVFSSTAHPAEEGGPLFRSEAIRQAQLQREIDEQTNNHLVRHRLRILGRLHRDLIKEYAAGDSDRVERCIIEVASELRTFGSKTNKEIEAELGQRLSNFKGVVKKLEKDLAGTQHRIGAGLIRKGRIAEDLGWECPYTGKQFSGLDLAVGTEMDKDHIIPYTQRPSNSLDSLVITPKWVNARKGNRTAWEFIQNEKDRTSPDGKTMLRTPAEFKKHVESLESFKGHDDDKKRKKRRKELLLMEHWEEKDFLPRDLTQTSQLVRLGAQALTSAHTPGDSSEATPAKKGPVITSLPGSVTGAVRKGWHLIGCLSSVCPEILDEDGKPKPKGEIRSLTHLHHALDACVLALADYYFPKNDATGSIWQLMVKRNLAAEEADNLVRATKGLYKRGTEGRVFLEELPLPIREQIREKLMDRRVVQHIPSDMTGLKADQTVWRVLDPKDTHPSARKLLRLAAKLNLKVPDPDDPNQDQAFITCQKRREGALKKPSNCLRESKHFWLQYDLVAKSKLFGLQPKPGKPARLKALKAVKVVSENFGVAIMGGDGEIIRGYNIVSQLKALADHNGGMRPRVLRNGMVIRLPKGRYEGTWRVRSIKEAANMGLVIDFSLPDGQMMEKANVRLRTLIADGMQIARGSLSGTAVASPQ

SEQ ID NO: 1346 - protein, 1121 aa, unidentified
  REGION 1..1121: note = Description of Unknown: Cas Enzyme sequence
MPDKHMHGPLTFGFDIGIASVGWAVINETRIVDLGVRCFDKAETAKEGESLNLARRSARLMRRRLRRRAWRMTKLARIMKRVGLISDAEKFLALPPPDVSPWKLRVKALDEKLDAESWARVLYHLTKHRGFHWISLAEEKAAEGDAKGEGGKVTQALKATNKLMKEKNYRTAAEMVLAEFPDTQRNKRGDYGKALSRTLLAHEMAALFEVQRSLGNPHATEELQLALLGRGDKKSGLFWSQKPPLSGENLLKMLGKCTFENKKNGKAEDEFRAPKASYTAERHVWLTRLVNLRITVDGKSRPLNESERRFALPLPYEAGEKFTYKSLRTALVKSGHLPDSFRFAGLSYPSERQKAEDKAKNPEDANLIRLPAWHELRLTFQRKLLDNEWKSIGSNPELLDSIAWVLSVYKDDDEVESELGKLQLPNKEIVIDALLDIRFDKFHALSLKALRKIVPFMEQGLRYDEACEKADYHHSQLFKVGEGQHRKLPSLYSGRDKDGRMVFNEQLGDIPRNPVVLRSLNQARKVLNALVDRFGSPHSVHIEMARDLSRNMDERNKIAKEQDGYRDRNEKDRQDFVSQFGIVGTPRGGDFEKWKLYREQQGKCAYSCTPISIERLLEPGYVEIDHALPYSRSFDDSKNNKVLVHSKENRDKGNRTPYEYLDGESNSERWRTFVALVESNKLYRQAKRSRLLRKDFGKDEASEFRERNLNDTRYLCRFFKNQVEQFLKLAESSENKRCVVLSGQMTNFMRMRWGLLKVRDESDRHHALDAVVVAACSHGMVKRLADYSRTKELDQVKEGFVDFETGEIVNPAMHQKLATHFPEPWPHFRDEVQIRLKIDDPALMHSELERLGSYPNEALGAARPLFVSRAPQRRNGGAAHKDTIYGQPDHLRAQGGVTQKVALSGLSLKDLDKLIDPGRNEKLYAAIRKRLEEHGGKGEKAFPASNPLRKPDKDGNPTGPIVRAVTLVIDKMSGIPVRGGLAKNDSMLRVDVFTKAGRFHLVPVYVHHKVKGLPDRAIVAFKDEDEWTQIDETFAWCFSLQPNDFVRVAQKGKQPVTGYFASCHRGTGNINLWAHDRSQQVGKGGQIEGIGVKTALSFEKFHVDVLGRAYLARTESRRDLA

SEQ ID NO: 1347 - protein, 1357 aa, unidentified
  REGION 1..1357: note = Description of Unknown: Cas Enzyme sequence
MEKNNYLLGLDIGTDSVGYAVTNDKYDILKFHGEPAWGVTIFDEASLSTEKRSFRVSRRRLDRRQQRVLLVQELFASEVAKVDKDFFKRIQESNLYRSDAENQAGLFIGEDYCDREYYGQYPTIHHLISDLMNGTSPHDVRLVYLACAWLVAHRGHFLSNIDKDNLSGLKDFSSVYEGLMQYFSDNGYERPWNANVDVKALGDALKKKQGVTAKTKELLALLLDSAKAEKLPREEFPFSQDGIIKLLAGGTYKLSELFGNEEYKDFGSVKLSMDDEKLGEIMSNIGEDYELIASLRIVSDWAVLVDVLGESATISEAKVGIYNQHKADLEVLKKIIRKYTGKEGYKKVFRQVDSKENYVAYSQHESDGKAPKEKGIDIATFSKFILNIVRLLDVEPEDKEVYEDMVARLELNSFLPKQVNTDNRVIPYQLYWFELHKILENASIYLPMLTEKDSNGISVMEKLESVFMFRIPYFVGPLNKHSKYAWLERKEGKIYPWNFENMVDLDASEANFIKRMTNTCTYLPGQNVLPKDSLRYHRFMVLNEINNLRINNERISVELKQKIYSELFLNVKKVTRKRLVDFLISNGELRKGEESSLTGIDVEIKANLAPQIAFKKLMESGQLTEEDVESIIERASYAEDKARLAHWLEAKYSKLSEIDRKYICGIKIKDFGRLSKMFLSELEGVDKTTGEMTTILGAMWNSQLNLMELINSELYSFREAICAYQTDYYSTHSSSLEERMNEMYLSNAVKRPVYRTLDIVKDVKKAFGEPKKIFVEMTRGASEEQKGKRTKSRKEQILELYKQCKDEDVRILQQQLEEMGDLADNKLQGDKLFLYYMQKGKCMYTGTPIVLEQLGSKAYDIDHIYPQAYVKDDSILNNRVLVLSEANGKKKDIYPIEKETRDKMHGFWTYLNDKGMITEEKYKRLTRTTGFTEEEKWSFINRQLTETSQATKAVATLLGELFPNAEIVYSKARLTSEFRQEFNLLKCRSYNDLHHAVDAYLNIVCGNVYNMKFTKRWFNINKDYSIKTKTVFTHPVVCGGQVVWDGQEMLNKVIRNAKKNTAHFTKYAYIRKGGFFDQMPVKAAEGLTPLKKDMPTAVYGGYNKPSVAFLIPTRYKAGKKTEIIILSVEHLFGERFLRDEAYAKEYAAERLKKILGKQVDEVSFPMGMRPWKINTVLSLDGFLICISGIGSGGKCLRAQSIMQFSSDYRWTIYLKRLERLVEKITVNAKYVYSEEFDKVSTIENIELYDLYIEKYKATIFSKRVNSPEEIIESGRDKFVKLDVLSQARALLCIHQTFGRIVGGCDLGLIGGKKNSAATGNFSSTISNWAKYYKDVRIIDQSTSGLWVRKSENLLELV

SEQ ID NO: 1348 - protein, 1118 aa, unidentified
  REGION 1..1118: note = Description of Unknown: Cas Enzyme sequence
MKQHYYGLDIGIGSVGWAVLEVGADNARILDFGVRLFDSGENTGSSETKNQQRRGFRSTRRVIRRKKHRRMRLKNFLCHIGLTTLDAIDKWYQKNELNIYKVRSKGLDEKFSPEELAVSLIHISNHRGYKEFYGDQSEDAKEAELIKSAITKTKTIFAQSGYRTIGEMIAKDKTFCNPNSKDCALSLCRNHHGKYDYMFLRKDLENETKMILEKQKEYYAALTDENIKNIMDIIFRQRYFEYGPGNKEDSTRRYKGFLHTIGHCAIYNNELRGARHTVIGDLFAVVNALSQYHYYETETGEEADFGIVVKLVLEYVLNECNINKTTLIKLLKENGIEVIISSATGTQDINKCIKFLKPIRAAIEQAGLDWSSFISEPQLDLHAPSRLHRLGQCISSYITPSLRREKLEALGFVNTGFINNCMREKFSGTANVSDKYMVEAILAAQKGVRVGDYQAQVNKQEKQERKELKRLPPINDKDVISNPVVFRAINETRKIVNALISKYGQQPAIINIEVARELGRSEKARKEIARAQINNQKIRDEAANKIKELFGIANPKPAQLERYLLYEMQEGKCLYSNTPVEIGRLLTDDYEVDHIIPYSLILDDSLHNKALVLTKENREKGQKAPLEYLHGERRTDFKKRVINAYKHNKISKKKYDYLMLESLNNEEVLKDWKSRNINDTRYITKYVAGYLQQNLLFDSPNKKNVHCINGAVTSRFRQIWLRDSKWGKPEKEREETELHHAIDAIVVANLTPRYIELASDYLKLRAMKRAYKGLALLPAEYYAYLDKCCKKMKKYYYMNEDETQNLLEGGRIPTIVPRLFDEVSLRFDSDDEETLRERAKTFYRDETFANGLRLPLVSRKQERKYRGAVVSSENPVSLKTINGKTYQYVAKKLEKITVKDIDKIVGISKAARAQLRAAFEGQKEQYSLGDYLKSHDIPALRRKDGTLPKRFTLAIGEDIPVYKKAIESGIKKENTQLWEVKSYYCLEIYKDTKGNTRWRGIRYTDIKRKDKKLYLCCAYPEDYQSHVMYLFKNDYIVVYNRKGEETKRGFYQAIKALSQGQIRIIRDNNAKAEVISLAQSCTVKKYDISILGVIGGEIKCGEPYSLLTDPGSAQGTSA

SEQ ID NO: 1349 - protein, 1102 aa, unidentified
  REGION 1..1102: note = Description of Unknown: Cas Enzyme sequence
MNSFRSSDSSAKRYVLGINLGCASCGWAAIGLNAQHQPTKLLRAGVRIFNPGVTGDIDRGKDESNAVARRAARLIRRQFRHRTARQAALFRLLQRNGLLPPYEGEEADASGQRHAILNRLDREIAVTWAERFPGETATDLPLYFLRKRALDEPLQPFELGRIFYHLSQRRGYQSNRKEKAFHLERAETGAKDEDLGQIEGEIEELKAAMEKAGARTLGEYFASLDPHRQKVRRRWTGRKMYEAEFALIWTKQAGYHPELLTKDLHDRIKYLLFYQRPLRSQAHLIGKCDLEPGERRAAWAMVEAQEFRLLQSVNNLEIVYPGQNVQFPLTTEQRWTVIHLLEKTAEATYETIRKALELPRGTQFNLQRNGEKRLKGNMTNALMATVFGDRWSVMPEEDKKLVVEEWRTIEREDSLMRRAQEHWKLDAAGAEWLAKHPAPAGYCAYSRKAICKLLPLLYEGIRGEEAKNVVYGSRLSGGAVYERIPPVREALKNLRNPAVERALTELRKVVNALVQEMGAKPYEVRIELMRSLKNSRRARFYSVQHNNELQNGREAAKARLLKECGIAQPSRADVEKALLWEECQGECPYTGRRFAFSSLFGENPSMRVSHIIPFSRIADDSFQNKVLCAAGEIQFKTNRTPFEAYGSDAAHYEEILTRVRNWKGTRYSGARSQRDKKKLVANAKIANPGKFRRFELHTAEEVEGFSNRQLTDARYASRSACELLETLYGGRDLKTDEERRQAVFASSGVLTTILRRRWGLDAILREPGASPNRLNTDESQSDYRHHAIDAMVVALSRPSFINALKKSAQAESSQPAAARSAVALQSPWKDFVDSIRPQVEEMLVSHRIDHRLSGALHEETNYGRPCENDGKMTVHIRKPVPGLSAAEIENIIDLKVREAVREKAALLDGSLKKWMPQKENEDWPMLKSKNGQEIPIKRVRIRKSLQVKTIGKKSRERHVSLGSNHHVAVFAITGDKGEEKRWSSQIVSLFEAMERKRKGEAVVQTSMQEDPHAVFKFALMKGDMLLLHKDCDHGKSLCQPSYWKVRSIWEQGTLTLVQIHDARQIKEIYAAKDWLLSSANTLRKLEAMKIEIDSLGRIHRAG

SEQ ID NO: 1350 - protein, 977 aa, unidentified
  REGION 1..977: note = Description of Unknown: Cas Enzyme sequence
MKSYTLGLDIGSKSIGWTLIRGKPKPSIVDIGVRVFPEGVDRDTKGAEKSKNATRREARGARRVHQRRNLRRDKLVKTLRASGILPEGEQELQELLKKEPYQFRAKGLDEKLSLFEFGRALFHINQRRGFKSNRKTGREKEDGKVAKEAGELRQKIKEAGCRTLGEYFAKLNPEEQRIRDQYTFRSMYEEEFEKLWEKQSKYYPEVLTDKLRAKVRDEVIFYQRPLKPTDDLIGMCDLEPDERRCPRGDWFARRFRILQDVNNLKVHNPDGSEVKLTNEQRQILLKELGQKKEIKFDRIRKIFGLMETQEFNLEQGGKVKSLKGDSFAAAMRSRNVFGAKRWDSMGEQEKIELNDACLELDDDELVEKMISGYGFSEEQAERVLKVPLPQRYMSFSLKAIRKLLPLMEEGKRTDEALDKIYPDRNKRDVGEGKDKLDLPEDLRNPIVNKALFEVRKVVNAIVREYGKPTRVVIEMARDVKGSRREREEIQFKIRQNEKRNDEARTRLIQDVNILNPSRDDIIKYKLWEECGKKCPYTGKSISQTALFGHNPEFQVEHILPYDRSLDDSYMNKTLCHVIENRKKGNQTPYETYSHDEEKYEQIKQRIKVLPWPKRRKFLQKEINLDECINRELNDTRYICKEVVGYLRKLGVSVRGTKGKITSELRHQWGLNNILDLSSSDMKNRDDYRHHSIDAVVVAVTKNEHLRNLAKSKYSKVGSIFQEPWPNFKEEVQEKVKHIDVSHRVTRKVSGALHEETHYWKEENGPHAGKFITSKPLDGKFTKNFAEHICDDTVKKLVFERLSEYDYEPKKAFAEPIYLKNKSGNPVPIRKVRVWKESYTMKTIRGNIWVEPGSNHHIEIYEYTDGKKKGKRDGEVVTMFEAVRRKKDGEPVVNREHGPDKKFVCSLSINEMFMLESDNREYDLCRIQKMSQNKVIVLRPHTFAGDLKKQKPINKTPNSLKGYKVTVDPLGRIHRAND

SEQ ID NO: 1351 - protein, 1012 aa, unidentified
  REGION 1..1012: note = Description of Unknown: Cas Enzyme sequence
MGSWMFDVPETDKERTPTNQIRRGNRLLRRVIRRRAQRMAEVRRLFHNHGLLAGQEPDALKRTSLDPWELRARGLDRALSPVEFAVALGHIAKRRGFRSARKGKEANAVGDDQKMLKALEATRERLGRYRTVGEMFGRDPDFRDRKRNRDGLFDRTQSRDDLAHEVSELFRAQRRLGSDAATAELEEAFTAIAFRQLEMQDSEKLVGMCQFETRERRAAKFAPSFEKFRLLTKLVHLRITTADGERPLTRAEIALAAADLGVTGKLTVKAVRKRIGLPDDQRFTAIKPEDESQDIAARAGEAMHGTKKLRDALGDQLWAELQGQPEQLDRIAHIISFFETADTIGSELRKLALPAGAVDALLTDLGAFSRFKGAGHISALAARSLIPHLESGLRYDQACEAIGYDHAASRWSKREQVVDKQAFNRLVEDMGKEIANPVARKSLTEGLKQLWAMRNRWGLPDAVHIEMARDVGNSLEKRNEIKSGIDKNTAERERQRAEVRELLNIEDVNGDTLLRYRLWKEQAGRCPYTDKMIPPTAIIATDNSHQVDHILPWSRFGDDSYSNKVFCTAEANQRKKGQTPCEWIMASQGEDGWATFVARIEGNSAFRGAKKRNYVLKNAKEAEERFRTRNLNDTRYAARLLAEAVKLFYPEGERQEKGGSRRVFTRPGGLTAALRHAWGVESLKNVDGRRVDDARHHALDALVVAAIGEWEVQRLTRSYQEWEQQGLARPLRHVDPPWGDPASFRREVQQAYDDIFVARPERRRARGEGHAATIRQVRERDGTPVVYERKSIIELPEKRLEDIKDPERNQGVIEAIRQWIADGRPTDQLPRSPAGDEIRKVRLRTKGKPAVPVRGGSADRGEIVRVDVFAKPNKRGKDEFYLVPIYPHHVMNKREWPGPPMRAVVAYKDEEEWTLIDDTFSFRFTLYPRNYVEVVKSTGEVFEGYFGGVDRSTGAVSLFAHNSTKISFRGLGAKTLLTMRKYSIDRFGARSEVKSEVRTWHGVVCTSPTRPG

SEQ ID NO: 1352 - protein, 913 aa, unidentified
  REGION 1..913: note = Description of Unknown: Cas Enzyme sequence
AEALDRQVDQAELAVILGHIARHRGFQSNAKAERGANAPSDTSKMLDAIKATSERLSHWRTVGEMIARDPAFAERKRNRGGGFSRSILRDDQEAEVRRIFATQRRLGNEAANETLQENFISVAFSQRPLADSDNLVGFCPFIKGERRAARRSYAFEMFRLYSRLNTIRITIRGAEEMPLSTEQIRAVTEDFGSQKKLTWKWLRKRLDLDASVRFADVATEDETNDFVARAGAAADGTYAIRQAVGPAGWKSLLNLPAALDQIAAIMTFKSDLGSIRASILALPLEPLVAQLLVEAADSGKFNAFTRAGHISAAAARALLPHLARGLVYSEACAEVGFDHAARAEITIADVRNPVARKSVSEVLKQVKVIVHTFGLPDRIHLELARDVGKSTEERDDIKIGIEKRNKERDRLRAEFEELIGRAPGTVEELLRYELWKEQSGRCLYTDLPIAVTAVVATDSSVQVDHILPWSRFGDDSFLNKTLCMAGANAEKKGRTPFEWFSSDKSKAELALFEARVESCKTMKGRKKRGHYLRRNAAEVEERFKARNLGDTRYATRLALDMIARAYFPDPKTRAVLARPGSLTSKLRRGWGLEGLKKDDKGKRLSDDRHHALDAIVVAACSESMLQRLTLGFREAEQRGLGRDFRAIDQPWPGFREQVNAAVEKVFVSRAERHRARGEAHAATIKQVRERDGKMVVFERRAVEKLTLADLERVKDADRNAVIIDAVRTWIEAGKPKDALPRSHKSDVITKVRVATKDKVGVSVRGGTADRGDMSRVDLFRKADAKGRARFYVVPVYPHQIATLDRPPNRAVDAYKEESEWTYVDENFDYLFSIYSNSLIEIVKTDGEVVRGYFKGLDRSVGALALAQHNNPLNRRTGLGVRTLLSIRKFNIDRLGIISEIVRETRTWHGVVCT

SEQ ID NO: 1353 - protein, 1382 aa, unidentified
  REGION 1..1382: note = Description of Unknown: Cas Enzyme sequence
MEYYMGLDMGTNSVGWAVTDPQYNLIRRKGKDMWGIREFDRAEAAAERRLHRVSRRSNQRSRVRIGLLKEIFSEALKSEDENFLPRLDNSFYKFEDKDSCLTTVDSIFADRDYRDADYYKDYPTIFHLKYDLIMDRVSDDGRYARKVYLALLNYFKRRGHFLNESLSGTDENGKDVWTAYTELCDSVYEELEISLNHNSSLSENFRAVFCDTSISRSGKRERLMELLGVTKKNVQQYLILSAVCGLKTDLLKLFSIESEQKADLDFSSSGMEDKLPEIYSVIGESFVDIIDALKQVYDAGVLAGIMSGTDEEGNTIKWLSQARVSSYEKHKKDLKILKECIHKYCEEAEYDHLFQENEDDSYSAYIGSVNSGIVVRRGENLYASKSGERYTNLKKRIKKDLADYQEDENVKYIFSELDAETFLPKQLTFANGVIPNQLHEREVRKILDNASKYLPFLKEKDESGLTNCEKIVSLFTFRVPYYIGPVSQNYKGNGWAVRKSGMETMAVYPWNIEDVIDYDKTREKFIVNMVRECSYIAGEKVLPKESMEYQAFMVLNTINNIKVRNEKISCALKQDIYHDVFEKNGRVTKNKILRYLNNRGIAVLESELSGIDTVIGCQLSAYRRFYGVLGDELSKDSVRHMVEDIIFKGTVYGDSKEMVREMIVKQYGDILLPEHIKRIMGFKFRDWGNLSKQFLELEGYNKQTGEIMSLIRALWEDEDNLNLMELLHSDKYTFEESLKEKHQKVLKPITEFTYNDLDEMYFSAPVKRMIWQTLLIIREVTEVMGCPPKKIFVEMTRSEEEIKGDVGRKDSREKELLELYKHIKEDRSWDDEIKQAGLSGRLRSKKLYLYYKQKGCDMYTGLPIDLGELFDDNKYDIDHIYPRHYVKDDSIHNNLVLVDKRKNSRKSDNYPIDADIRGDEKIAAYWRMLHQNGFMNDEKYRRLTGNKPFTEEQQAEFIARQLVETSQATKGVNDLLKEIMPEGTTLVYSKASNVSRFRSDFNFYKSRMINDFHHAHDAYFNIVVGNVYYTKFTLSPMNFVKKERGKYNLGRMFESNVARNGYTAWVAPVKDKVTGEIIEPGESLAAVQRVMSKNTPLLTRLSTTQHGAISDATIYSASKAKEEGFIPVKNSKDPKLKNVKKYGGFNSIKIAYYFLVEHEVAGKGKDKGKPVRIRTIECLPVYKRPFVESHEDGLYQYCLELGLKNPSVRVKKIKSQSLIKVDGFLMYITGKTGERFVVRNACNLILDSEWNKYVHLIEKYNLSGHMMKEISADDNIRLYNELISKHKAGIYSKRPNPIGTILENGRDKFIDLDIDKQVNILVQILNLSLICNSASADLKDIGGSSKTGVTLISKKVSGYSEFKLINYSVTGLYAKEVDLLTV

SEQ ID NO: 1354 - protein, 1141 aa, unidentified
  REGION 1..1141: note = Description of Unknown: Cas Enzyme sequence
MSFILSLDLGANSIGWALFDDEENKYLKTGVRIFQDINTDNDNTQGNTNQDRREQRQRRRLIFRKKYKKLLLYKKLKKIGLINSDIQNYSEFIQSIFYLNPYQLRYEALTRKLTEQELCRVLFHIAQRRGFLSNRKSSREKIGEVKQQIKELEEKIQNKTLGQFLFELYPLEYQPYEYKERIRQRYTSRYMYYDELIKIWEFQSKFYPEILNEDNKKAICDFKKGIIFYQRPLKSQKNLVGKCIFEKNKTRCPKSRYEYQEFAFYQFINNIEILDHNGEIRQLNKSEIGNILEGIIATKKSSKNLTIGDLQKKHKLNIISQHSKNLEQELPPISFVHFVHNLFPQSYIEKHFANDFYGKIEDLWELLNFINDTDFLVEKMKLDKHFPEDPQLGFIYDQKRIELIDNYYHTDGYGSLSLKAIKNILPFLKMGFKYHIATILGGIKKAFGNEYEKLSNEQKSYIISKVQEIYCAQQTSTSKPDLVKDFLSKEFNLSDDALNKIYIHSQVDGEHEILDMLPKFNLNIRNPKVTRAIDETRKIINELLDRDYKIDKIVVEIATELKKSSEDLKKFKNEQFKNRKANIAAYEYLTNVLKIVNPTREMIQKFRLYTEMLNVSERDKSSYYKPMCPYTGKEITIDNLFEDGKFDVDHIIPFSRSFNDSLGNKVLCDAHFNRHIKGNQTPYEYFQKKDPTEWKFIKQRAEKILPKEKYKRFVAETVPDEEDFASNKLNDTRYIAKVAVDYLKQIGAKVQVVSGSVTGIVRRYWGLNSILNELNKHINIEKENMLDYDIKNRIDHRHHAIDAMVLCLISPKIIKDISTLKTRKLYETGIKTLPYPWQSFKNDIEKIVSELIVSHKRHNPVASIASKYILVKGKKIKIKTLAPRGPLHNETFYGLRTNPDTKKEVFVHRVSLSNLDNENKINKIMDNNVREIVLKHFKNKASNKNVFFTLDENKRSVPLVYLPNKTGNPVPIKKVRVFEEKKNIRQIGDYNKWVEPSNNHHAEIYQKPNGKIYQKLVTLWEAVERVKNKQPVYKDINNNDKLIATIERNEIFALGLPNNLDLAKFKEIKHINKYLYRVQKVSFISNLEIPRYTFRNILAATLKYKEQEIEIDSFKKLKDINLYKIIVNNLGEIVNVIEVLK

SEQ ID NO: 1355 - protein, 1334 aa, unidentified
  REGION 1..1334: note = Description of Unknown: Cas Enzyme sequence
MKKTLGLDLGTNSIGWAIIEQEDGVKKLSAAGSVIFPEGVARVKGSETPATAQRTRSRATRRLYMRRRMRKQRLLLHLIKNGMCPLSEEGLKNWKAKDRYPLEEGFITWFKLNPYELRAKGLEEKLSAMELGRILYHLSQRRGFQSNRKGGDGEQESFHEGLVDKGIAGYNETLKLINDHGTLGKAGHELGKTHTPIRKRYFKRSNLVDEFNQLWDVQKNHHPILTDALKAELGDGKTGDLFFQRPLKGKKSDVGRCTLEPGKRRAPISSIEAELFGVLQTVNNIRLDDRPLNAEERKRVLPQFFRRSKPSFDFEDVLKALKMKDAEGRFNYKKKDKLPGARTIAHLADLWKVDAMTIVDAFGAMEADKANERKLWGDRYSVIYNAVDWADLSERKAKGQDTSGKRDLKEYAITEWSFDDEQLKLLEKFDPKQGYHNLSTRALGRIIPLMYGIDGQPPMGYHDAVMLANLPTIFKIVHKLEGKDGKPVTEMVKGPNGHLIPKVDDRWAAMSETDREAIRNGIRERIADHRDYNVEMLLFNGLIRHYRDTFGEAGGRNGFWDSAWDEQLRKGVDETLSLEQKRSKSAEETNALREKVKATFLQHIENHQKVQFEPLLRRDDRVKLWLTDNFDLQPKDVDKLYHHSAINIYKEHGDKLGDPKTPGLKNPMVYRALHSLRMVVNKMIAAKLIDLKTQVNIEMARDLDSTNKRKAWERYQAVMRKKNESAEAAVKEYFATVGKHTNPSDEDIERMWLLEEARDIFGKVMCVYTGKEFGVADLFNGGVEIEHTWPRSKTVDNSMANKMLCDTTYNRAIKKEHMPATLPNYDKEALVQGRMLPGIKETAEPILKLYEKYDRTVYACKMSSKSAATKEAKDKAIQDRWYNQFFRDYWRTKYEHLTAEEIKPGFMNRQLVATGQITKLARAYMNSYFNRVDCLKPEALSAFRKEWMGESFVHAKDRSKHTHHAVDAAVCAAVDKTEFNALAHHYEEHDEKDVTASFEHPWKTFGTDMRNLRDSALVYHVRKPSIGRTSVYDRKVKLKDGRVVDVKAQGDSVRGSLHKDTYYGKIKLKKPGTEEYVEHVVLRKPIVGMSKADMAKVVDPKLREALLEADPAAIENDRGLKWKGKYKGEDVTRIVKHARVFDKSVKNPVPLKTHRDQVPKFEHKHHLWVKNEENPAMAVYENAKGKTAHYVFSLLELTTALDGTRGRQNLANAIPKIHPEREGYTLQHRNGKPVVLYVGQLMRLYKDGPEEIDQHDQRDLNNRTYVLRKVEVDGRVNLLNVLDARPDEQIEETNKWDIEQPMKWLRFSVHGLRAELDGIDISIEPLAGVLQTAQ

SEQ ID NO: 1356 - protein, 1524 aa, unidentified
  REGION 1..1524: note = Description of Unknown: Cas Enzyme sequence
MKTILGLDLGTNSIGWSLIKTNFNKKEGEIVGLGSRIIPMSQDVLGKFDSGVSISQTAERTGYRGVRSLFQRNLLRRERLHRVLNVLNFLPNHYSNSIDFEKHFGQFKDGVEEKLNYRKNTKGKHEFIFMDSFNEMVKEFEAAGQEIKIPYDWTLYYLRKKALIKKISKEELAWVILNFNQKRGYYQLRGEEEEIVDGKTKEFITLRGDRVIDTGDTLKKTGDKLYTLIFDNGWEYPKPISSLKKWLNIEHEFIVTSTVKKDGEINRTFKAVDSEQDWIAIKTKTEQDIEYTNKTVGVFIYDTLLTNPKQKIRGKLVKTIERKFYKEEFKQILETQIKYHSELQNNDLYAKCVNELYPRNEAHQNNIKDKGFDYLFIDDIIFYQRPLKSKKSTISGCQYESRKFKKEVIDVITNKKKMEWVIEPLKAIPKSHPLFQEFRLWQFLQNLKIYKIEASKDIDITAQLFQTEEDWVCLFDFLNGKKEIEQLQLLKYLSDLKLLPRQKKDDKNYRWNYVEDKKYPCNETRAQFITRLKKVKNIDVTTFLTPEMESKLWHIIYSVTDKVEFEKTIENFAKRNNLEQETFEKNFKNYPPYKSDFGAYSVKAITKLLPLMRRGKYWCENTISKGVIDNIGHIMERVNALKLSGNYSKNELNDALLKVVDDAMPTQLVKSFIPFKNKSPYTGLNTYQACYAVYERHSEPGDVAHWKSPQDITNYLKSFKQHSLRNPIVEQVVTETLRTVRDIWLFYVNGDEKFINEIHIELGREMKNPADKRKRISAKVSENENTNQRIKAILKELKNDGVSEVKPYSPSQQEILKIYEEGVYQSIEVADDIDKIRKNTSPTKAEISKYKLWLEQGYISPYTGQIIPLTKLFTHQYEIEHVIPQSRYFDNSLGNKVICESEINRDKSNMTAYEYILKKGGSIVDGVKILSIEQYEKHCENYFKKNRNKLKNLLSEDVPEGFINRQLNDSRYISSLIKGLLSNLVREDNEKETTSKHIVPVTGAITSKLKQDWGLNDKWNELVLSRFIRLNKLTNTNNFTVKNTNGVTIPTVPDELSKGFNKKRIDHRHHALDALVIACCTKMHTNYLGAINAEHKNYGLRDALLVKSKEGHYTKHFLMPWIGFTTEAKSYLEKIVISFKQNTRVINKTNNKTLQWVEKEGQWKKQLVPQTKGDNWAIRKPMHKETVSGKVLLKREKGLVSLNTAIENYKMIVDKSIKNKIKSAFVLFHHDVKKVKVHFKQNPLKTAEKEISKIAIYEQIEATATRIALTEKFTRKQLESITDTGIQNILENHIKNYLDATGKEKFNEAFSPEGLLELNKNIVALNNGKQHQPIYKVRLYEIGSKFNVGIKGNRKGKYVEAAKGTNLFFAIYKDEAGNRKYETIPLNEVIEHQKQVAHLPKNERTEIPVKNVLKERGKEISVQFLFSLSPNDLVYVPTNEELENSETVNFKNLTKEQVERVYKMVSCTGSRMYAIPLNVAKSIQNKFEFTSLNKLEFDLFGNSLKVRCWKLKVDRLGTIIKVEK

SEQ ID NO: 1357 - protein, 1527 aa, unidentified
  REGION 1..1527: note = Description of Unknown: Cas Enzyme sequence
MKKILGLDLGTNSIGWALIDHSFNDKKGEIIGTGSRIIPMDQQILGKFDSGITESSTADRTEYRSKRRLYQRNNLRRERLHRVLKIMGFLPDHYQQTIDFEKSLGQFKKEVKLNYRKGEDGNYQFIFMESFNEMLSDFKATGCEIKVPHDWTIYFLRKKALTQKISKEELAWIILNFNQKRGYYQLRGEEEEQKDGKTKTFEVLEVDKLVDSGEVIKKTGDKLYDIFFKNGWKYPKQTTKPEKWLNRVKEYIVTTSKLKSGETKRTYKEVDSETDWTAIKTKTQDAIDASKKHVGEYIYDILLENPKQKVRGKLIKTIERKYYRKELSAILIKQAEFHAELKDESLYNECVHELYPKNLAHRNNLKGKGFEYFFIEDIIFYQRPLKSKKSTIGGCQFETARFKKQVLNKESGKLEEKWVTRNVKAIAKSHPLYQEFRIWQFLQNLRLYELEKLVDGKTKTDVNVTDVLMPAEKDWIALFEFLQQKKEIDQGQLINYFIANKKINKKQKANFCWNYVDKKYPMAETSAQFLTRLRKVDGVDSDSFLTKKIELNLWQIVYSVKDPKEYEKALNTFAIKHDLDKDSFVDSFRNFPPFSNDYGAFSEKALKKLLPLMRLGSHWKVESIHPKILERIDKILTGEYDEKIKDKVREKSFHFNKVEDFQGLPLWLASYIIYDRHSEIDEIQHWRSPADIDKYLENFKQHSLRNPIVEQIVMETLRTVRDIWQHFGAGSEKYFDEIHLELGREMKNPAAKRKQISERNAENENTNQRIKSLLQELVNNGIPNIRPSSPSQQEILKIYEAGVRENPNVKYEQLDEQSVNKIIKSQTISGNDIKKYKLWLEQGYVSPYTGKNIPLGELFTHKYDIEHVIPKSRFFNNSLQNKVICERAVNELKSNDTAYEFIKKNGGSIVDLGGGKTVRVLLLENYESHCKQYFKNNRGKLNNLLTEEIPDDFVNRQLNDSRYISKFIKGLLSNIVRQEGEESATAIKLVTVSGAITSRLKKDWGLYDKWNELIAPRFKRLNGLFQNEDFGFWDKKINAFRIKVPDELSRGFSKKRIDHRHHALDALVIAACTSEHINYLNSINSNRTNFSLVSKIRHTEKKKVYDRRTNQYIVKQVATSFRLPWEHFPVEAKTSLEKIIISFKQNLRVINKTNNKTWQWRKQDNGQLKKQLIRQTKGTNWAIRKSLHQETVSGRVLLVQEKEKSIAKALERPDLIIDRTIRNMVLMMNLPNAADRITYFKKQPIIVDGKKITKVKVFTEATAVRSSLSGIKNAKHIEKITDKGIQKILKAHLKSYLDEKGKENYAEAFSPEGIEDLNKNIKVLNNGKDHKPIYSVRQFEEGRRFALGTKGNKSTKFVQTKEGTNLYFAIYLKKDGNRDFESIPFAEVIEHQKQVAHLPVSERTAIPINPEKGQFLFSLSPNDLVYVPTKEEINTISSIKNFELSDEQLKRVYAVNDFSDKIVYFTPQSFATSICPKEVDLSFNEKKQKLTGSYDKKTASLDGVQIKSICWKMEIDRLGNITKLHKR

SEQ ID NO: 1358 - protein, 1377 aa, unidentified
  REGION 1..1377: note = Description of Unknown: Cas Enzyme sequence
MKRILGLDLGTTSIGWAIVDEAEKESEQSSIIKTGVRVVPLSTDEQINFEKGQSITINANRTEKRGGRRNKFRFKLRRKALIKALKKNGFIKNATILTEDDKNSTHKTYEFRAKAVHKKIEKEQLVRVLLMINKKRGYKSSRKANNAEEGELIDGMEVAKKLNNQNLTPGQFTLHLLEKNKKTLPDYYRSDLQQEFDKIWDIQKRYYPEILTKDLKENFSNKNKGQTWKICQEPFGIVGIKQQGSTQEKKIEVYQWRNNALKDKLELEELAVVFSEINNQINKSSGYLGEISDRSKELYFNNQTVGEYQWKQLKNDPHTSLKNQVFYRQDYDDEFEAIWNEQSKHYSELTEEFKKEIKDTIIFYQRPLKSQKGLISYCEFESWEQEVTIDGETKKKTVGHRVVPKSSPLFQQFKIWQNINSLRIENIKTGEIKILEEETKKELFSELNWEERWTPTDFFKWIDLKEKDWKINFQHLEGNRTNHQLLKAYKKIASLEGYNAIDYKKLSKTEVISAVKECFKIIVINASILEFDPIQTGNTFAKQPSYQLWHLLYSYEDDYSPTGNASLIEKLKQNFGFKVEHATLLANVTFQDDYGNLSARAIKKIYPHLEDGLEYSEACTMAGYNHSSAITKKQNDERELSDKLEILKKNSLRNPVVEKILNQMINVVNAILEDENLGRPDEIRIEMARELKKTAKQRSEMTTSIAKATREHEEYRKIIKKEFGLPYVSRNDLIKYKLYKELEPNKFHTIYSNTYIAPDKLFSKDFDVEHIIPKARLFDDSFSNKTLETRHDNIDKGNETALDYVQRKYGDKAVEEYRNRLENLFKAGKINYTKRKKLLMKIEDIPEDFLARDLGTSAYIARASASILLDITKKVTLTSGTITATLREDWGLVKVLQELNWDKYDKVGLTYYDINKNGKKLKRIKDWTKRNDHRHHAMDAITVAFTKPALIQYLNNKNADSKKGIIVQNIKEKYTYKNERGKRKFITPFENIREKTKEHLESILVSYKAKNKVTTKNKNKIKLKGKNNFKVKIEETPRGKLHMETVYGKSKYYATKLEKIGGKFDAEKINQVANEKYRNALLQRLRDFDDNPKKAFTAKNSLTKNPIYINGTQETVPETVKLVWMEDQFTIRKNITPDLKIDKVTDVGVRRILEKRLKEFGGKPKEAFVNLTENPIWLNKEKRIQLKSVTITGVSNAESLHVAKDHLGKEIKDKNGDNVPVDFVELGNNHHIAIYKNSKGELKEDVVSFFQAVIRKNQGDDIIKAINKNGWSLHFTMKQNEMFIFPTNEFTPSDINLLDINNKETISKHLFRVQSISSKYYIFRHHLETTVANGNTFKNQKMLWGNTFQFIRTEKNLQGIIKVRINHLGNIVQIGEY

SEQ ID NO: 1359 - protein, 1391 aa, unidentified
  REGION 1..1391: note = Description of Unknown: Cas Enzyme sequence
MKRILGLDLGTNSIGWALVNEKEAKYENSSIVKLGVRVNPLTVDEKTDFEKGRPLTTNASRTLKRSMRRNLQRYKLRRNDLIAIMKENGWISRDTPLTEIGKDTTHQTLALRAKAAREKVDLEDLAKILLSINKKRGYKSNRKVKDDDQGLSIDGMAIAKKLYDENLTPGQYVLRVLKAGRKYIPDFYRSDLITEFNRVWNKQIEFYPGVMTNSLYHEVLGKNKKQTWAICEKPFNIVGVKRKGSFAEKKLENFEWRVKALSEEIELEKLVIVLQEINNDLNKSSGYLGAISDRSKKLYFNRQTVGEYLYNQLQQDPHTSLKNQVFYRQDYLDEFERIWETQAQHYSQLTPKLKEEIRDTIIFFQRKLKSQKGQLSYCQFERWEQQYEDPDTGSPKKRTIGRPVIPKASPLFQEFKIWQNLNSLVFSNTEESQEIKVKDLDCEIRQELFDHLTIRGASKPVELLRILKRHIKLGRISKWKANYDKIEGNSTNATLFNCYQRISENEGYGIDWNSADAQSILHELKNTLPEIGINPSILTFDSEKKNIDKQLSYQLWHLLYSAEEDFKIEEKDKIVYGNSAVSLKKKLHNKFGFKPDYAKMLANISFSQDYGNLSAKAIRKILPFLKDGHVYSEACRLAGYNHSSSLTSEQLKNRELKPHLELLSKNSLRNPVVEKILNQMVNVVNQIIETYGKPDEVRIELARELKKSAKERAEMAKGIGEATRRNEDIRKLIIKKFGIPSPTKNDIVRYRLYQELESRGFKEVFTDRYIAPDQIFSKEIDIEHIIPKALLFDDSYSNKTLAFKEINLKKGNRTALDFISEEFNQNLESYRSRVEELYKSGSITKGKRNKLLLAQSEISDGFIERDLRNSQYIARKAREMLFEVFADVTVTTGSITEKLRKDWDLVNVMKELNMPKYKAAGLTIYEERLDIGTGKFKKYEIIKDWSKRNDHRHHAMDALTVAFTTKNHIQYINNLNARRDTSKDNHPIIRNIENQITEINMRGKRIFRPPLNNFRTEAKDHIESILVSFKTKNKVVTRNVNKTQRKNGKLNYKVQLTPRGQLHKETVYGKSKRLLAKPTRLNKRFSLEQAQLIADKKQREAVLKHLKEYEGNSEKAFSTNSLKTRPLCVDGEELKEVLCYEEIFTIRKDVTPNNFKNDKLIEKIIDQGVRNVMKNRLAEYKGDYKRAFSDLDTNPIYLNKTKGIKIKRVTITGVSNAEPLHFANDHLGRVLKQENGHLKPVDYVSTGNNHHVAIYKDGDGNLQEEVVSFFEAVTRKNQGQDVIQREHPKGWKFLFTMKQNEMFVFPNEGFNPGDIDLLDESNAKVISENLFRVQKIATKNYFFRHHLETTVEQIKELKNLTYKPQLGLNAIHGIVKVRINHLGKIIHVGEY

SEQ ID NO: 1360 - protein, 1509 aa, unidentified
  REGION 1..1509: note = Description of Unknown: Cas Enzyme sequence
MKRILGLDLGTNSIGWSLIEHDFKNKQGQIEGLGVRIIPMSQEILGKFDAGQSISQTADRTKYRGVRRLYQRDNLRRERLHRVLKILDFLPKHYSESIDFQDKVGQFKPKQEVKLNYRKNEKNKHEFVFMNSFIEMVSEFKNAQPELFYNKGNGEETKIPYDWTLYYLRKKALTQQITKEELAWLILNFNQKRGYYQLRGEDIDEDKNKKYMQLKVNNLIDSGAKVKGKVLYNVIFDNGWKYEKQIVNKDEWEGRTKEFIITTKTLKNGNIKRTYKAVDSEIDWAAIKAKTEQDINKANKTVGEYIYESLLDNPSQKIRGKLVKTIERKFYKEEFEKLLSKQIELQPELFNESLYKACIKELYPRNENHQSNIKNKGFEYLFTEDIIFYQRPLKSQKSNISGCQFEHKIYKQKNKKTGKLELIKEPIKTISRSHPLFQEFRIWQWLQNLKIYNKEKIENGKLEDVTTQLLPNNEAYVTLFDFLNTKKELEQKQFIEYFVKKKLIDKKEKEHFRWNFVEDKKYPFSETRAQFLSRLAKVKGIKNTEDFLNKNTQVGSKENSPFIKRIEQLWHIIYSVSDLKEYEKALEKFAEKHNLEKDSFLKNFKKFPPFVSDYASYSKKAISKLLPIMRMGKYWSESAVPTQVKERSLSIMERVKVLPLKEGYSDKDLADLLSRVSDDDIPKQLIKSFISFKDKNPLKGLNTYQANYLVYGRHSETGDIQHWKTPEDIDRYLNNFKQHSLRNPIVEQVVMETLRVVRDIWEHYGNNEKDFFKEIHVELGREMKSPAGKREKLSQRNTENENTNHRIREVLKELMNDASVEGGVRDYSPSQQEILKLYEEGIYQNPNTNYLKVDEDEILKIRKKNNPTQKEIQRYKLWLEQGYISPYTGKIIPLTKLFTHEYQIEHIIPQSRYYDNSLGNKIICESEVNEDKDNKTAYEYLKVEKGSIVFGHKLLNLDEYEAHVNKYFKKNKTKLKNLLSEDIPEGFINRQLNDSRYISKLVKGLLSNIVRENGEQEATSKNLIPVTGVVTSKLKQDWGLNDKWNEIIAPRFKRLNKLTNSNDFGFWDNDINAFRIQVPDSLIKGFSKKRIDHRHHALDALVVACTSRNHTHYLSALNAENKNYSLRDKLVIKNENGDYTKTFQIPWQGFTIEAKNNLEKTVVSFKKNLRVINKTNNKFWSYKDENGNLNLGKDGKPKKKLRKQTKGYNWAIRKPLHKETVSGIYNINAPKNKIATSVRTLLTEIKNEKHLAKITDLRIRETILPNHLKHYLNNKGEANFSEAFSQGGIEDLNKKITTLNEGKKHQPIYRVKIFEVGSKFSISEDENSAKSKKYVEAAKGTNLFFAIYLDEENKKRNYETIPLNEVITHQKQVAGFPKSERLSVQPDSQKGTFLFTLSPNDLVYVPNNEELENRYLFNLGNLNVEQISRIYKFTDSSDKTCNFIPFQVSKLIFNLKKKEQKKLDVDFIIQNEFGLGSPQSKNQKSIDDVMIKEKCIKLKIDRLGNISKA

SEQ ID NO: 1361 - protein, 1379 aa, unidentified
  REGION 1..1379: note = Description of Unknown: Cas Enzyme sequence
MKRILGLDLGTTSIGWAFVKEAENENEKSSIINTGVRVVPISTDEENDFKKGNSITINADRTLKRGARRNKFRYQLRRKALIDELKLINFINEKTKLTETGKNSSHELLSLRNNAVSEKLKKDEFARVLLSINKKRGYKSSRKANNSEEGELIDSMDITKKLYDHDLTPGEFSFTLLKDGKKSLPDYYRSDLENEFNKVWNHQKKYYPEALTAELFKEVEGKNKNQTWKICEKPFSIKGIKIDGSKADKKLETYKLRKLALSEKIGLEYLAIVLQDINSEINKSSGYLSEISDRSKELHFNNMTVGEYQYKQIAKNPHNSLKNQVFYRQDYLNEFQKIWEKQAEFYPELTNELRDKIQNEIIFYQRRLKSQKGLISYCEFESWEQEVIIDGEKKNKIVGHRVVPKSSPLFQEFKVWQNLNSVRITNVKTNEVYHIEEETNKELFQTLNWIDKLTDKQFLKELGLKPNEWKINFKTVEGNRTNYNLLKTYKEILRIEGYDNIDYSKIDAEDLIEILKKCFDEIGIDKGILEFTSTLKGNPFSKQESYELWHLLYSYEDDFTRTGTESLEQKLKSTFGFKDEHLHSLINISFQDDYGSLSARAIRKILPYLEDGKLYSEACELAGYNHSNSITKKQNEERELKPKLEILKKNSLRNPVVEKILNQCINVVNAIIEDSEMGRPDEIRIELARELKNTKEQRSEMTKAIGRATKDHEKYRDEIKSKFGLPHVSRNDLIRYKLYKELETNGYRTLYTDEYIKPEDLFSKKYDIEHIIPKSRLFDDSFSNKTLETRKSNLDKGDETALDFVGRKYGKEGLEKYRNRVEALYKSGKIKGSKHRKLLMGLKDIPEDFLNRDLGTSAYIAKKAAEILLDITRRVSLTSGKITSKLREDWGLIQVMQELNWDKYEKVGLTYYKENKEGKKLPRIKDWTKRNDHRHHAMDAITVAFTKPGIIQYLNNLNAKSNKEIYKLENAYTFKDERGKRKFIAPFPTIRKASKEQLSQILISFKTKNKVTTKNKNKINIEGNNKFKYQTVETPRGQLHKETVYGKSNYYETKLEKVGGKFDQDYIKLVANQSYRAALLTRLEEFENDAKKAFTGKNSLTKNPIYLNGTQETVPEKVKLAWLEEQFTIRKEVTPDLKIDKVVDEGVKKILKKRLKDFNNKPKEAFSDLDLNPIWLNKEKGIKIKRVKITGVSNAEPLHHSKNHFGVEMLDNNGSPFPNDYVSTGNNHHVAIYRDEKGNLQEEVVSFYEAVTRKNIGLPIINKQHEKGWQFLFTMKQNEMFVFPNEKIGFNPHEIDLLKPENNALISKNLFRVQKFSLIYYGNSAVRDYVFRHHLETQLLDLKATKDITWRALKSSSLLDKIVKIRINHLGNIVHVGEY

SEQ ID NO: 1362 - protein, 311 aa, unidentified
  REGION 1..311: note = Description of Unknown: Cas Enzyme sequence
VKEFFYLSEGIRYKLADEKKVEDGMLNRSKMNCTYRVVSDRFKGEIPTNILANLNNTIINNFRNNLSEYSKGERALANFKRNIAFPFGPVAIHGLSYNENQKAFCFRLFSIPLKTYLGKDHTDKRKLLEQLVAGKIKLCTSRIQLKKQKIYWLATFEFEKKIHNLKPEVIAEASLSLEYPITVKSGKATLRIGNREEFLYRRLALQAAQKRVQSGATYCRPGKGFKRKTKAVEKFYELEKNYVSNRLHVYSRKLIDFCIKQQAGTLILLNQEAKIEAAQQERFVLRNWNYYELTKKIEYKAKKAGIELLID

SEQ ID NO: 1363 - protein, 1546 aa, unidentified
  REGION 1..1546: note = Description of Unknown: Cas Enzyme sequence
MKRILGLDLGTNSIGWALIEILEDGTKRIIKLGSRIIPMSKEVLGNFEKGVTKSQTAERTDDRGARRLYARSRTRRERLLRILNILDYLPDNFSNQIDFDEKKGQFKKGSEPLIAYSYKVDENGNRIFNFMDSYEEMEKEFRMRYPNLPKLNKKGKPYRLPYDWTIYYLRKKGLTQKISNQELAWILLNFNQKRGYYQERDEKEVEIDENKKVELIVLKAEQFKITDQKVDDKPLYEIIFDNGWIYDNTTTKPEIWEGVDIEFIVTSTINKDGSIKRTFKKVDSEKDWEAIKRKTEQDLRKSQKGAYKTFVGKYIYETLLENPKQKIRGELIRTIDRDFYFDELEVILRTQLKFREEQWGDKNLYKRTVQELYAHNIAHQENLLKQKDTFIHLFLKDILFYHRPLKSQTGLVSRCSFEKRVYVDSLTGDKHEVKIKGMPKSHPLFQEFRIWQLAHNLRIQKREAEENGKLKINLDVTNQFIRNKSDLAKFFNFLYNKKDINQKQLVAYFIRDKKEQSLYRWNFTDDNKIKLDCNQTRPALLSKLSKEDKRKFDEQFELKLWHIIYSVTDKSEYDTAIGRFGENNSLSEETTEKLKRAPMLKKEYATYSEKAVKKLLGLMRCGCHWSEVSIHPSSIQIIDKLLTGEFDERIENQVREKAIKLDKIEHFQGLPLWLASYIVYGKHSEVDATQWKSSKDLAEYINTFKQHSLRNPIVEQVLLESLRVTLDIWEYYAEKFGLQFEEYIDEKTGKKVKSYDRLFSKIHIEIGRELKNPKKVREKMTNSINKNKDTNQRIRKLLFELKNVKEVENVIPNSRTHFDKLKIFEQTVLSNYSEKELKAEKLDSKLTVEKFIKKNQPTFSEILKYKLWLEQKYISPYTGKIIPLTQLFTSKYEIEHVIPQSKFLDNSFNNKIICETEVNTLKDNRTAYTFIQEFQEAEVPLSGGGSVSILKKETYEKLVKENYDGRKKENLLRETMPQKMSERQMNDMRYISKAALKIYSNIVREEGERESTVKNVLPVAGKVTAKLRREWGLNQVWSGLVEERFKRLNRLICGEENENNGLFGTWVDDGGYFRTEVPLEIREDFDIKRIDHRHHALDALIIASLTSNHVNYINNEHTKSDLKRYDLGLTLRDTKQIEKTHPLTEKKTKHTVLGNYKKPWKTFTQDAKSALQEIVISFKQNLRAINKAQNYNWRYKDNAGKVVYTKNGVPKKQWIEQVSSKTDKTSNNKTNWAIRKPLHEETVYGILENGEYKGDLVKREPLNISFDEKKIETVIDPVVRSILLRHIKQDKFKGQIDEKGNIFKPEEVAFSAKGIKDLNENILTLNNGVFHHPIKKARLRFPKGKKFSIKKWEDKEGNLLRETKFVKSATGTNLYFCIYEKEGKRKYYVPPFEEILEIQKLEQDLPLEQKKNVPEQHPDFHDFKLKFYLQPNDLVYIPVKNDEDMGFENLGRQQLENIYLFKDGSGTTANFIPMFSADVIYNISNKENREKFADAYNLDKGELIKNEYGLGSPQLKNQNSVDGIQVKSVCWKLQTDRLGNITKVLK

SEQ ID NO: 1364 - protein, 1410 aa, unidentified
  REGION 1..1410: note = Description of Unknown: Cas Enzyme sequence
MDFGVTVFRSQKVVLITSLNKKYMKRVLGLDLGTTSIGWALVEESENKEESKIIKLGVRVNPLTVDEKINFEGGKPITTNAERTLKRGARRNLDRYQLRRDYLIRELKKEGFITEATPLTEIGKNTTHQTLSQRAVAAGDKVSLEDLAKILLAINKKRGYKSSRKSKEENDGIAIDGMAVAKILYNDKLTPGQYAYGLLTKKKKYIPNFYPSDLKAEFNAVWKKQEEFYPESLTPKLYQELQSKNKGQTWTICSKHFQIEGITLEGNRTEQKLKRYELRVEGLSTKLSPEHLAIVLQEINNDINGTSGYLGKISDRSKVLCIDKLTVGQYLHTQIKKNPHTSLKNQVFYRQDYLDEFEQIWETQAKFHPALTQELKAKIRDVIIFYQRPLKSQKGLLSFCLFESWQQEYFDEVKQKNRKRTIGQRVIPKSSPLFQEFKIWQNINDLEFKYIGKSQNTPEKDVYKLEEEDKKLLFEEANLRGDLKTAAVLRLLGLSSREWKINFKDGIRGNTTNEKLFNVYQEIARREGYGIDWKKNSALEILEELKSIFPTIGIDASIMEFDGNVRGNPNSKQSSYELWHLLYSAGDDSIISEEDKLVYGNADVNLKKKLHLKYGFKPEYAAMLASVTFPNDYGSLSARAIKKMLPHLQEGLNYYEACDKAGYNHSNSLTSEKNNKRELKERLEILGKNSLRNPVVEKILNQMINVVNQICDTYGKPEEIRIELARELKKSAKERLETTKYINSATKVNLDIAKKIQQQFGFTPTKNDIVKYKLWEELAPRGHKSLFSDTYIPLEELYSKKIDIEHILPKALIYDDSFSNKTLAYRHVNLKKANRTAIDFITQDNNAELENYIERIEALYNKGKGTISRGKRDRLLKSAKDIKEGFIERDLRNSQYISKKARTMLHEVFKNVTPTTGRITDKLREDWGIINVLKELNLPKYRAVGLIEFEERKNHKKIEKIKDWTKRNDHRHHAMDALAVAFTTHNHIQYINNLNARRDETHDKHKVIKNIQNLITHKVEDDKGNYKRKFVKPLPNFRSEAKKHLEAILISFKAKNKVVTRNVNKTKKEGGFNTSLELTPRGQLHKESVYGKSKVPKDKPTKINKNFTLIEAQQIINFGQRKLVLKHLAQSNNDSKKAFETKTLKKQPLLWNDEPLKEVLCFDEIYTIRKDVAPGLKLDKIVDEGIREILEKRKAAFNGNDKEAFSDLDKNPIWQNKEERIAVKKVTITGVSNAEALHYKKDHLGEEILIDNDEKIPVDYVSLGNNHHVAIYEDDKGKLQEKVVSLYEAVERVNQKLPVIDKECNAHLGWQFKFTMKQNEMFVFPSEEFKPLEIDLMDEKNVTLINKHLFRVQKIATKNYMFRHHLETELIDLKETRGLSWESIRSTEPLRNLVKVRINHIGRIVQIGEY

SEQ ID NO: 1365 - protein, 1406 aa, unidentified
  REGION 1..1406: note = Description of Unknown: Cas Enzyme sequence
AKELKVNGISEKIPYDWTLYFLRKKALTEKISKEELAWLILNFNQKRGYYQTRGEEEIIDKTKLEEFYTLKVINVEATDDKNAKGIWYNVVLENGWVYRRQSKESLDNWLGKTKEFIITTSLDKDGNPALDKEGNVKRSFRAVDSEKDWIAIKKKTEKDIEISKKTVGEFIYETLQANPRQKIRGKLIKTIERKFYKDELSRILQVQCTYHNELRDRELYKTCIEELYPRNEAHRNNIIEKDFSYLFINDIIFYQRPLKSKKSSISNCAYEKRNFKKTIDLVENGEKIKKTVFMVEPLKAIPKSHPLYQEFRLWQFISNLKILQHERILENKTYMDIDVTNELFRTEDEWNELFDFLNEKKEIEQKQLIDYLVKKRLISKVEKGNFRWNYVEDKKYPCNSTNAQFISRLSKVVEVDVKEFLTSKVSQHLWHIIYSVKDKQEFETALKTFASKYNIDTDSFVENFLKFPPFESEYGAYSHKAIKKLLPLMRRRKYWNEDDIPDDVKNRAEDIKNRLLEIGFNKEKINEDVADDDIPKQMLKSFIDFIDKNLLQGLNTYQACYLVYGRHSEASDIAFWKKPEDIVNYLNEFKQHSLRNPVVEQVVTETLRVVKDIWDYYGKGKENFFDEIHIELGREIKNPADKRKQLSQRISENENTNHRIKELLKELQHDSIINGDVRPHSPSHQEILKIYEEGIFQNPATNFGVVNLDEIEKIRKKPSPSKSDIVRYKLWLEQGYISPYTGQVIPLSHLFTTDYQIEHIIPQARYFDDSLGNKIICESEVNELKSNRTAYEFINSERGRVVHLSGGRSVKLFTIDAYEAHCNRYFKRNRTKLKNLLCEDIPEGFINRQLNDSRYISKFIKGLLSNVVRTEGEQAVTSKNIVPVSGAITSKLKQDWGLNDKWNEIIVPRFKRMNKLTNSNAFGFWDNDINAFRAQIPDEISKGFNKKRIDHRHHALDALLIACTDRRHIQYLNGLNAEKENYTLRGQLLKKSRNGDFTKNFLLPWSEFPVQALNALESIIVSFKQNLRVINKTNNKSWQWVENDGVLKKKLVKQTKGDNWAIRKPMHKETVSGSVRIRMRKKVSFANGIKEWENLVDKNLKNIVKRLVQKGYDNKAVAKYLKNNPYKNDGKTVHKVEIYAYTNEATASRIVLTDKFTRKQLESVTDSGIQKILENHLKRYMDEKGKERFDLAFNPEGIDELNKDIQSLNNGKPHQPIYKVRVYEEGNKFNVGYKGNNKSKYVEAAKGTNLFFAVYWNGVKGKREFETIPFNVVIEHQKWRATLPKEEMEATPLIPLNNSKGTFLFSLSPNDLVYLPDEEETDNPDLVDFSNLSKEQTKRIYKMVSSSLNQCFFIQCHVASLIKPYDAKSKIGEFGSLNKMESCVNGLMIKETCWKIKVDRLGNVAR

SEQ ID NO: 1366 - protein, 1446 aa, unidentified
  REGION 1..1446: note = Description of Unknown: Cas Enzyme sequence
MKKILGLDLGTNSIGWGLVEQDLDNHKGGILGAGSRIIPMSQDILGKFDAGVTESQTAKRTAYRGTRRLYERNKLRRERLHRVLNVIGFLPSHYVEAIDFERRLGQFKEGGEVKLNYKKIDAKDAKVRYEFLFLNSFNEMVSEFNNMGYNDNIPYDWTIYYLRNKALNQKVTKEELAWIILNFNQKRGYYQLRGEEEADKNKHFVQLAVKELIDTGEEVKGKKLYEIVFDNGWKYDKQIVKTEDWIGRTKEFIVTIKDLKSGEKKYSYKSVDSEVDWLAIKSKTERDIDKSGVTVGQYIFSQLLANPNQKIRGKLIKTIERKYYRNELKQILKAQEEYHTELRDEKLYGSCLMELYSRNEAHRNNIKSQSIAYLIEEDIIFYQRPLKSKKSSIGGCQFEYRTYHKKDQTNGEVSEQRIPLKAIPKSHPLYQEFRLWQFVQNITIIDKDLELTVRKAEQANITKGLLTTQEDIVDLYDELNSRKEIEQKNVIDYFVKKGKIEKANKGKYKWNYVEDKKYPCNETRYEFLKRLKKVNGVKPHDFLTNEIELKLWHLIYSVTDKVEYEKSIENFAKRNGIDVASFVEAFENMPPYKSDYGTLSHKAIKKILPLMRKGKYWKEDAITSKTSNRIQKLIDGEYDESIRDRVRQKAINLKNVPDFSGLPFWLASYIVYDRHSEGADVSKWRTTEDIDQYLNNFKQHRLRNPIVEQVVTETLRVVRDIWDKYGEGKQDFFDEIHLELGREMKNSADKRKQITSRQSENENTNERIRFILEELQKDSRTNGDIRAYSPSHQELLKIYEDGVYQNPEANFSIVSEDEIYKIRRNSSPSHSDIQRYKLWLEQGYISPYTGAVISLSKLYTAAYQIEHIIPQSRYFDNSLNNKIICESDVNQDKGNMTAYEYLSRRGGEIVDGHELLSLENYETHCQRYFKKNRTKLANLLSEDIPEGFINRQMNDSRYISKFVKSLLSNIVREEGEQEPTAKNLLPVTGAITNKLKQDWGLHDKWNEIIAPRFMRLNELTKSNDYGYYDKKINTFRITVPPEIRKGFSKKRIDHRHHALDAIVIACTTREHINYLNALNAEKENFKLRSKLLIKNKEGHFTKHFKMPWDNYPIEVKQTLEQIIVSFKQNNRVINKTNNKTWQWVEEQGRLTKKLVKQKGTNWAIRKPLHKETIAGKINHISTPKGKIATASRVSLTEIKNRKHLNKITDISIQKILLSHLNSYMDKNGKPQYDIAFSTEGIEDMNKNIKELNGGVAHKPILKVRQYEIGTKFQVGTKGNNHKKYVEAAKGTNLFFAVYWDEKKQKRTYETVPLNEVVEHQKQTAHLPKTERLAIQPNPEKGTFLFTLSPNDLVYIPSDEDISQPDNVNFKILKIEDSNRIYKLVSTTGTQAFFIKSQVAKSIANRIEFSTLNKMEKDTNGGMIKARCWKIEVNRTGEIVKINKGVN

SEQ ID NO: 1367 - protein, 1445 aa, unidentified
  REGION 1..1445: note = Description of Unknown: Cas Enzyme sequence
MKRILGLDLGTNSIGWAFVKHDIDFAQGEIIATGSRIIPMSQEVLSKFGSGVTESQTAERTRYRSMRRLYERYKLRRERLHRVLHVMDYLPLHYVEAIDFEKHLGQFRSGQEPKINYCPVTRDDGLVNYEFLFMDSFKEMVEDFKSSGHQAAIPYDWTLYYLRKKALTQRISPEELCWVLLSFNQKRGYYQLRGEEEPDDGKDKRFMALKVKQLIDTGKDVNGKKLYEVIFENGWKYNKEIIKTEDWVERTKEFIVTISELKSGEKKYSYKEVDSEKDWVAIKAKTELDLDKSGLTLGTYIYQALLHNPMQKIRGKLIKTVERKYYKNELSQILQEQQKHHEALRNSEVYRSCIEELYPRNQAHQNQLEDRSLSDLFIEDIIFYQRPLKSKKSSIGGCRFEKRRFKRKDEESGKMVLVSEPIQAISKSHPLYQEFRLWQFVRNLKIIDKRLELTARRTSEASIMDELMQAETDWVDLYEVLNQRAEVEQKHIIAYFIKKNKIAKKDKEHYVWNYVADKKYPCNVTRSEMLKRLKKVEGLEAGAFLTQEIELSLWHLIYSISDRVEYISAIKRFAAKYSINQDSFVEAFKSIPPYDSSYASLSYKAIRKLLQLMRMGKYWDRQTIDQKTLDRIEKIVNGEYDDKIRDRVREKSFQLGSIEDFKGLPLWLASYVVYDRHSENADMAIWTSPDEITQYLQEFKQHRLRNPIVEQVVTETLRVVRDIWTHYGDGQKGFFDEIHLEMGRDLKNSAEQRKRISERQRTRENTNDRIRKLLEELSMDVDVQGDVRSYSPSHQELLKIYEEGIFMNPGTNYERVSEDDILKIRRNAAPSKADIQRYKLWLNQGYTSPYTGQIIPLSKLFTSAYEVEHVIPRSRYFDDSLSNKVICESEVNSHKDNRTAFEYMQQHKGETVAGFQLLSDDQYVKHCQRYFKNNRNKLANLLSEDIPEGFISRQLNDSRYISKYIKGILSNIVREDGEQEPTAKRLLPVTGAITAKLKRDWGIHDQWNELVAHRFKRLNELTKTQDYGYWDDKIRAFRISVPSELRKGFSSKRIDHRHHAMDAIIIACTTRSHVQYFNTMNAQSELKNKLMTKNAQGDYTKYCKLPWRSFPVDVKQSLKQIIISFKQNLRVINKATNKTWQWVDQDGQLKKKLVVQKGTNWAIRKPLHKETISGHVKHVDVPKGKIATASRVPLASIKNQKHIDKITDVSIQKILRNHLKQYLGAQGKPLFTEAFSQSGIENMNQNIQQLNGGVPHMPIYKVRQYEIGKKFAIGHAGAKAKKYAEAAKGTNLFFAIYWDEQNQKRVFESIPFYEVVEHQKQVAHLPSGERTAIQSKPELGISLFTLSPNDLVYVPSEEERIQPDIMSTNDGIILDRSRIYKMVSTTGRRAFFIKAAVAKSIANKQEYSALNKMEKSIDGDMIKEICWKLDIDRLGKVVKVHTHNL

SEQ ID NO: 1368 - protein, 1354 aa, unidentified
  REGION 1..1354: note = Description of Unknown: Cas Enzyme sequence
MSTKKIVGFDLGTNSVGWAVVENSDENAAKIAGAGSRILPLDPKILDAFENGQKLTKNAERRQKRSQRKTLDRYQLRRKYLIESLIIMGCLPEDFTPQNAGRKFKELIEKPDELKNLPDDWYVYMLRSKALKEPVTQIEFGRILYHLNQRRGYKDIGELMEEIEEKDDTNQGKKYDKWIEQVTIYSVEKKSDLKNKKQEYWVILDDGREGTSIIANIESLTGKEIELEIRRRVKKNSEETFEFALPNRNDWQNKLDALDKQISQSGMHVGEFFWNKIKEDRNFRIRQNFVHREKYIEEFDAIWEKQQEFIPALIDETVKQDVIQRIVRNEKERQKWAKKPLKEFIKNYIIYYQRPLKSQKSKKANCRFEPMIKVINQSTGESLSIENKCMPLSSPLYEEFRIWQKLNNLRYKDINNKNYELTNEQKEALFEKLNNGQTLKESSIFKILGLNKNLYSDFNFDQIEGHTVKSKIASVLKDYDSGKIIGNEEFLYKVWHLLYSVNETEYRKNTLIKWFNLTEEDAKRLAKVRFEKKTGSLSSRAVKKLLPLMRAGKYFDEQSLHDSILFRINNIINGEFDPDVTDDIREFFKEYKSIRDFSGMPYWKAATLVYGSHSTGFSDTRYEKPEEIQLIPAGELRNPVVEQVINETLQIARDIWIKYGKPDEIHLEMAREMKMNSNERQKLTKAMRDQQKKNEEYEEILKKEFNILKPSRTDIIRYRLYIDQKQRCLYTGKPIQKTQLFNGETDIDHIIPRQRYFDDSYNNKVLCFRNVNEEKSNMTSYEFMQQKGIDKWEDFTRRVNELYKEGLISKKKKNYLLSDEIPKDFINRQMNETRYITRRVKEELEKISRVVTTVGSITDYLKEDWKLNKVFKEVQLGRFRSIEKKIDKKLIQEIRINGYHDYQIEGWDKRIDHRHHALDAITIACTNRSIIQTLNNLAQLYESSEPIKNKISRHFPVPAPDFRDQVKNTLETMIVSHKSRRRLITKKRAYYKVLDPSTGAYILKKQEKPSPVVRGPLHDEQPLGEIKEYQKIKIKDAIKKLEENKNNLDKFINGTFPIEWQRKKINEKLSIYNNDPKLFLKNLNKDAILNLKGEKLEYITILVRKYVKSRDLNTSITLSQIENIIDRKLKNEIKNHLKQYNNDPKKAFTDEGLMLFNQNRKFPVYKVRCKVDESEVGTLTTREPLERDSENNPKLHIEKGENYGFVIYENKETGKREYETISFYDAISLARMGLSIVEARPGYRHCVLKHNELIYVLRPGEEKKLINWNDYKNLNNRIYRIVKFTNKRLYAVQHQVAENIVLNEEYENFNEFGSNKNCLEIISDDEPKTKISERCIKIKADRLGNIKPAPWEND

SEQ ID NO: 1369 - protein, 1392 aa, unidentified
  REGION 1..1392: note = Description of Unknown: Cas Enzyme sequence
MKKVLGLDLGSSSIGWAYVHEAENEAELGSSKIIKLGVRVNPLTVDEQRNFEQGKSITTNASRTLKRCMRRNLQRYKLRRENLIEVLKKHGFISDASILSEQGNYTTFETYRLRAKAAVAEISLEELARVLLMINKKRGYKSSRKNRGGDEGKFIDGISVAKQLYDRGITPGQFSLELLKEGKRHLPDYYRSDLQNELDRIWNFQQSFYPEILTQNFREQIRDKGQKNTSQIFLREYQIYTADNKGADKLSRALQWRVEGLSRKLSVEELAFVMSDLNGSISGSSGYLGAIGDRSKELYLGKQTVGQYLMEKLNTNPNGSLKSKVFYRQDYLDEFERIWETQAGFHKELTLELKKEIRDIIIFYQRSLKSQKGLISFCELESKLVEIEVNGKMRRKVVGSRVCPKSSPLFQEFKIWSILNNICVWSVDKSKSSEARKMDERDKEPNLNQEEKEILFKELSLKEKLSKRDVLELLFEDARKLDMNYEKVEGNRTQATLFKAYQEIIARSGHGEYDFTRMLSSEILEIVSGVFDGLGYNTDILYFNSEGELDQQPLYRLWHLLYSFEGDKSNSGNENLINKITNLYGFDREYAVILADVVFPPDYGNLSAKAIHKILPYLKDGNKYSLACEYAGFRHSKNSLTKEEREKRVLKERLDILPKNTLRNPVVEKILNQMVHVVNGVINKYGKPDEIRIELARELKKNAKEREEWTRAINKSTIENEKLRSVLKKEFGFTQVSRNDIVRYKLYLELESRGFKTLYSNTYIPLEKLFFKEFDIEHIIPQSRLFDDSFSNKTIELRSVNQEKDNQTAYDYVSGKGGEAGLQEYLERVEDLFKGGYINKAKYNKLRMTGKDIPDDFIDRDLRDTQYIARRAKAMLEEVVGNVVSTSGAVTDRLREDWQLVDVMKELNWNKYERLGLTEIVEDRDGRKIRRIKGWTKRNDHRHHAMDALTIAFTKPKYVQYLNNLNARGDKSSSVYGIERDELSRDSKGKLRFNSPMPLKEFRMEAKLHLENVLVSTKAKNKVITPNVNKSKKRGGMNQKVQLTPRGQLHQETIYGSIKQYVTKEVKVGSAFNMEMILKVANKAYREALLKRLNAFDQDAKKAFTGKNSLEKNPIFINDSHTCKVPEKVKVVSFETVYTIRKEIGPDLKVDKVIDKRVRDILETRLVEFGGDSKLAFTNLDENPIWLNKEKGIDIKRVTISGVSNVIALHDKLDKDGKLVLDEHGQPQPVDFVCSGNNHHVVVYRDPEGKIQDDVVSFFEATVRAKEGLPVIDREYKKQEGWEFLFSMKQNEYFVFPNEETGFDPKEVDLMNPDNYALISPNLFRVQTMSRVMYGNQVVRDYKFRHHLETTVKDCKELKDIAYKQYKSLDFASQIVKVRIDHIGQIVHVGEY

SEQ ID NO: 1370 - protein, 1188 aa, unidentified
  REGION 1..1188: note = Description of Unknown: Cas Enzyme sequence
MKPKKILGLDIGVSSVGLAVIADNDGVREIKEMAVRVVPEDPNFQGKFYSGNTASKNLSRTTDRGIRRSNQRFKARRNRLIATLKMQNMYDENLINISALELYGLRAKAVSEQISLKELGRVLILLNQRRGFLSNRKSNSEEENSTDYKKRIAYLEGELGEKTIGQQLYQELLDVTHPLEVLLRERTYLRNSYLEEFDRIWDKQSSYYPNILTGGSNEDDNKGTLYDLLRNKIIYYQRPLKSQKGLVSECPFEKHHKAVSKSSPYFELFRILQRVNDLSWKTPDGQKHEPTSEQKVALKERLWEAVEAKSKYRLTISKIKEILGFRRSDKIYLNFTELDGSRTYAIIRDALNTAQVEKPEQYLFFHPEVNDEKGGLFQLWHITYSLPSEREVVDTLKKHFGFTEEQCTSIAQYVGYNTDYGNLSTRAIRKLLPHLQNGLAYSDACDKAGYDHSGYKTKIQLKSKLDTLLPNSLRNPVVEQILNQVVNIVNQAIKKHGQFDEIRVELARELRNSAANRKRISQQNRNNRFINDAIRSRLNNEYGFKVVNGRDVKRYKLWDQTEKQCLYCGNAISNTDLIRGNADIEHILPKSRSFSNHMNNFILAHRTCNVNKGQRTAYDFMEAQGEEKLTQYIEQVNKLYADGKGTISKSKFDNLMCQGDQIPSDFVERMKKDTQYISKESVKLLKSVCENTYTTTGQITDLLREEWGLKHVLEEITFEKYKAVGLTEIKEYKDSEGNIKTREIITEWSKRDDHRHHAVDALITALTDQKIIFKLNNLNKIYQLERDALTPEELAKFEEENEGRFDLKEFVTQAAYEFPLPIPQLRTVVKNHLESILISIKKSSKALSRSVNRPKDAPEQITWTPRGRIHEETVMGRVKRIAEQPVKLDKTFDQVESIVSDPLREAVKLHLAKYNNDATKAFNTKTLKTDPIIYKNEEVKSVKIYVESCTKRVPLSENFTPAQVQKIIDTKAKEIIEQRIASYGSIKKALSNLEENPVWLNIEKGIKIKSVTVYDESKVEKIRNGYVKTGGNHHALIYKNEDGKYHDKVISFWEAIEIGQLNIQKTGKPYPIINRENDPELGSFQFSMQINDLFVFDLKHSQNPQEEDELDFHHPESRPLISKRLFRLQKMSKKGNGSFDIHFRHHLETSVERNIPELTWINIQSNKQLDRLTKIRINHLGEIIKIGE

SEQ ID NO: 1371 - protein, 1314 aa, unidentified
  REGION 1..1314: note = Description of Unknown: Cas Enzyme sequence
LINNDYFAGFDIGTDSIGMAVTDTSYQLLKHKGKAMWFVKLFDESQTAADRRAFRSGTRRAARKRERIALLQMLFDKEIAKKDPAFFQRLKESNLYEEDKTVGTPYAVFADKGYTDKDFHHDFPTVFHLRKELIENPNQHDVRLVYLALHHLIKHRGHFLFDSLNINDTHLFINIFNELSLTLDEEYGINISCDNPDELGNVLKQRDQSINAKYNECLKLCGINKKTEKQAAAVVALICGKSESAAALFNEDILDDNKKPLKVELKGDFEGHSADYAKFLGEKFELIERLKAVYDWAILADILGEEKYISFAKVKTYKQHNRDLKTLKSYVKQYCPEKYREIFKISKKDLDNYTAYSSMIKKNGKTGVLLNTCNQEEFCKYLLKNFKNTSHKEYEDMFSSIEAGVFMPKQHIKDNSVIPMQINLVELKKILENASVYLPFLNETDDTGKSISEKIIDIFKFRIPYYVGPLNKSTDKAWLERKDGRIFPWNFNDIVDVDASAENFIHNLTSKCTYLPDKDVIPKNSILYSKFAVLNELNNVRINGVKISVALKQSIYNDLFIKRKKVTQNGLKKYLISQGYDDVEITGIDGDFKSGMKSYLDLCGYGLTEEEMERVVSSITIFGDDKRLLRKRLKRELSGKLTEKDINKISHLKYSGWGRLSREFLCEIEAPNPETGELLNIINALWETNDNLMILLGSKYRYYEALQKAINIDTEQTLKEMVDSLYVSPAVKRPILQSVKMLNEIVKTLGKPPKKIFVEMTRGESKEKKRTQSRKDQLMELYRHCKKDAGELYDQLESLDNDRLRQDKLFLYFTQFGKCMYTGEKISLDNLFNNNVYDIDHIFPQSKVKDDSLHNRVLVKKRDNAEKDNTYPLSQEIRQKMSAHWKLLLDKELISKEKFKRLTRNEPLTDTELSDFISRQLVETSQSTKAVAQILERMYPDTDVVYVKAKNVSKFRQENKLLKCREVNDFHHAKDAYLNIVVGNVYDVLYTRNPANFIAGLQTKKYSLNKMFSFNVKGAWTADNSESLNLVKKMMNKNNIIYTRYSSCQHGSLFKLNPLKKGNGQVPLKKQGARSDIEKYGGYDKPLSAYFALVRYSDNKGKVHLSMIPINLYQVKEYESNPSVFLENELGLINPEILLSKVKYNSCIEIDGFRMHISSKSGNQIIYKPAMQLVLGYQNEVYIRNISKYLKKFSYRPVNDSDHLSKEENIRLFDLIISKMTETILSVKFKDMGNKIKAKRDNFTSLTIENQCEVILQMLNILHDNALLGDLTKIGLSKQSGRVGTSMDMSSTKSHVKIINQSVTGLFENVYVIK

SEQ ID NO: 1372 - protein, 1069 aa, unidentified
  REGION 1..1069: note = Description of Unknown: Cas Enzyme sequence
LLNAIAVDENFKQWKDIVRRFSGKYKNIDGNIFEKDRLNNLLNNKHGKIFETNYKLRILQRVLDKNRKLDEFSIYDLSNNHNSKNLSNSLQQKKMMLKELLGNHLDDFLHFAKKYYDESFQARYGHWDKDNDENLLKVCANNPPHKGKVRHKDISSIIGYQLKDVDVETFRSRLKENKIGRKSLLGHAKNCADAIKEYGNGLKYEYILVKKKNDRGENVKEGKVILDLFENSNLFAKKLGVLLEQSEDIYQKYGNPFSQAQIYNLLESDPHGFSNTCVYCSSDNAWRSKIENGDMANASRLAADSIRPFDGMLSRILNSISWEIVKNKIEFLKNKKIGEKLLIPIIVEQNRFEFSESLYEIKKKTVKRKEAGLKKQLAGKKWSDKSSRVKEASKGICPYTGEVLQNTGEVDHIFSRSMSKKEFGVVFNSEANLIYCSRTGNQKKAEIIYSLDNLHDKYLTKQFKTSNRETIKNQIVKLIEPLMKNNIIFQTLSEDEQVAVRHALFIPELRRKMVLAINEKTKSIINGTQRWLVKEIISLLRKNIKIDEQKLEFLPVFVDPKEVHFIRDLLSDSYPEFKKQEFQSAFSHVIDATIAFSTSLSNEKVSNIMMTEKLNISSENIEQIKEIIPTQFKIERMESLKKYRRPDISSVPIFKDGLFAERFLPLIITKDKKVKIGFDSKNSVEIKKGREEWFNCMKYYLLKNKNHLQEGDTLSTLLDTAQGRGWVLEVDKKKGFDLFYNVIKGNPSDDELKSYDLLSAHIYVTQKNNIRKTILDQKETGFLSKEEILKNKKFDIKIELPKKIYGVNKKDFSLDGKIVVLPIKMQWESILNDSMIKNELGGKVPKDFNWDKVFEKYFPRDLSNKYHQKVRKVYSLPMVAVAAVGFRFRRFNPKGKEFWQLGSIDDAKADRFVIKNDDISNELLIEHLEKSKNLVPLDIPNKVKKDESTVMMDEWKVIKHGMEKTGVKEFEICPNSTSRFRGRLKLTEEKFKKEVLPFCKNCKEVDNIFDLTEEITYEGGKFCDSDLLQKPRSNLFITNIGSDVEFEYIANGFPKGVRKKYVEAVENSK

SEQ ID NO: 1373 - protein, 1467 aa, unidentified
  REGION 1..1467: note = Description of Unknown: Cas Enzyme sequence
MARILGLDLGTNSIGWAIVEKDGDGSSLIDKGARIFSEGVKSEKGIESSRAAERTGYRSARKIKFRRKLRKYETLKVLAKNKMCPLTLEEVEKWRQSGFKDYPLNEAFLKWLRTDDDKNINPYFFRDKASKGKASLYEVGRALYHIAQRRGFLSNRLDQSAEGIFEEHSPKIEDVLDNTTTIAELRTEITDYFDGLDIFDKNEKTGFKKDLDEGEKKLKSLFIALEKIIKTNEKDYEKAIVELKERLNRKEDLGAVKQKIGEISQAMKDGGFKTLGQYFHSLYNAEVELENKTTKEIEKFNRAKIRNQYTSREEHYLTEFEIICKAQNIEGINDAELLPEKKYSGLAKDLYKAIFFQRPLKSQKGLIGKCSFEKSKSRCAVSHPDFEEYRMWTYINTIKIKTPEDETLRFLKQEERQKLVSKFLRKKDNFNFEDLAKELIPKGATFDFYKSFNAKSSHYLFNYKPKDSVSGCVVSASLKNVFGEDWKTKIFSYKTKNSKGESVNRNVDYKDLWHLISVSNNDIYLQEYAKENLSLDEKRAKSFSKIKLKKDFASLSLNAINKISPYVREGLLYSHAVFMANIENIVDKKIWNNETHRKFIQNKIAKIIETNTYDNGLLDVVNGLIKEYKKESVYYSKEAETTFKKDLQKKLISFYKYHKIEDDQEQIFTELFPVFMEQLIKYEFKPVKRLDEKVLEFLSGENEDGEIFCTDEKQLKKLYHPSDIEVFKKKIHKDENGNEQLVLGSPLTSSIKNPMAMRALHQLRKVLNALILEGQIDPKTRIHIEMARELNDSNKRKGIQDFQNENKKAREAYRVEIKKLYFEETKKEIEPTEDDVLRYQLWIEQDKKEIYEEGKSIGISKIIGNNPDYDIEHTIPRSISQDNSLMNKTLCSKRFNREIKKTKMPVELANPEQILSRVDHWRIEAGKLTWEIDQIVKSTKAQATKEAKDRKVRKRHFLSLKRNYLQGKYDRFILKEPKIGFKNSQIPDIGIITKYSQAYLKSYFNRVESVKGGMVAEFRKIWGLQESYQENGKKYYEKKDRSKHTHHTIDAITIACMTKDKYDALASAWTLEDKEQIGAARKILADSKPWKTFTEDLKQTEEEILVSHYTPDNVKKQSKKIVRIRGKKQYVAEIEKDQNGKNISKKDANGKIIYQIDKNGERIPRLQQGDTIRGSLHQDSIYGKIRTPLNFEDIRCVIRKDLESIKATDIENIVDETVKEKVRTAKENKILVFSSNAQQKNKLNGTVWMNEEKGIPIKKVRLYANSVKNPLEIKEHAALSKSRHEHKQKVYAQNDENYAMAIYEGVDKKGNVKRSFESVNYMDAGAFYKLSNKNNNGDFLVPLMHLKTQLSLKYEVKKGDLVLFYQENKEELNKIDSEDLVKRMYKVIGFEGDGRIQFRHHKTAMQQSSSNKEELTIVKFMTDNKLKNSQVDFENPVPWLRLTMGNFNFLLNKAEFEINSIGKIIVF

SEQ ID NO: 1374 - protein, 1031 aa, unidentified
  REGION 1..1031: note = Description of Unknown: Cas Enzyme sequence
MEKKRYRLGIDLGTASIGTALVELDGPAEHPHPINILHMGVRIFDDGRDPKTKVPLGVARREAKQARKMFDRYLRRRKRLIDALIEFKIWPTDEPQRKALCLLNPYDIRTRALDEKVSLHELGRAIFHLNQRRGFKSNRKTDGGEDGKIRQAVAKLEELFQSEGCRTLGEFYHNRLNKGQSVRARLEGAGAKASYPFYPSRQMIECEFDKIWEKQSEFYPNILTENARNKIRSTLLYQRPLKPAIPGKCFLEPSENRAPIASPYFQRFRILQTINELRIIDRRGDQRPLTLEERNILLENLSQKKDLNFSAAKKLLSLSNYDRFSIQDERRDKFQGDQIAVLLGNKKYFGKNWYKLPLENQNEIVKALVNEQDTEKLIETLCVFGLSKEAAAQLSEETLPTGYGRLSLVALKKIIPFLEESVITYSEAAAKAGYNHSDNYTGEIFHYLPYYGKVLENRVMRGSGNEADNDEDRYGKVGNPTVHIALNQLRRVVNCVIKHFGAPEQIVIEVARDLKMTQDEIKNYKKKQADNEKRNERIDNELKKLGQSINRENRERYKLWEELADNPMDRCCPYTGQHIGIEKLFTEEVEIEHILPFAQTYEDSLANKTLSMRFANRLKQNRSPYEAFAEHSYKGILSYQEMLDKLPKDKAWENKRWRFEKGAMEKYNANGDFQARQLTDTAYASRLALEYLKFVCPKDSVWAIPGKLTSMLRRQWGLNSILGRELPDGSFEKSRDHHGHHAIDGLVVAMTDRALLKKMSDATQINWEHQERVLSHIDPPIIDIYDQAKERLSHLVVSHRKDHGLGGELHNKTAYGIIGEFKEGTVSTVKHKVPITSISSTNINQIQNDFIRNGIQNLIADSSSKQSLESAINEFSNKTGIRRVTLVEKLSVVPIKDKSGRIYKAFKPDGNYCYDIWANGDKWEGKIVSRFEANTQGTKMTQNILMRLIVGDTICREINGQKEFLRLVKMSLGRITFAPIFEAGALKTRDSDPKDPFKYITMSPNLLKQNKVRLIHVDECGFVYDPGFKEK

SEQ ID NO: 1375 - protein, 939 aa, unidentified
  REGION 1..939: note = Description of Unknown: Cas Enzyme sequence
LRYSRPPAKKVKEAEAEEGADLTAEQKEIRGLNNQIQGTRAQLQGKSVSEFQLKVLEDTSGPKFAAIRARLSPPNRLLEKIEDKKIREEHEKKQKPATDLRFDRWMFVEEFDRVWRTQAAHRPEMTDELRQKIEGLIFHQDPLESKEDEVGFCELLPTYRRCRTGELVFQRHRILSYLANTKVDDRKLTPAERAAALAFLLVRDKATFGQLKQAIGLSAASLFQDEPLPVVGKPPKGKGAVKAAGRDSVKGSSWGRQLLEVLAPHGVTAEGMASGNYDALVHDLVTLPEGPARYKALTERYGISDQDALLLMGLEAPKGHGRRCSRVLRHLEPFLMDPGYRKPNWDDAKYGEWFERLRKENPTVDWSTDSAHHATLKAGYKTDDIRRAENAMGFADRLEIERDWTTGNPSVDAAVRWSAKVINQVIERYGKPAVIRVELPRKMAAGNEERAKAFAAMNENAARNEVYAKMLDEAGLPFRPKSIKMLKLWEESGKRSPYEPDYVISSITELIENYDLDHIVPQSYAAEDGLSNLVICPRALNQRKGNKTPYEAFADDAERWQQIRAFVSTCWGMGKRKRERILAAERPPQTMEQRMLTQMGYVGKQMAAELQKVAPCEFVNGAITSELRHRYGINSVLQPVIAETPEGRAERQRELMKKRMAPAGEFAEEKNRDDLRHHAIDAAMVALVDRSLAQRLTRYYQQLETWRAGKEKGDKPGFELEESFPGVRRRLMVLLDSIPVVRPPDRRNAGALHKETMLPLAEFSEERGLPETFEVRGRHVLRFGPEGKVTGAWLKSEVHHGVIFALPSGKRTLISVSLFEVAQRLSDNRLRERRGERKRPLIDRTPPGSLYRFVMSISNGDTVEYTGDKGAGPGFYRIGTIAVGNGFEISLMDIKASKSDPKAESSVRVRSEDSLKTIEARVVRSVFGEVNFCEPVTDH

SEQ ID NO: 1376 - protein, 1431 aa, unidentified
  REGION 1..1431: note = Description of Unknown: Cas Enzyme sequence
MTHKNILGLDLGTNSIGWALVEQDFENKTGNILGMGSRIIPMGQELSKFEQGQAQTKNANRRIARGIRKLNKRYKQRRNKLIFILQQLEMLPDQIKLSEPFKNPLKLDKVSILPIEKKQKQYTALDLIELRVKALYQPVSLKELGKIIYLFNQLRGYSGGGNEPEKRQNEEEDNEVETTKGKESYIAFGKVLSVSEPSTVTVKNKELKKYKISFETEDGIIEGDSFLELLKIGESHELLVNVTTSKKYGETITFKLPNKTSWRKKMENLEKELTKLSKEKGREIYLSEYFLSILNENKWAKIRDNVVLRSRYQSEFDAIWKEQIKHHSVLNYLPKEKLSKILRFIFPGAKETQEKYRQTGLEKDLFHVIRNQVIYYQRELKDQSNLVSDCRFEKGEKAVAKSHPIFQEYKIWEQINKLTINTKTESGTNRKGETKYKYIDKPIPSSLKEWLFDELQEKKEVGFGTVLNKLKKEYKLREGIDFLNGMNPKAKLRGNETKLMLKKALGQQLWEQLKLDNPSIQIELWNILYNAKGNEYDMESERTSKVLSFIKVYLTDISNPEEIAIQISKIKFSRSYAALSLMAIEKILPLVRVGKYFSNELAEILKEKVIRVLNENVDDPFEKAAQEYLENNVDLLVEGGIMNSYATILVYDKHTAKEYGETERINNYHDIKRLTSGELRNPLVEQLISEALMVVKDVWKKYGKPDEVRLELARELKNNAERRATIYKANSANQKANEEVKNLLIELKQEITLTNIEKYKLWLSQENLKEEYVKQYKDPSKSEIEKMRLWREQGHVSPYTGKTIPLAELFDRERYDVDHIIPQSRYFDDSFINKVICEKAVNKEKNNRTAMEYFEIGSSIPSVLSKADFIDLVNKLFQGAKRKNLLVTKMPEDPIARQMKETQYISVRVKEELNKIVGNENVKTTTGGVTDYLRNQWGLTDKFKILLLNRYKKSQTFLAEIEFEKYLAAFEKKKKDYKEKGIPFTDIELSKEQHIESFNRNFLQKKNNKIVIKGWSKRIDHRHHSIDALIIACTEPAHVKRLNDLNKELQTWLDKNKKDILPDFEGSPTELLDEILNLEETKREMVFKQIERFKQIDMPWNGFPEDAEKKIQDIITSQKPKDKLLIQPDRNGKLQIKIRGQLHEGTLYGKSQGVEAYRIPLSKLAGKKFATEKTIEKIANEYLKDEFKKHLEDFGNKKEEAFSAEGILALNKKLAEKKNKNGEPKPHTPISSIKVFYRDPSKVKKKKGQEEIEEALQKLDRAKAFNNSLFVKTGDNYLFAVMEKNGNRVFDLITFFDAANLLKDEFKNANDKKSFNKDITFKDYFEKKNEANLLFTLKQGDPVYMPSEGEEELITNPEFWKDKAARSKNIHYVTKYSGDEIYFVNHSIADSIVRGKEFGSQNAFQNIESRSIKKHCIKLSIDRLGNIDPLV

SEQ ID NO: 1377 - protein, 1036 aa, unidentified
  REGION 1..1036: note = Description of Unknown: Cas Enzyme sequence
MTYVLGLDLGARSLGWAAIAREGENEQKILGLGVRIFEAGVEGSLETGREESRSAQRRIARLARRQTRRRRQRARQFYHALSNAGLLPPVSHAPGKPEAIEIQRVLNALDSELRQRHGAHSAIHQLPYLLRARALDEKLEEFELGRALYHLGQRRGFKSSRKAKAKDADEEKGKVYGGIHDLEARMQGKRTLGEYLAGLDPAEERIRGPYRYTHRSMYEAEFEAIWAAQEPYHAALTEQLKDVLKQVLFFQRPLQDSSELIGRCEWDPEKKRTQLWRPEFQRFRILQTANHRRLRDPEGILWKLSEDQRQRLIQALEGAKEIGLAKAKKLLKVAANWKFTIEDGGETKFKGDGVAAQMSAQLGEQWDGADAARRTEILEGIAKAETDEDVAAFLTRECGMEPEKARMAAEKISLPSGYASLSLEALKKALPFMEKGLSVQEARVEAGFDLTRESEPLAYLPPIQATDIELRNPAVARALTETRKVVNAIVREWGKPEEIHIEMARELKSSPVQRQKAMKINRDREKEREAARARIEKEAGLGRIGRKEIELALLYEECGGICPYTGKPLGGLASILNGTAAVQVEHIIPRSISLDDSFSNLTLATVEANGKKGNRTPREAFGGDAAQFDEIIQRVRSFKGDYYAARKLERFQMEETGKEALLAEFSARHLNDTRYSSRLAAEYLGLLYGGEIAGGKRKVLKATGQVTADLRGLWRLNEILSGDSRKSREDHRHHAIDAAVLAVVGQKWIQRLSEAAENAWKEKKRRYASVEPPWVGFNEDLQEAIGATHISYRPDHRITGGLHKDSNYSFVGKNAQGGDIVRIRKPVHSLGKDDIEKIVDLGVRRIVAEKVAAVGDFKKLESDPPLLPNKNGAPMPVRKVRIKLNRAVRKIGKGHKVRYAEGSETHHVEVCEVTEKGKRVWRGDVVSMSEAMERLVAGRAVVDRSEANERGFLFSLCKGDTVELNDPKGELSGIWVVKKIKGNQQVVISPEHDARLENGAEGERRAARAPTVGGLKALRTRKVVVDPLGQIWEAHD

SEQ ID NO: 1378 - protein, 1510 aa, unidentified
  REGION 1..1510: note = Description of Unknown: Cas Enzyme sequence
MKKILGLDLGTNSVGWALINQDESKSEVVGLGSRIIPMSQDILGEFDRGNSVSQTAERTGYRGTRRLRERYLLRRERLHRVLNILNFLPEHYGKSIDFEQHFGKFIDESEPKIAYKQNEVTGKMEFAFMNSFNEMVADFKLTQSRLVDEGRQVPHDWTIYYLRKKALKAKIEKEELAWILLNFNQKRGYYQLRGEEQEEEQKKRVEFYSLKVVNVEEGEESRTKGEKWYSATLENGWVYRRTSKTPLDWIGKTKDFIVTTDLDENGEVKRDKDGVEKRSFRAPLEDDWTLIKKKTESDVEHSNKTVGAYIYDALLLNPTQKIKGKLVRTIERKFYKTELEAILTKQLEFHKELKSRELYHACLEELYGNNEAHRNSLGARDFTHLFLNDIIFYQRPLKSKKSLISNCPLEFRTYIDKSNGMEVKESIKCIAKSHPLYQEFRLWQFLQNLKIYAKERIVDGRVVADVNITQELLTTEEDWVALFRWLNERKDLDQKAFLKYPPFGFKKEIDRYRWNYVEDKTYPCNETRALISSRLSKVANVPADFITREIEEALWHILYSVEERHEIEKALGKFAIQYGLGGDFVDNFKKFPPFSKDYGSYSAKAIKKLLPLMRQGEYWSKDVIDGNTLLRIDKLLTGEFDPTIRDRVREKSINLKCLGDFKNLPLWLASYVVYDRHAEANDIKSWKTPSDLEYFLRNEFKQHSLRNPIVEQVITETLRVVKDIWTHYGNGVENYFSEIHIELGREMKNPADKRKSMTQKVSENENTNLRIKALLAEFLNDNSIANVRPNSPSQQEILKIYEEGVINAESEIPDDIQKISKLSLPTTSELTRYKLWLDQKYRSPYTGEIIPLAKLFTSAYEIEHIIPQSRYFDDSLSNKVICEAEVNKDKDNATAYEYIKNNSGKKIELSFGKEVTLFTLTEYEENVKRSFSRNRGKMKKLLMEDIPDEFIARQLNDSRYISKVVKGLLSNIVRVDDEQEVTSKNVISTSGAVTSILKKDWGLNDAWNEIISPRFERLNQLTNSTNFGRMRNNQFVPYVPLELQKGFNRKRIDHRHHAMDALVIACATRNHINYLNNSYAMAGKRDLRFDLRASLCYKKPNDDGSEGYRWEFKKPWNTFTQDAKVALSNTVVSFKQNIRVINKSVNHYQKWEGDEHGQKQKVEVKQVKGDSWAIRKPMHKDTVSGRVTLRFQKAVNLSVAIDTPEFIVDKSLKAKVKELLAIPFDKKQIAKYFKENDNQWNGKPVSKVAVYYFDGENAASRVKVDETFNTQNIKKITDTGIQRILLNHLQQFGENVNGKVVEHPEIAFTSDGLEAMNRNIQNLNNGVYHQPIYKVRTYELMGSKFAVGTKGNKGSKFVEAAKGTNLFFAIYQSPEGKRSYESVPLNVVIEREKQGLSPVPEYDEKENALLFYLSPNDLVYVPTQEELVAPQSVYFERLTKEQVLNVYKVVSFSGSQCFFVRNDIAIAIIDKVEFSVKNKMERSIDGVMIKDCCWKLKVDRLGNVVDVIRR

SEQ ID NO: 1379 - protein, 1035 aa, unidentified
  REGION 1..1035: note = Description of Unknown: Cas Enzyme sequence
MSKHEHNQVVLGLDIGPNSIGWALVEKSDGAPDMLKVCGVRVFEAGLAELEMDGKGKSRNAERRDARGRRRLLERRGRRLTKVANRLMRIKLLPDFRYNDPIERHQAFKELDDKYGSPYSLRAKALDIALERHALGRAFYHLAQRRGFKSNRKSTPKESEKIGEVKKSIVELQAKIAAVAARSLGEYFAMIEPMKERIRQRYIGRDMVEAEFKMIWEQQAKFYPEILTGPNQKKIHKAIFHQRPLKVQSKFVGKCELEPKKKRAPWALMEAQKFRYLQKVNDLMIENDSGSRKLTEEERNKLVEKLEVEGDQEFPKIRKLLGLSGRASKFNLERGGEKKIPGNRTTSRLVPIFGLDRWKAMEESQKNAVVQDWRATVKEEILANHGAFKWGLDEEKAKKFSNVSLESGYCSFSVKAIKKLLPHLETGMRLQETIKEEYSERWARKGEPQPSLPPVDKSGLSTLTNPIVHRSLSELRRVVNNIISEYGKPDVVKIELARDLKQNAKDRAETAFKMRENQKAREKAAAEIIKECGISEPSQRDILKYLLAEECEWTCPYTGRKITMSNLISSNPQFDIEHIIPFDRCLDDSYMNKTLCEVNENRIKGKRTPYEAYHGTTKWDEIIQRVKSFKGNARNAKLRRFLMNPQEVSRLLDDFTARQLNDTRWAARWAKQYLGLLYGGLESNGVDSTGKLRVQVTSGQTTAFLRNEWNLNSILGDGPGKSRDDHRHHLVDAVVVALTDQGIVKALSGAASRAGVVGRRLFDRLPLPWEGFCEQVKEAVNRTVVSHRVSHRVRGALHKETFYGKPRKDDKDRPYVHIRVPLEELTDSDLDKIVDPRIKTIIKQRVTELGGDPKKAFKSKDSHPTIIDGIGKEIPIHRVRIRVNISPMEVASDYRSRYAISDSIHHMELIECQRVRKGLTEKYWEGHVVTLYEAYRRLRANEPIIKRDFGEDCRYLCSISPGDTIEIDNGRGGRKLVILRTVPQSKQVRWVDINDARPLKKISKIGQTAMPDVLRKLHCRKVDVTPLGKVRHANN

SEQ ID NO: 1380 - protein, 1445 aa, unidentified
  REGION 1..1445: note = Description of Unknown: Cas Enzyme sequence
MKKIIGLDLGTTTVGWSYLKVPENENETLEVVDSDPRIIPTALNKTEFDAYQQGNAVTINADRRKYRSSRTVKKRYKERRRDLTNLCISCGFIKDKSELTSCESTKFFQTLKVRAAAVTEQVSLQDLARILVQINKKRGYKSSRKLNKADTESTGSVDVAMKIRTSGMTPSQYTYSRMQSGNFAVPSYFKSDLVNELDRIWNFQKRFYPDILTDELWKEMDGKKQRDTISIFKKHGIMQDDCKEASANEKKMNIAKWGVDAISEQIPLSRLATVIAVLKGKIGATSEMLDTLGDHTIILTINNWSIGQYLMDIVKKNSNARISNIRFYRNDYDNEFSMIWNKQAEFYPELTDELKKKFHDIIFFQRPRPSMKYLVNYCELESKEIEVVKNGKKIKVTTGSKVCPKSSPLFQEFRLWQTLNNIQVKDTKTKDSRRLSVDEMNILASELETREKLDKSEILKILDINQNDFDINYKKIPGNKTQTALLNAYLSVIESMGNEPFDVENASGSQLMDYVKNSFEKNGFNASVLHFNSDTNDISKDSMYMLWHLLYSYAGDNSRLGFESLITKVREMLNLNNDDQAKAVVGVMLEEDYGNLSAKAMKKILPFMKKGLEYDKACEQAGYNFSKTSIRKSEYSNQVLLEHLELLRKNSLRNPIAEKIINQMINVVNMLIDKYGKPDGFCVELARELKNSIKRRKEIYEQNQKAEEYNNKIKDIISKPPFNCPYPSEQKNIDRYKLYEELEPNGFRTLYSGTLIKPEELFSNKFNREHIIPQARTTDNSLSNLTLELETSNSDKSSMTAYDYVRSIGKTEEYEQNVKRIFENYSPALLKKRGLPENYGKTKAKNLMTTSEEIPSGFIERDLKLTQFITKKCAEILQQLVGIENVRFTTGQVTSQLREDWGLNDMMKELNMERLEASGNVYEVTYANGNTVKKVNNFTKRNDHRNHALDAIIIACTTQEHIVYMNNKSSKGKKNGQIYKIIKTKMHRDGEGKLRFNPPVPYDVFHSVVKNAMENMIVSHNKKLSPVTTGKSVSKDGTVTKNVVPRGPLHDDTLYGQRTVNSIRYVMVSEGKDGLSNSIIDCIANQSYRDAVKQRLADYSTLKKAFGKDNNVIDNPIWLDKIHSAKVPPFVKIVETEKIFTIRKKLDKKDMFKLHTFKINGTELVEGKSKKHISDAFCEPYASHIKCLMLSGTCKTLKCAIERSGADFIHWIDEDTFISFKSVRELVIDKACADAIIRRIVDSKCDLKAAFENIDNNPIWIDDKHTRFVSRVTMKAFITDNSSVQIRNGKTSVKTNNNHTAALYMKPNGTVEMVVVSFFDSVNKSVCRKPVIDKEFNKELGWKFIMSFVKNDILILKNDETGFDPKKIDLTDRSNNSLIAPNAYRVQKFSDDMCMLRHINDTTTEIGPAGNFKSLYGKKNLRILADAVKVKVDSIGHICLETDCM

SEQ ID NO: 1381 - protein, 1026 aa, unidentified
  REGION 1..1026: note = Description of Unknown: Cas Enzyme sequence
MVELTLGLDLGPNSIGWVLLDEGAARLIGVGARVFPEGVKRDTKGAEVPKMQQRRLARAMRRQIARRARRRRALRRVLVAAGLLPECALLAAEDKRRVDWERDEFRREDPYSLRARALRQDVKAHEIGRVLVHLCQHRGFKSNRKTDRARKKENSDLLAEISALDKELGDRTLGQYLAEIRGDDPQRFHLIRLRGRHTHREMYEKEFDAIWAAQQVHHPSLLTKELRERVHRVIFFQRDLRPPSPALVGRCELEPRLPRCPRADRRAQRFRLFQEVNNLRVLDMAGRTERKLTDDERAKLLAYLATTKERKFDDIRKHLFDQYETIRFNLEQGGRSKLKGMPTDAALAQKSMVGKAWHKLSEDCKDRIVAATIDDNEDRLRHLLNEAGLDVELVGALLEQIDLEQSYASYSLHAIKRLLPHLEQGLPLTSRDPQIPCALRAAGYIMPWEHTTDRRPCLPEPPMVTNPLVRQALHEVRKVVNAILRELVYKDGHTLARIHIELAREVRGTAEQRRKLSLDMRDREAVRADAADRIREYGVKPTRDAIDRYLLWKEQGENCVYSDRHIGIAQLLGGEVDIDHILPYPRSLDDSLMNKVVCFRSENSQGVNPSAKGDRTPHEWLAAFAPQKYERVLQRARDLPYPKLKRFYQESVELTDFFARQFVDTAYITTQVQQYVQCLGAVVVCPKGQHTAQLRWHWGLDTVLSELADSPAWQAASNFRPGEKNRADHRHHAIDAVVIALTNESRLQQLAAIRRAGGTETTGEVLPDPWPHFRQTVKDAIAQVKVSHRVSRRVSGALHEDTVYGPTKTPGEYTYRKPLVSLSPAMIDNIRDPAIRRLVVQRLQTHKIDPATAKKIPAEVWKEPLCMPPGIPVNKVRLLKRDESIRPIRGGTACVKPGSLHHLCLFEFPDTKGRRAREATFVTMLEALGRVRTRQSVLQQQHPTRSNADFLMSLSANEMLLLEHNGREDLYRFETAASTSEQMWFRHHTFAGKSSDKRGQVSKQPGTFRGRKVIVDPLGRIRWAND

SEQ ID NO: 1382 - protein, 1356 aa, unidentified
  REGION 1..1356: note = Description of Unknown: Cas Enzyme sequence
MSKILGLDLGTNSIGWAVVETEDNKTFTPIDKGVRIFQEGVKIEKGVEGSKAAERTAYRSARRIKYRRKLRKIETLKALVQFELCPPLSTEELNNWRYKKDYPTNEVFRSWWLTDNQDNIEARKWQKKNPYYFRFLVATKKLDLRVQENRYALGRAIYHMAQRRGFLSNRLESTKESEGAVKSGIAEISNAKGDRTLGQYFYDFYKKGEKIRDHYTHRIDHYLEEFNHICKTQELPTWQIDVLRKAIFYQRPLKSQKGMIGKCPFETNKPRCAVSHPLFEEFRMLCFLNNIKIKTPTDDKLRVLNNEEREKVTPLFFRKSKPNFDFEEIAKQLAPKKQYKYFKSADKNPEDWLFNYSMKTTVSGCPVSARFNSVFGEDWKNLSIPHISGKDKKASFINIDDVWHVLMTFDSDEKLTAFATEKLKLNEEQKKEFVNIRLKQDFASLSLKAIKKILPYLRQGLIYSHSVFLANMEAVIPVNIWSDKENREIIQNEIHQIIQTQNEEKQIVDIVNGLIKRNKEIDAAWSKEAIDLYRADLLKQVKIYYGENTFGAFSLERKERIEKSAFELFSRQMQKKMGSGEFAKMQRIDDRIKSFLADQFDIAENTNKLYHPSAIETFKPVIKSEDGNYYLGSPITNSVRNPMAMRALHQLRKVVNELIKAGTIDESTTIHIEMSRDLMNSNERKALQNWQRKRENERKKYAEEIKKHFDAQGIKAEPNESEILKYQLWEEQNHICVYTGKNIGLSDFLGGGTGYDIEHTIPQSLSFDNSQVNKTLCENNFNRAVKRNKIPSELTNHELILERIADWKENFEKLNNQIAQAVRSAKGAATKEEKDKVIQKRHELTFERDYWRDKYQRFTMKDVPSGFKNSQLVDIGIITKYSRLYLQTLFNKVFTVKGSTVADFRKFWGLQDIYEKKARVNHVHHCIDAMTIACMTKPQYEKLAKFYHEWEGLREDGHDKKPAFEKPWPTFTEDVKNIENELFVSHYTSDNLSKNSKKVLRKRGKKQYDSKGNPIIQTGDSVRGSLHKETFYGAIEREVENKKGELEKVIKYVVRKKVVDLSDTDINNIVDDKVRERVAEARKGEKPLLKEIEKLRKELQKAEEHDELGIKNAIGALEQQISELYCMPNKNGAPIPIKKVRLFQPTVTNPLTIKKQRDKKKDGLKEYKQNYYAANDGNYIMAIYEGKNGKGKVLRDFELINIMKAGEYFKKSVQLILQPQGIGGIDGLIPKVKFNGKLELLHKANIKIGTMVILWEESPEEIWDLEPNDIKKRLYKVVGLSIQRIKSTVGKINEYAIIVLRFHQEANQASELKTLDGAFKKDEPYMGQRKMNHNQFNALIENIDFKISPLGKIEKI

SEQ ID NO: 1383 - protein, 1072 aa, unidentified
  REGION 1..1072: note = Description of Unknown: Cas Enzyme sequence
MKRALRFAFDVGTNSIGWALLSGADPGGGEPDQGQKFELESVVAAGARVFSDGRNPKDGSSLAEMRRVPRGARRRRDRFLQRKRKLTRNLVRHGLAPVEAHEAKALDRLDPYELRVRALDEALTPYEIGRVLQHLNQRRGFKSNRKTDAADKNKGPLKEAMARLRENLRESGARTLGEFLARRRATGARFRPSADPKLLFEHYPTRELAEAEFDAIWTAQTAHHPELLTEGARTALRETIFHQRPLKPVKPGKCTFIPTEERAPKALPSVEARRIYETLNALRYGEGLSLNTPLTLQQRDLLAGRLLEGKNWSFDRIRSGLKLGASVHFSHEATLKEIKGSETAKKISNAKAWGKAWHDLDPETQDRIVELLLEEEQEEKLIATLMAEYNLPEDAARYVANASLTDGYARLGRTANARMLEQLRRDVVTYDAACKLAGFHHSDFRDGVLYDRLPPYQMVLERHTSFGSGEPDDPIDERLGRIANPTVHIGLNQLRKVVNAMIAEYGRPDEIVVELARELKQSTEQKDRDKRDNRLNQQRNEARRAELLRLGLPVNSDNMMRLRLWEEQKDRGSGVALCPYTLRAIDIETLFSGDIDIDHILPVSRTLDDSPANKVVCFRAANRYKRNKSPYEAFGQDNPQPVAAWADIEQNAVRLPPNKAWRFGKNAMEEFNANGRDFLDRQLGETRHLARVAKAYLEKLTPDVWVVTGRLTSLLRRKWGLESILSGHNIPDPDLPADQAPKLRKNRDDHRHHAVDAIVIGCTSRSLLQRVATNAARAEEAGIDRVFSDLPEPMPDFREQVSDAIAKVIVSHKPEHGKGGALHEDTAYGIVRNGDRDIGNLVYRKALDALTLKEAERVRDPNLREAILNVRAESGGDQKAFTAKLRDWAKAEAESVAARTGKLRQPLRRVRILKPEASAVEIADRRTGAPYKALVPGENYCVDIVQMRDGSWKGITASRFEVARKTWRPKWEREKLGGKLVMRLMKGDLIEIDEGGARAIKRVVRIEPSNNRVRLAGHLEAGTLGDRNNDKGDTFRWDYATYPALRVRKAHKVTINEIGRIKPCRSNVASKT

SEQ ID NO: 1384 - protein, 1074 aa, unidentified
  REGION 1..1074: note = Description of Unknown: Cas Enzyme sequence
MTGDYRLGLDLGTNSIGWCLLALDAAGRPCAVVDMGVRLMSANEEAGRDPQSKQSLAADRRVHRAARKRRDRFLKRRKRLMHLLIEAGLMPADEAARKALEAVDPYECRRAALDGPLDPHRIGRALFHLNQRRGFKSNRLAGHDKEDGATTAGKEKLKTLLAEGGARTLGDFLANRHDQRKTVRFRPRQEGAKVAYDLYPTRDMVTQEFEAIWAAQRPHHPATLTDDLKQKLHCVILEQRPLKPPPVGNCSLRPDERRAPRALPIFQRYRMLTELANLRVARHGRRDRWIRVQERDALLSKLMDAASKVEFDKLAKALKLGEDERFNLERGERKGLDPDHLNKVLGNKNAFGQKAWKAVAPDRRAALVDRLLSEEDPEAMDAWLADAFPELDAAGRDHVADARLPQGYSHLGRSALTDLVEIMKTESVEVHDPETGEVYRRPITYDEAVAKLPDGLHHSDRRPTGRLDRLPYYGDLPALKGNVVQNPKKDPESQEHRGRVPNPTVHIALNQVRLLVNRLISVYGRPKEIVVELGRELKLSREEKDRRTRENRENEKENEIIRSELAARGQQPTPGNRLLMRLYRELPADEKVCVYTGTVINCDRLFDGSIEIDHILPFSRTLDDGFANKVLCTRQSNRDKGNRAPAEAFEGRAGYDDEAMRERAHRILPRKAWRFEPDAMAKFEEKADFLARQLTDSQHIARLARRYLEHVSEPNAAWAVPGRLTAMLRGMWGLDSLLTDHNRPTPEEKKRKNRNDHRHHAIDAFVVACTDRGLLKRFSDAAARPEAVASQRLMSEVPEPFDGFRDQVRATLERIVVSHRPDHATNGQLHEDTAFGRVAEEIDGKAFNLVTRKPIDALSKREIDQVRDADLRERLRGVRDAAAAAGEKLETALAAFGRDAGVRRVRILKTEADPVTIRHGSDGRYHKSYARGQNHRMEIFARPGKNGETVWDGEAVSRFDAHSPKGRPIAWPDRYPDAELVMRVHKGDTVEADFDGTRKVYVVVRLSPSNGIVYLVGHNEAGTFQERHDDPADPFRWNFASYRKLQKAGARRVIVDAIGRVRPAVDKLRRPPKA

SEQ ID NO: 1385 - protein, 1104 aa, unidentified
  REGION 1..1104: note = Description of Unknown: Cas Enzyme sequence
MKYILALDIGVASVGWAVLDKESESVLEAGSNIFPEASAAENQVRREMRQSRRIKRRQRTRLNDFNKLWEKYNFSIPQIKSNEIVDLKVKALREEISLDELYLILYSYLKHRGISYLEDAQDDSVSGTSAYANGLKVNAKALEKNYPCEIQKDRLQTVGKYRGQTQVTDDNGEIIDLSNVFTIGAYRKEIQKVLETQKGYHDKVTDEFCDEYIRIFNRKRKYYEGPGNEKSRTDYGRFTTKLDENGNHITEDNIFEKLIGKCSVYPDELRAAAASYTAQEFNLLNDLNNLTINGRKLEENEKHAIIEQVKTSNTVNMRKIIAGCMGESIEDFSGARIDKSGKELFHKFEVYNKMRKALAEIDIDINDFSREELDEIGYIMTINTDKEAMIEAFGKSWIDLTEDAMECLISLRKANGSLFGKWQSFSLKIMNELIPEMYIQPKEQMTLLTEMGVTKGTAEEFAGLNYIPVDAVSEEIFNPVVRRSVRISFKILNAVLKKYKVLDAVVIEMPRDRNSDEQKKRITDSQKMNEKEMEFIEKKLAVTYGIELSPADFSSQKQLTLKLKLWNEQDGMCLYSGKTIDPNDILNNPDLFEIDHIIPRSVSFDDARSNKVLVYRTENQKKGNQTPYFYLTHSNGTWTYEQFKATVINLSRKKEYSLSRKKVQNLLYSEDITKIEVLKGFINRNINDTSYASRVVLNTVQNFFKAKKADTKIKVIKGSYTHQMRCNMKLDKNRDESYSHHAVDAMLIGFSELGYEAYRKLQGEFIDFETGEILKQDMWDANMSDDVYADYLYGRKWANIRSEIVRAEKNVKFWYYVLRKSNRGLCNQTIRGTREYDGKQYKINKLDIRTKEGVAVFEKFAFSKKESDRERLLVYLNDRKTFDNLVQICEDYRDAQNPFVQYEKETGDMVRKYARKHNGPRIDKLKYKDGEVGACIDISHKYGFEKGSRNVILESLVPYRMDVYYKEAEKSYYLVGVKQSDIKFENGVNVIDEEAYARTLLNEKMIEPGQSRMDLEERGYTFKLSFYKNDIIEYEKNGEIFRERLVSRTMPKQRNYIETKPIDRAAFEKRNLVGLSKTERIRKYRMDILGNWYPCEEEKFTKYC

SEQ ID NO: 1386 - protein, 1234 aa, unidentified
  REGION 1..1234: note = Description of Unknown: Cas Enzyme sequence
MKKILGLDLGVSSIGWALIEEGDEGQNNSIIGMGVRIVPLTTDEKDEFSKGNKISKNQKRTLYRSQRRGLDRYQQRREKLKRVLTRENMFPEDYLLQLSNLEVYGLRSRAASQKIDPRELGRVLLHLNQRRGYRGTRAEEAEEAASSKKTESSYLSAVKNRHQQILEKNQTVGQYFFEELVENPRFRIKNLVFPRKAYIEEFNAIAKAQGLSESLTRELRDEVIYFQRPLKSKKGLVRVCEFAGYTRVANNGVEKWYGPKVAPASSPIAQVCRVWEHINNLTIKTINNQKIKLTATQKRELFDIFNSQERVKPKDVIKALGYKEGDYKFDKLLEKGIQGNITYHTIVKILNGKYPNLLRFDLEIIEKADDPVFIACKKTGEILYQSNSKFVSPSFEKEPFYQLWHTIYSIQELQECTSALQKRFSIDTETAEKLAHLDFTKSGFGNKSVKAMRYILPYLMDGQGYSNACTLAGFNHSNSITKEENEERILKSRIALLPRNYLRQPVVEKILNQMIHVVNTLTDTYGTPDEIRVELARELRQSQEERNKAHRALNKREQENKKYAASLVNEFKIRATRNNIIKYRLYEQISGGSVKINATCLYCGKMFGFVDAMNGNGIDVEHIIPQQLRFDDSQNNKTLAHRSCNLEKGNMTAFDYMMTKSRDQFDAYMQRIDDFKDKNIISHTKHKNLITPSSELDEEKFIARQLQETRYISKKATALLRTNCRNVYVTTGKITEYLRRIWGWNDILLNLQLPKYKALNLTISEFRQASDGHLYTVETIPGWNKRKDHRHHAIDALVVASTKQGFINRLNTLSSKETRDFLYDQVREKTHTPGKLLERYLAKQRPFTTRETEDAAACILVSIKSGKRVATRSLIKDEKKTRGKNRLTGVLTPRGPLSEESIYGRIKLLTPNQPLKYLFEHPDRIVKDYIREKVVDRIRLFDGDAQKAFKLTKNDPIYLDEDKQTLLQYASCYEDKYVLRYPVGSIKVDDLKYIIDPVIRSKIRQRFELFNNDEKKALQGLDENPIWYNEEKKIPIRSVRCLRNLNAVEPIRQTNDIAHAFVKTGNNHHLAFFKDTTGNIIPHICTFWHAVDRKKYRFPIIIENPALIWQEIQLSAYEFPKSFLDKLPPEEYTFWISMQQNEMFLLGMEPADCIAALDTHDYKTLSPYLYRVQKISLKKTQIDISFRHHLETELDDSSTSKALKLYHNIQSIGALLKLNPLKIRINHIGQITNK

SEQ ID NO: 1387 - protein, 1063 aa, unidentified
  REGION 1..1063: note = Description of Unknown: Cas Enzyme sequence
MKYRIGIDLGTNSLGWAAVQLSEDLKPRQLMDMGSRIFSDSRNPKDKSSNASKRREPRSIRRNRDRKLARGRAMMHVLIEAGLMPKKESDRKILEAHDPWILRARSLHEKLSLHELGRALFHLQQRRGFKSNRKTDGVGDGAMLDAIKKSSALMSQHGAKTLGELFGKPRLEQIKNNETSTYGKRKPLPQARVKAQMDGPKMAYDYYPSRSLILDEFEKIWDAQTIYHPNKLNNKFKKSIRKVIEYQRPLKPQKVGRCTFLEEEPRAPKALPTAQYARILQEVNALKVGATGEIPRPLNGNERTSLIKLLITPSYKTSKRTFKTIRKELNLPDSQKFSHESNKRDHLMGDTTAARLMQEDSWGKSWFSLTREEQDIITIQLLECEQSNNLINWLQKTHNIGHDHANNIEKTILVDSHGKLSKAALEKILPYLENGLRYDEAVQHAFGDNAGKGDGVIYDEALPYYGEVLSRHTAFAKDNPKNDEERFGRVANPTVHVAMNELRKVVNDLIKRWGAPEQVVLELARDLPLSDRGLKELDRQQTKNQKSNEERNEWLEANNLKPNYDNRFKLRLFEENLESNGGIAKCVFSGKTISKTDCFSSEIEIEHLLPLSKTLDDSLANKVLCYREANRLKGNKSPYEAFGNSPSGYDWESISQRASQLNSNKAWRFTPNAMEQWKERGGGFLDRQLNDTRYISRLGKTFIESLFGGQGSKGQSQQVWVVPGRLTSNLRQYAGFNSLVGLTGGNRKDRTDHRHHAVDALVIALTDQSMVHRASNLAKNEDRLKYSEIMKTMAEPLKRYRLSAEDRLSKLIVSHKPDHGIYGGIHEDTALGITSEINSNGMNLLVTRKSLSDLTDINKILDEKLRTKFESSIKSLPQKDIPQALVKAGMAMTPPVYKVRIMKYKNPSSFITIQHGKKNEFKKAYLGGSNYCYDIFVGKNGKWDGEVISTFQAYQYSQSRTKGNTKSEWWKVNKRPDGSPLIMRIRKGDMLEINSGDDMPRCVIVYKFTKGRIYMSDHFEANASARISKKDILELCKSPLGLQKCNAVKVTVSPSGKIKRFKY

SEQ ID NO: 1388 - protein, 1158 aa, unidentified
  REGION 1..1158: note = Description of Unknown: Cas Enzyme sequence
LHLEPSNKEDDLKTLFDVLGKNNDTIYDISDEQIQFILKTVVENISRTAKVSKCISQLKLNNEDKKVVKEFINGLVGNKFNVSKLYIRDEDLQFDNEDLKMQFSNKSYEENITEYENILKEKMEFIDLMQQFYSWIELSKIVGSDSQHASISDAMVNIYENHGKDLRILKEMMLKIGKEEYDEMFKPTSKNIVNYYNYINPVAWSGDKTDGFYKYVKKAIEKSDDSRKDEILEKIANETFMLKQTSKNNAYIPYQMQKDELIKILDHQEKYYPVLKENRDKIISILEFRIPYYYGPLNGNEQFGWLKRKKGKENERILPWNHQEIVDIQETAAQFINRLTNYCTYLPMEKVMPKKSLTCSMYEVLAEVNKIRIDGKLLPIDTKNKMIEDLFYKSKRKTVKEKDLINWLKQNQLKVGEITGYQKEKAFSSSLATWIDFKEIFGEINDSNYNLIEKIIEDMTIFNEGSILKERLKNVHNLDQNKIKKIMKLKYSGWSRLSKKLIDGIRADNKFGSSVSVLDVMKESHMVLMEIINDKELGFKQIIEKENFKDETDSFTYEDIENLAGSPALKRGIWQTLQVIEEIKHYMGYEPKNIYIEFAREDQEKVRSTTRVKKLKSIYKDLKNQLDNHGNEVFANLNKQDEKNSIETRLYLYYTQLGKCMYSKEELDMDKLSDYEIDHIFPRTLTTDNSLDNLVLVKKKENQRKLDDLVLPLEIRNKMEVFWKKLYDNGLITQTKYYRLIRNEFRPDQIDKFISRQLVETRQITKHVANIIENHYKETKVFTVRADLSHEFREKYGIYKNRNVNDFHHAHDAYIACIIGRYIQVRFPGLEAKYIYGQYMRNLKKKKYDVDKENHGFIINSMKYECIDEDTGEVIWNPERVLDYINCFNYRDVYITKKLDTNNRELFKVTILPNDKNSEKDKTEATVPVNKLRNNVRKYGGFSGLQSDIVAIEGKKGKKIDRKLINLPILLRDLSIEDQCQYIMENHNYSEVKIIKRIKKYQLVEIDGGLYYLSSATELTNANQLILSNKDNKVVFEINDSIKKNNYSYFEKRELEITVLYDLLCDKMKKYYPKYRGIYERILNKNIDFDNLDIDVKCRVILEILKILKAGAINGNLKFDPYNMTNREGRLSKQSIKLDNTYFYDVSITGIYSKKYKL

SEQ ID NO: 1389 - protein, 1054 aa, unidentified
  REGION 1..1054: note = Description of Unknown: Cas Enzyme sequence
VSGQVGVRILGIDLGIASCGWGVIETSDTGGKVIAAGVRMFDAPLVDKTGEPKSAQRRAARGQRRVIRRRRQRMNAVRKILHRNGLLPDASRDALHEALRRVSPQGTHPPITPWALRAAAHERALTNDEFAVVLGHIARHRGFKSNSKSEGNANAADETSKMKKAMEQTREGLAKYRSFGEMLALDEKFKDRKRNRDKDYSHTAKRSDLEDEIQTIFSAQRHLGNPAATEELATSFTAIAFFQRPLQDSEKLVGKCPFEPDQMRTARRAPSFELFRFLQRLANLKISVGRIETSLTADQIALAAKGFGETKKTITFASLRETLDLDPNARFAGIAKDKESKLDVAARTGGAAYGTKTLRDALGEAPWQSLAKTPEKLDRIAEVLSFREDFDSIRKGLNDIGLEPIIVENLLDAAAKGAFKDFTRAAHISALACRNIIPGLREGLVYSDACARAGYDHSARAAVSLDNINSPVTRKAFGEAIKQIRAVAREYGPFDFVHIELARDVGKSAEERAELTKGLETRTAEKERRRNEAAELLGRPVTDDELLRYELAKEQGWKCIYSGDPIDPKGFAANDTRYQVDHILPWSRFGDDSYLNKTLCTTKANQDKRGRTPFEWYEADKTEADWALYVARVEGLKEVKGRKKRNYVLKTAADIEEKFKARNLTDTQWVTRLLADELKRMFPPRPEKRAPDGTDERRVFTRPGAITSKLRRAWGLEGLKKVNGERLADDRHHAVDALVLAATTEGLLNRMTREVQKREKEGRQDDIFHVQQPWPGFRLDVERTVYGANGSGGVFVSRAERRRARGKAHDATIKQIREVDGEKIVYERKAVEKLTDKDLDLIPVPEPYGKAADPKKLRDEMVEALRAWLAAGKPKDKLPRSPKGDVIRKVRVATKDKVAVEINGGTVDRGDMARVDVFRKKNKKGKWEFYVVPIYPHQIATMDTPPNRAVIAYKSDDEWTLLDNSFEFIWSLNAMSYVEITKSNGEFIEGYFRGLHRGTGAANVSKHWTLEKDGASDGIGVKTLADFKKFTIDRLGRKFEVSREVRTWRGKACT

SEQ ID NO: 1390 - protein, 1204 aa, unidentified
  REGION 1..1204: note = Description of Unknown: Cas Enzyme sequence
MERILGIDTGTNSLGWAIVDKDESGYHLVAKGSNIFSEGVKIEKGIESSKAAERTGYRSVRKHYWRRKIRKIRLLTILVENDLCPPLKKEVLRQWRLKKVYPKDDAFMDWQRTEDKANVNPYKFRYICLTQKLDLSDITQRYILGRALYHLNQRRGFLSNRKESTKESEGAVKEGISTLTEDMKASGCEYLGEYFYQLYQEGKKIRNHYTARKEHYLKEFHAICEKQNLDSTLVGKIEKAIFDQRPLKSQKGLVGTCTFEKGKSRCPSSHPLYEDFRMYAFLNNIKVQVNTMFEKCERSLTDEEKKQIIPLFKRKSKRTFPFEDIAKKLAGKNKYCYNKSNEEKPYKFNYQMDTQVSGSPVNAQLEELFGEDWLTSVCEVYTLAKDKTRFQIMNDVWHALFFYDDEDKLKEFAISRLQLNGEQAEKFSKISIPNDYAALSLKAIRKILPYMRNNGLIYSEAVFLANLVDVLPGYVWGVKEVREAAIENVIDVMHSYDKNNVDGVTLEACVKAFLKDRYQVSDDDLKKLYHPSMLDLYPRQRPDSEGIYQLGSPRIDSVKNPMAMHSLFRLRKVVNLMLKKGYITPDTKIHIEFSRDLNDANMRWAIQTWQRENEKDRERCRKEIEKYITTPSDTDILKYQLWEEQNHKCLYTGEEIRLTDFLGDNPKYDIEHTIPRSAGGDSTKMNLTLCSNRYNRDVKKTKLPSQLAAHDEILERIQGWKERYEELDSSIRKLKGSRGTSKEEKDRIIRKKNLLKLQRDYWRGKYQRFTMTEVPEGFSRRQGTDISVISRYARMYLKSVFKQVYIIKGIATSDFRKLWGIQEEYAKKERVNHVHHCIDAITIACIGKAEYDKLAQFYHETDEYKQGKGKKPEFEKPWPSFVLDIRHIQDELLIAHYSKDYLFKQAKRYVRDNKGGKILTQGDTARASLHNETYYGAIDVDGEVKYVVRKSLESLEEKDVKNIVDGEVRSKVENAILLHGSLKKALENTIWMNEEKQIPIKKVRIFAGSVTRPINIRQQRDQSKHDYKRQYHVQNDRNYMMAIYVGYDKKGKEKREFELVNNITAANFYRRSNDKIPTDNQLVPLYSQSGYDLRYKFKIGTMVLLYEYSPEEVWELDRINLQKRLYKVTGLSSMVIKEKYEFGTIEMVHHQNARPSSEIKKVNGEYKSDEEFRPGIKMLHSQIKALVQGVDFEINDLGEIKRLI

SEQ ID NO: 1391 - protein, 1013 aa, unidentified
  REGION 1..1013: note = Description of Unknown: Cas Enzyme sequence
MTLLIDNGLMPADMQARKALEHLDPYRLRADALDQRLEAHELGRALFHLNQRRGFKSNRIADSDDSDKSATRDGMRHLKRALDDCGARTLGEFLASQHQRDRFGRRVSQDGKTAVPQSVRFRPSTAGSKNLWDFYPSRDLIADELVKIWNAQRTYHHCLTTELFNKLERLIVNQRPLKKPLVGRCTLRPELQLVRQHGLELDLGERAPKAHPSFQRFRILQDVAQLRIVRLGGRERPLSLQERDMIAACLMKLSGHTISFERLRAAAKLPEDARFNYELAGRSGLQSDQTAAKLGSRKAFGKLWRALSRERQIEVVERMLAVEESDVLEAWLCRERGLDKAESEAVSGMRLPQGHGAFGRGVLTDLVMVMERESRQATDPDTGEVYERPLTYNEAVAALDCHHSDLRPTEKSARLPYYGKALVRHVITKPNAPEGSQDSIGRVPNPTVHIALNQVRGLINALIDEYGAPKTIVVEMARELKLNKARKLQIQRENRENEKKNDERRERLASLGVADTHDARLRLRLFDELPASERVCVFTGAPLSIERLYDGSTEIEHILPYSRTLDDGFANKALCTREANRNKGNRAPAEVWSGGDLQEIVERAERLFPKKKAGWFRPDAMGRFEAEGGFLARHLIDTRHMARLAKTYLEHVCDDVRVLPGRLTAMLRAKWGLNSLLPDHNFAGANRPKNRRDHRHHAIDAFVVACTDLGLLNRIARESGRAETLNLGRLFPHGSFPVPYDGYREDLAARLNTIVVSHKPDHGLSPKTQANVHVTSGQLHEETAYGIVNEQIAGKHYNLVARKPIEKLTRGEINRVRDGGLRADLQGVADEIKGVDDKALLREALANIRRHRNIRRVRILKTEQSVRIVRHGAGFTKAYAPGGNHCVEIFEPPNGEWSGEGITIFDANQPGYVPAWRSEHPDARLVMRVHNGDLIEADFGGGRRIVRVYRLEPSANQLRLAGHNEAGSLDNRHKDPNDPLRWIFGSWAKLQKGQSRRVRVDILGRVAAVEDRL

SEQ ID NO: 1392 - protein, 958 aa, unidentified
  REGION 1..958: note = Description of Unknown: Cas Enzyme sequence
VDETSEGGRLSRGVKRTADLLKSHEWRTIGEMAAKDEAFADAKRNKGGSYINSFSRSLLGEELRTLFDRQREFGSSHASKDIEAQVWEQFVAQRPALTGKAMLEMIGRCTFERDEYRAPKRSFSVERFIWLSKLNNIKVIEAGHRRALTAEERRLAKDLPYRLSKVTWKQLRKAIDLPEAPSAGFAGLSYGSRRNRKGEPVDPEETILVELKGWHAMRKELDADATRSAWERLSGAALAGDPGLFDAIAQALSIYKSDAELEPELVRLGLGSAEVAAILRIDYGQFIQLSAKAIAKLMPHLESGMRYDEACAAAGYNHARPVADGTGARLLPRFESGEIRNPVVFRSLNQARKVLNALVEQYGAPVAVHVELARDLSRSYEDRKDVERGQKEFQVEKQAAVDYFVEQIGRHPKRDELLKLRLYREQDGQCAYSRQPLAPDGDIRTIFESGSTQIDHILPYSRSFDDSLNNKVLVRSVENQNKGNRTPFEYLGGASESEAWRAFEAWVRGHKIFRKAKRDRLLRENFGGEESTEFKERNLSDTRYVTKLFADRVRHRLAFAPDEDGTLRKPENRVLCPAGGFTAFLRARWGLVKNRGASDLHHALDACVIAAASRTLQKRVSDFSRRKELTQLPNGTFVDAETGELLLPEAANALGERFPQPWIQFRDEVVARLSEDPRSAIPENHPGYDEAARASLKPVLVSRAVKRRARGAIHEDTIRSTARHLGPNTSAKRVRLESLKLTDLPDIVGFGDARNSGLLATLKERLEAHGGDGKKAFGPAAPPVHKPRRDGTPGPLIRAVKVKSVQKGGVRVRGGVADQASMWRVDLFEKGGKYYTVPIYQADRHRNAALPNRAVLAYKARNDWTPLDESYRFCFSLHPNDYIRLEVGGSKYYGYFSGLDVSTAAISILAHDRNSEIGKNGVWRGLGVKLGVGLLEKYHVDVLGNLYRSRPEVRSGLA

SEQ ID NO: 1393 - protein, 107 aa, unidentified
  REGION 1..107: note = Description of Unknown: Cas Enzyme sequence
MNGKSSLGPLTFGFDIGIASVGWAILGQSRIVALGVRCFDAAEEPKTGAPLNEHRRLAKTQRNRLRRRAFRLKKLRRILRDAGMTESADVAAFAASFAQSGTAHLDP

SEQ ID NO: 1394 - protein, 1072 aa, unidentified
  REGION 1..1072: note = Description of Unknown: Cas Enzyme sequence
MAPTETILGIDLGANSLGWALIEAPKGNPCRIVDAGVRVFEAGVNLRETGEKASLNIERRNARSRRRLIERRARRMRKLLHILQQSNLLPAGELHGHLRKGEGSPMADFFLDPDNEPYQLRAKALSHKISPYQIGRCLYHIARRRGFEFNRKTPKKDNEDEGKLEKETGQLENEWIAKGARTLGEYLASLDPHDRRRRGIKTLRRWYKEEFEKIWENQKKYHPELLKEDLKNKIFKAIFNQRPLKSQNKYIGRCQLETDNPQYIPKRAAWATLLAQRFRMLQDVNNSRIIDPSNQERPLNPEEREKLISILEKKSMLKFTDTRNKILKLPKGSKFNYENGNRKSFLGNKTAEKMISIFGEQWDKMSALEKDQAVEDVISIQCKKALNKRGENFWKLTGDNLEKFVSFSPEAGYCNISKRALKKLIPLLEQGLSYSEAVKKVYPEKANGTILDKIPPIENLRNPIVQRSLSELRRVVNCLIKKHGKPGRIRIELARELKKNTEERIRIIKQMDENEKDRKRARERLEEITEFENPTNFMIQKYLLWEECKGVCPYTGKPIPLTNLFSDSSEFDIDHIIPFTRSLNDSFLNKTLCHNEYNRTIKRNQTPWETCGAAAEAGDPKKKKEWEDILERVKNFESKRIVSWRDYNTGEIKTTTKKSFEKLKRFQLKKVDDEEVFLSDFTSKQLNDTRYASRKAREVLAKLYGIEGFKKVQVVTGQITAYLRRAWDLNYLLDEENTKTRSDHRHHAIDAICVALTEQRIVHQLHIAAKYGVLRKRAGSFSRMEDPWPDFQENIKSMIQSIIVSHKVSNKVSGKLHEETHYGKIRSPYHYERKDGKYYTVIRKKLSELEGNSESAAHQNIDSIVDKAVREKIIEKLQELMKKNKIDSFRNAIKLFSEEENHPVFFTRDGRRVPIHKTRIKVQCNPSKIAGGDHERWVKTGNNHHLAVYEIKDKKGNIKWRSEIVTLFEAMRRKKFKEPIIKQVDENGNPLVFSLSINEAVEIDWNGKREIAIVQNLSDRDYRFYRPEDARLSGKKDVLRVRGDNKLLHSRCRKLYISPIGEIRRAENGASS

SEQ ID NO: 1395 - protein, 996 aa, unidentified
  REGION 1..996: note = Description of Unknown: Cas Enzyme sequence
MPPLTLGLDLGPNSIGWTLIEENEAGDPTRLKDMGVRAFQEMVDRKTKTPKNHKRRDARQARRQRGRRKMRRETLRRQLMRAGLLPEDAGALRRLFHEADPYEIRKRGLDEALTPRELGRAIFHLNQRRGFLSNRKVRDSGEKKKEDGVALKEIGELKKEIKEAGSRTLGEFLASKPKKRSRRTERRMYEEEFDALWRKQAEFHPDLLTDALRARLRKTLFFQRPLKVQKFLVGRCTFEPHSKRCPWRRPEAQWFRALQDVNHLEINDPKTRLYRPLREEEREAIKKLLRERKTLTWRSIRRALGLHEGETFNIEDGGKKNLIGARTLIDVRKILTKETWEAMPEADRDAFFEDLFSIDKEELLLKRLERRWGLSREQANALLNTEFQPGYASLSLRAIRRITPHLERGLNYHDAYQAAGYQREDQKEVEAGDALAPAPALRNPIVQKAINETRRVVNAIIREYGKPDIIRVELARDMKLSQKRKKALDLQNRKNRDMNDEARKLMAELGVSDNGGNRLRYRLWKEQKCKCPYTGRSIGGRDIFSPEFEIDHILPYSRTLDDSYMNRTLSLASANRAKGNNTPREWKEGGEGFADMLQRVSAMKEMPFSKRRRFEQKELDTDGFIDRQLNDARYISREVSRYLQALGAEVQVTTGQATAALRRSWRLDSILAIDSDIEKNRADHRHHAIDALVIALTSRKLFLSIASLSEEQREVLGKKRFPLPPPWPGFMDDAREKVGGIVVSHQPLGKITDAFHEETAYGRIEHEGREAFVRRVPLESLTAKQVEKIVDARVRELVRERMAAHGGKARDAFANKPLWLEHSRKGTGKTRIRTVRVAENPNPDGLFGVRRQGEETPFKYYAYGNNHHVELIENEKTGRRKGVVVTAMEAARRARRERIPIVRRDHGAEWRFIMSLSINDMVRLDKPVNGCNLYRVQKLSPGKITLRPHTSAKTEDKTMELTKSANELKKLGGRKVSVDPLGKLETAHDQENRRDR

SEQ ID NO: 1396 - protein, 986 aa, unidentified
  REGION 1..986: note = Description of Unknown: Cas Enzyme sequence
MGTYTLGFDIGSNSIGWALVETKKKPSIVGIGVRVFPEGVDRDTKGLEKSKNATRREARGARRTHQRRNLRKKQLLKTLQKVGFLPTSKSELRSVFHTNPYGLRKKGLDEKLERYEFGRVLYHISQRRGFKSNRKSGKAKEDGVVIKGANTLQTEMDTKECRTIGEYFASLNPEEQRIRGKYTFRLMYEKEIDLLWAKQSEFYPDVLTEELTKKIKDEIIFFQRPLKPQDELIGNCELEPGEKRCPRGDWYARRFRILQDVNNLLIQNPDGAERKLTEDERVILLKELSQKKEIEYDKVRKLLGLMETQKFNLEQDGKVKKLKGDGFAAAMRSKKLFGPAKWGEMAETEKVKLNEWLIELEDDELKEKLASEYKLNEGQIEAALKIELPRGYMSFSRKAITKILPFMEAGAITSEAIEKAGYRHDDRSTGEAVEKLPMPPDLRNPIVQKALFEVRKVVNAIVKEYGKPGKIKIEMARDVHGSRRQREELHWKILENEKRNEDVRKRLREDINIANPTRDDVIKYKLWEECGKMCPYTGKQISQTALFGPNPEFQVEHILPYDRSLDDSYMNKTLCEVHENIHVKKNQTPFDAYSHDPEKYEKIKQNIKVLPWPKRQKFLQKEIDLDQHISRELNDTRYICKEVVGYLKQLGVNVRGTRGKITGELRHQWGLDGIFTELGVRRDEDHRRHAVDAIIVAVTENEHLRKLARSKYSVTGEVFNQPWPDFREEVRENVKQINVSHRVQRKASGKLHEETNYGPTGKEGLYVFRKKLEDLTLAMVKDIVDDVVREIVKKRLEEKGVDFNGKGRKPPKEVWKEPLYMRTTKSNKKVLIKSVRVYNVAKHAIPLKDLSGQIYRYVEPGSNHHIEIFEYADEKGRVKRDSKVVTMFEAVQRNQKGEPVVKKDYGDGKKFVCSLSINDMVMMKNKAGEMDLCRVQKMDANKMVRFRHHTASTIEQKETYIDKTAHLFEGHKVTVDPLGRIYPAND

SEQ ID NO: 1397 - protein, 1261 aa, unidentified
  REGION 1..1261: note = Description of Unknown: Cas Enzyme sequence
MKDRQRIRLDGENFEKSDITESIRSAFDGQDVLFYVNREKLDRLGITLTQEDIFQTYKKDTPKERVSLFWRRIGIDPGVQSLGLAYAIYIRSEVEYFKAHWTEGAPFPVPVAIIFAEALVFDNAESTKYLQGQTAEASVARRNYRSTRKLRDRKHGRMSLIEHTLIKVFGVNVDEEIRHAKGAAQYQWDLRAKAVTEEVSLEELSIIIYALCRKRGYSSSPLPDSETVIGKDKEENPESEAAPVSAKGKKPKKEKNEEQKVKEGVVAMHNALKESGLTPGQYFVKKREKEGGILRKKNVYIHRDDYMAEYDAIMKTQQKYHPEVLDDMTIGMLGRIIFFQRPLKFVKGKIGACAFMNREIIANGSMRIVGSPCAPVSSPLSELSRILQAANAITVKGPEGERRLTIGERNKVVDYLLNHASLKSDDIMELLGLDPSLGYKWDDNVSKGIKGSNVIRKICKALGKKDLSMDDLDLKYSSYETTIEKVDKDKERISVQATQEEIAPESLEKASFDEKGDLKVDFATIYRIWHTIFMPSGAKPAQVVETLGKNFGIDGETARKLVSIDLPEGRGKLSASFLRKLIPQLLKGLVYSDATAQVGFRHSDFATGKENGEKQYREYIVPPAKGSLRQPTVERSVMIMVNEVNRFISVFGVPDAANVELPRALRQDKDVRKKVFMENAKREKLKEAARKELEELAGKDPRIKVTDRNVSKVMIYHETDGVCLYTGEKYSLEDLLVNGAYDIDHIVPRSMDGPNSDDNKAACPVSVNRISKNALAALDYVESLGEAEKDAYVERVSNLHKERKISDEKYGFLMMTKDKWTERAFSEGSLTQTGFISRTIKNLLGTVIPEVEISVGKITGNMRAIWNYDRILIEANLPEAEKAGKVYCNTKGEKVIEGYGKRNDHRHHALDALVIACYFPQIVRKYGMICNNFNNLSPEEKCNRPGVNRQFNEFIHSLDHIPYEDLVMPFRSLAVERKVNNRIMRKSKEGRPEPRRSLCADTIYGYDEATGNNTIRRSVSKLNHLNVKDIIDDDIREAFAKKLSEKGAKYTAPSAIIDMDRKEIISEKETEGRKNIRVVDKVKMYARDNICKIGSDYKALDGNEHLAVYKATKGKKVSYEQVIVPYFFAVERYRADLPIVVEDAAAWREEARKAGLGEENMKASPEAGWELSMVFRIGMNLIIGTSEEERAEIAKAVEEGDNAVLEGHMYTVQALTYGEVRMRRNSDARKGNDPLIRMSPVTVVKANAKVVKLAFGKIKIL

SEQ ID NO: 1398 - protein, 1209 aa, unidentified
  REGION 1..1209: note = Description of Unknown: Cas Enzyme sequence
MKKRILGLDTGTNSLGWAVVERDDNNMLSLIDKGSLIFQEGVKIEKGIESSKAAERTEHRASRKHYFRRRLRKIELLKVLVNYGWCPYVSAEELHLWHTKKQYPKNDEFMLWQRTNDNLEQNPYYYRHVCLHDELDLSNPSEAFILGRALYHLVQRRGFLSNRLDQSEDEESGKVKAAISDLSKEMQEAGCEYLGDYFYKLYSEEGNKVRIRTRYTDREQHYKAEFYAICKCQKLSEEQISELERALYFQRPLKSQRQGVGKCTFEPRKPRCADSHPAFERFRVLSFLNNVKVQGPNEIELRPLNANEREKALPMFFRKSKSNFDFEDIAKAIAGKGRYQYIKDEGDKVYKFNYRMTQGVTGCPTIAQLQAIFGEDYANGIAEVYTRGDGKTVEQMVEDVWNVLYSFPDKENVKQWAKDNLQLDDDLAEKFSKIRLTRNFASLSLSAIRKILPWLERGLIYSHSVTMAKVPDIVGKAIWQEHGNTITTELIELIENFNPKDEAMQGTLDFCVKDYLRNNFDLAPGVAEKLYHPSMIETYPDAKKNEQGVYQLGSPRTNSVRNPMAMRSLHEVRKVVNQLLRNRTIDENTEVHIEYARELNDANKRRAIALWNNEREKKRTKYKEDIVKLYKEQTGKTITPTEDDILRFELWEEQNHICLYTGKQIGITDFVGENPNFDIEHTIPRSVGGDSTMENLTLCSSRFNREVKKAKIPTELSNHDDIMARLEEWKRQIEELRKRIDKMRTYSSMKKQDKDNRIRDRHKLRLQLEYLQGKYKRFTMTEVPEGFARRQGAGIGLVGKYAGLYLKSLFHKKEDRAKSNVRVIKGATTAEFRKMWGIQNEYEKKSRDNHIHHCIDAIVIACIEPGQYNETARYYQQLEEYERHEGNKPSFKKPWPTFTEDINALAQEMIVVHETPDNMPKHARKRVLTANGKVLAKGDSARGSLHNDTFYGAIEKDGEVKYVVRKMLSVLKETDVENIVDEVVKQKVKDAIKAKGFKEAMAGDIYMNEAKGVKIKKVRCYVPTVVTPLHIRQQRDLSKKEYKQQYNVTLDGNYCMAIYEGLVKGKMKRTYEIVNMIEASNYYKESSGLTKLYPIAPEEKNGMKYRCKVTTGTQIILLQSDDEDIDLADSKELSARMYYVAIMSKDGRLVLRHNQEARTADVLNKEQRAGAYKKTDEYRSQIRLTLSDFHALVEGVDFDINVLGEIKRK

SEQ ID NO: 1399 - protein, 1352 aa, unidentified
  REGION 1..1352: note = Description of Unknown: Cas Enzyme sequence
MKKYNIGLDIGTNSVGWAVVESEKQKVLRKGNKKLWGVRLFDEAVSASLRRNFRSTRRRYDRRRYRIKLLKEEFQNEINKVDPNFYQIMKESFYNKNDKVNKTIELNKDEKDFFNSYQKNYPTIYHLRNALINEDKKFDIRLVYLALHHIIKYRGSFLVQGEFNTESLNIEESFCNVVSLICDYCQEFDIDENRDFKDLEKILLLDSKNDKKVELTSYFNFMPKEFTNEFIKMINGNKFNFIKMFLLDIDSAKVELSFSTTEYDDKYDEYEKLLGERIELLEALKNLYDIVYLKKIFKESKTPSLSSLMIGYYDKHKEDLKFLKQVFNVDRTIGGKNENLYDKLFRTKNNAKKENYCLYDRYITNSITYDDFQKELKKLFDSVNWNNVNSFLVKKYNEEILMRLENGDFLPRLTSVENGKFPYQLNKNELVKIIENQKKYYPFLGDEYNGTNKLVQLLEFRIPYYVGPLTTTEKSNFAWMIRKSGQESIRITPYNFDEVVDKEASAEEFIKKMISSCTYLLNEKAIPANSILYSKFKVLNELKQIKINDNPLSKELQEQIYNDLFLNTSGTITDKKFKEYLYANKVTDIYGDDILVKGYSADEKFANSMKSYVDFFGIDGVFENTNYTLNDAEKIIEWITIFEDKNILKVKLNREYPDLNEEKVNKLLKTKYTGWSSLSRKLLTGVLYFDKETNTSKSIMDLMIETKENFMQILNNKKYKFLELIDKINGEQITKKVNYDLVRDLVTSPATKRGIYQALKIVDEITNYIGYDPEYISIEMARNEDKKERKPDRKKYLESLYKEYKNKIDNYNDLNKELKNQEKIDSEKLFLYFIQEGKSLYSMTPLKIENLSDYEVDHIIPRTLIKDDSIDNKALVLKEENQNKAASFVLPSNYKTDTNRKWWSRLKSIGLISNKKYYNLIRKEFNSKDIEGFINRQIVETRQITKHVANILANLYENSKVIYLKANLSHNYREKFELYKFRDINDYHHAHDAYLAAVLGEYKEKYLRKNIDFDMVKELNKDLIANKDYKSLKYGYVINSLDDKMNYLINDIIPMQIDEETGEVITKEFDSKVFNKNIENALYSNDILISKKVEYKSGEFYNQTKQRKGSKGVSLKENLPTKLYGSYTSLNPAYAVMVTYLNKGKETKKIVGMPIYILTTSKKDEMKTTDYLVNLLKLKDNKDILKISSPIPFYSLIEWECGQFYLVGATERGAEIINAKQFKFEKQFLTTHKETLNKLFNNKKSSVDENVYLRQLDEIIVYLIDKIEREYICFKTLNDRLKDWVKLLDNNLENKEQFIIEILKTLKCSSIHGNFKFINQTSEFGRKKDKSISSCKIYNNSYTGIWSKYNEF

SEQ ID NO: 1400 - protein, 1361 aa, unidentified
  REGION 1..1361: note = Description of Unknown: Cas Enzyme sequence
LSRTEKNKHGKKYYLGLDIGTNSVGWAVTDENYNLCKFNGKKMWGIRLFEDAKTAAERRTKRSNRRRMARTKQRIDLLQELCEKGIFEKDPTFFIRLNESSLHLEDKSTSEKYPLFVDKEYTDIDYHREYPTVYHLRKELIENPEPHDIRLVYLACHHILKNRGHFLINGSISDAKNLSFIFEDMLNNFNAMSEYEISMQNIKALETILVDRKMAKSVKAKQIVPLFECIPCEDKEQQKCCKAIITNLSKLIVGLKGDLSKIFNESFTEIKSFKFTETKYEDEIMPTMEEIYPDHAEVVKKIKSIYDWSVLDEILDGEEYLSFAKVKAYEKHKKNLHDLKILIKKYCDDETYQSFFNGMNEKNKYSNYIGSIRKNGHTYKVEKCKSSEDFYKELLKLLSSINPDQEDESLLEQIKFETENQTLLPLLRTKKNGTIPNQVHMQELIKILDNASKYLDFLNEKDEYGTIAEKIISIAKFRIPYYVGPLSRRHKEEGSNSWVVRKEEGRIYPWNFGDKVDVEKSNKEFIQRMTNKCTYLIGEDVLPKNSLLYSKYMVLNELNNLKIRGKKISVKLKQQIYNDLFCTKARVTGKNILDYLKKEAPELAEEDLSGFDIDFKSSLTSYLDFKKQVVGDEIEKDHYKEIIEEIIKWKTIYNEDSKMMKRMITREFSETLNQDQIKKICHLKYNGWGNFSETFLNGIKGANKETGESYTIIEALWKTNYNLMQLLSKQFSFKEEINQINAEKTGAIGKITYENLVKDLVVSPANKRAIWQTIQITEEIKKVMKCEPERIFIEMARGGEKKKKRTVSRKTRLQELYTGCKDDTRNWMEEIGDREEREFSSRKLYLYYTQMGKCMYTGEEIDVDLLMTANSKWDIDHIYPQSKIKDDSFDNMVLVRKDINNHVKRNHIVPSSIRKEMTPYWKMLLQKRLISKKKYERLTRSTDFTDEELSGFIERQLVETRQSSKAVAELLTQLYKSSEIVYVKAGLVSDFRHDNELLKSRRINDYHHAKDAFLNIVVGNVYRTKFTANPRKWIKKNRDTNYSIRRVFDFDIKQGDKIVWYGNKNENGKHTIDQIKKTMSRNDILYTEYTYCEKGKLFDETLTKKGNKKAAPLKKNLDPLKYGGYTSIKTSAFAFIEFDDKKKERKNHIVEIPIYVVNIAKREPEAVIKYLEEQKGYVNVVVKKYPIKKNSLLKIDGYLARLRGGNSNIITLKNAVQLILDKKSYETIRKVEKYLDHNSKYEANSKLEKFNENDLNTIYNELCSKLRNSIYKKRPVHQLKILEQGFDEFKSLESLKDKVKIINELLVMFRCDAKTEMDLRLIGGSSNSGRMKISKSTLTSKSLKLINQSVTGLFETEEELV

SEQ ID NO: 1401 - protein, 227 aa, unidentified
  REGION 1..227: note = Description of Unknown: Cas Enzyme sequence
MQQKEYKYRVYPTEEQRTFFAKCFGCCRKIWNLMLADRNQYYKDTGKSLYPQPAQYKEAYPYLKEVDSLALSNVQKQQNKAIKDHIENPKAFGVPKFKAKKRCKNSYTTNNQKGTVALTENGIKLPKIGVIRAVLHRMPEEGWTIKSATVSQKRDGSYYISVLCEKDAEDPERLPVDESRVLGLDYKSDGLYKDSNGDLAGMPNQFLEDVTITAVNEAGSSDLFRWE

SEQ ID NO: 1402 - protein, 1008 aa, unidentified
  REGION 1..1008: note = Description of Unknown: Cas Enzyme sequence
MTPARLTDVNNAFLNGLVFGFDVGTGSIGYAVRRGKEFLKVGVIICPEGTSDLKKRRELRRQRRTLRSKKRRRQWLAQELVKLDLTRPSANLQDPVILRARAVSGAALTPEELRTAIAHLWRRRGYLERVPWSSREEGDDRKKEEGVVRDGISKLRTEMKDEGCMYPCHFLIRHPQDQRRRVWPRNLLEAEFRAIVAAQRDRYPKLAEKADWLLYGDTRPIKGEHVYFKSTDGHNPGVLGLRWPRFDNRGPALDSWQPLDADGRPLHVVRKNKDSFKCTQWELALMNFRVLDAQTRQKRDPRVDFPDFVATLRKEWDKKAAKSKSFKIDLKKLAKPYADKFLLVEDQKPLTPDGGGGRARYSTPTLELLRKEIGSGRRVDPPQPVLQRGKETSDRALDRYLADIKHPLVRHRLGLLRRLLNQLIAKHGQPDLIVVEAVRSLALSQKNKNELNKRNEEFRKEREIARGTLKASGQSITANAIQKYRLWQEAKGRCPFCLEAISQTALFSGETDIEHLVPRARVDCNELYNLTVGHIHCNRNVKGDHTPFDAFSASPKWQAMQSNAAECFKGRKLEIFLSPNAEELIEQKADLVQTSYIAKVLRHLCLLRLGWLGADGRDPTDIKNTPSQRFQVTNGQITSRLRQSWGLNNVLYAKPAEDNEEAWKQFSEKNRGDLRHHALDAMVISCTLPWLAHLTHGAKDLLGNSGWWRQDEKGRSLASNPIKLDYEKAKTVIEKVLVRHHVSRSNHQQAYATTLYAKKDKDTYVAREVFTTLTPKNLGSIYPETFSAYCQAAWDKYKAEADDIDAELKKTKGSVPGSFTNKLCFAHFQQWRAKGAPEFTWPKEVKIPIRNVRLISIKDHTAVMPFSKGTHAYVKRSGFREVRIHVGEDGKTLIPVFVPYWRGDPPFSNKPIASKSKPVAVIRRGDVVTLRKPLAAGAPAGRYRITSTKQEELRLIPAHLRDDEDTLIAFGLKRTGARPRWPEFLRAIGYELPHSSSTEPESSSAAEA

SEQ ID NO: 1403 - protein, 961 aa, unidentified
  REGION 1..961: note = Description of Unknown: Cas Enzyme sequence
MKDYVLKEVSEPASNETVWAFDLGKGSIGEAVRQGTKFLHKASLLIPADFAETKTAAGRRRMKRTRDAHKAREKWLNGVMREVGIEVLHGRNYDKAGNWKPGDSADERLEQEFAKPGNSTCYTSCLLRIKLLRGEKLEPWQIYKALHSAIQRRGYDPNIPWKNREQRKTKSGDTDDDEAGTQKRMEEFEEKLAALSKGKPEFHYACYFDAHEMGLWNPGKPDQLKARSDCHAKTTRNQIVPRILVEKEIRDLVDAAAKQYPKLKGKADYLLYGPTGRAYASFDPKLRKEHDLKEGGANDWQGVLGQKIPRFDNRIIGKCVLIPRLNVCKIRTDENGELYPQSRIAAETVFLMRLKNMRFQTSKGQGCLNAKQIADIYNDPKRTKLGMTETQLKKYCHRIDVKPMLGQYQEIEEPRFSGRSRFCRPALEILKRLILSGVPPKHFYQDEVKRLGGNTNPMKGLVEGDLKFLLEIGDTWEGIYIANQKLDALQHSKGNPQDKIRELIGSQNDPIVRHRLTLFAERLEELSKRFGTPGSVALEFVREDFMGRKAKFEYFKFQRDRKRDRDKAREEAAKAGAEERSAGLKMELLKAQVGECLYTNAKLIPEKLDEYVIDHIVPRAKGGPDAAVNYILTTRRANDDKGDRTPYEWLSMQDGWDAYVERVKKRIGTLRNKKVQLLTSPDAETLVEKYTALAETAWISKLAQTIIGLRFGWVNGNDQEGNKRVIVVSGGLTGRIRRKYKLNSLLNPDAKTEEEAETKNRNDDRHHALDAMVISFITSWARNSKFTGFFRFPDGVHRELFGKEIAEVIPQNVCFEKAALAETIYGARIDHGKKVIVQRAELVSLGMKPTAPGKSVFDLKYAGKQAQSVRDQVIHERLLEFLTTKPDETAWRKFCAEFHLKRKDGSNGPRVEYVNVNVGEPTEYKDMSKDGTGAFRKALKGHKGQIVYAVSTIDKQGEKKR

SEQ ID NO: 1404 - protein, 1006 aa, unidentified
  REGION 1..1006: note = Description of Unknown: Cas Enzyme sequence
MKNYVLGIDLGANSVGWAMVAEEPSPDTENIISGVRVFTEGTDKTGTNKEESRNKARREARQARRQHDRRSRRKIMVKRILQRRGLFPLIPEEQKELFKMNPYELRKKGLDEELTEYEFARCLIHINQRRGFKSSLKGSAEAKKEASKVVEPAIAQLESDIKNSGARTLGEYFYTLFANIQRVREHYTRRSMFENEFDQLWTKQASFKPKIWTDEFKKEIKEAIFFQRALKSQKELIGKCPLESEEKRCPRASWFAHQFRILQEINNLRVVVPLSGSRRLTTEERASLIKKLLRIKEVKVEDIRNKYLKLQDREFMTFERSQRKSIKGNPVEYGLRKIFGKEFDAHAPQLRGEVYESLINEEDEVFLAKAATQWNLTEEQIKAISEIDQTEGYMRFSLKAIKHLIPHLEQGKELHDAIKKEYPQGLESRQSDFIPSIKADEIRNPIVSRALSEARKVVNAIIRKYGKPSRIRIELARETKKTIRQRVDETKENRKRNERHEEIKETLNEHDIPPNHDNIEKYKLWEECDHQCPYTGRPINFPHDLYGDNCQFDVEHIWPYSRSLDNSFMNKTLCARSENMRKHNKTPKEAYSGDEYLKIVNRIKNFPDEKKRRFYQDMPADFSERQIRDTSYIATEVGRILKTLGISVESTRGPITAELRYRWGLNSILNPKGEEYKSRLDHRHHAIDAIVIALTTRSHVKNLSSIYDFAVKRPHFPCPLEPYSLDAFRSLVQSAIDRINVSWRPERKVSGQITEETNYGIRQDGTFVHRVPLQSITENQIEHIYDRRIRELVEERLRTSGLKPKQAFDSEKKPLYLPSRKSTDGRGPIIKSVRVWEKASNFIPLKDIEGKIYRYVAPGENHHISIFEWEEGGVKKRDGVVVSRFEVLQRVQRNKKRRAAGEPLEPVITKIHPEHPEARFIFYLCKKDMFMLEEETDDGQKREILCRVQKFDVNNNITLFDAQFAGRVSGDEEIKISDYRYLKVPNTLKGRKVNVDPLGRITEAHD

SEQ ID NO: 1405 - protein, 1199 aa, unidentified
  REGION 1..1199: note = Description of Unknown: Cas Enzyme sequence
MKNKKLSISIDMGAKNNGVFTAKTNGDNIEEKKAFNVVIDKDINFSKKSRRENRHRVRNYKRRKLAKRLLWDILDKNKFKDNQEQINGLLNNRGYTFLSTSSEFEELQDETVEFISEFLPEIKELKTKEDFEAKLSEFELKELKDFIDKTTQNLDIEYKKKKDEFHKEFQTKHSIIKKDLKVIKEFLNDILKEVETGSKPRKKYLQEINEEIQSFDFIDNKEEFFNLVGNISNLQLRILRKFFDGAKRKKDSYKLLKDYFNFFHWNYNDKEKKQKNELFSELKKYDNLEEFFKNCDPLLTIPPYEDMNNRDTYKCYSLLINPKYITDSLKKSIDILWSQKEFEVLHSDNLKYPQKLQRILDISYKMIDKQIHPREVFKKDKGDIGFYQKLLKENFKEFSCFAKEYYILEQKAISGIFKAGLLIKCDKNTPSKNNFKHILLKPLYKYDFTKVKVEKFYEKIKNTKGLQSHLKRVSEVAKDYQNSFYHYIEACYENDKCLNDKRIKDIVKNIDSDLKAFQNIFDSLNIKTYLNKIEKIDKDNLKRVINIFKQTYEILFKDINGFSKTCKTCTIENNYRSSGDIAIAKRLLSDVAKPIDGMLDFMLDKIAFEIVEQIDSIEDEVEIILEQNRFNFEDNLALVKGKKPKKREAKDILNLNICPYSGESITNINGEYDHILPQSKELFNSKANLIYCSSKGNREKSNKRYYLKNLNKKHLKEIFKTDSLDEIKNIIKENIKKIDIDKFTNFENLSLKEQIALRYALFCDENSNEFEKAKEIIKKDKLKTITNGTQKRLARLIFEKIKQKFKKEIDCNVKVIDNLLISATRKDLSYDKTTGEINELWKEKNQDSHSHCIDAMVAFYLANSSIKGNYHKKRDNLASIEPDFEFGNIYIQKQNSSEIKIKKTNIKEKILQNKKMTSIGNTEVLFRENMLSNHYLNIFKIDNKFYYGESKKQILDFNGFNQNMLDYLLKQNILKEFGNNYFAINKAMFYEVLFKQKNEVLKNYKLFKKLDELRYTTQKKSIVSLIDKFLNPSTNDEKKFIKTLVGDNKITKIDQFNYENLIKYFQKGNKLEHKKIKLKISKAYEIIAKELSQNSNSFLTQKDKKFFLNNQALINLLKESILFQKTFKTKRKITNKYSLPLKDTTDKPFLIRRKDNNAKNIYQVVFAKNSARGFVGDIYIHKNHKNIIPLKMEDYKKAF

SEQ ID NO: 1406 - protein, 1334 aa, unidentified
  REGION 1..1334: note = Description of Unknown: Cas Enzyme sequence
MKKLSISVDMGAKNNGVFIIKTLNKKVLGKKATCIIIDKGSINFSKKCRRENRHKDRNYKRRKLAKRLLAELISLSKYDKKQTEQILGLLNNRGYTFISTSTEFEKLNNITIEFINKYIEDLKGLSTREDFENKISEFDDLDDLEEFIENINEQINLECKKKKAEFYDEYQESFSNFIKKDLQNIKRLFLSILNEIQTGSKPRKKYFDEIKDEIEKDFDFIKDISKIEFFNLVSNISNLQLRILRKYFNNKFNKTLDVNKLDIKIRAYFKAFHYKSDKERSQRIELFEVLNKESNIINFLKNTNPILTIPPYEDMNNRNTYKCNSMLIKPNLITKELENTIESLLKSDYFSNLLITNNGVFKKENLIKTKPASGNTYIDTDFTYSKYLQRILDTKIDDDNKTYHPRVVFKNKNPKAIELFKKLFSTKTYDNLKDIAEYYYEEETKIYNGIYKDSTSIFEKCNTNTSYKNNVKELLLKPLYSYDFTQEETIKFIYEIENYEQKINRTSLLGFLKFVEEEYKKYQNSFYHIVTHNFELNIKDIKDKDINKLILGLDSCVISLNNILNKLNIKTYLNDVKIVNRENLSRVLNILKQTYNILFYDLSGFSKTCKSCTKENALRSDENFTIGKRLLSDVAKPIDGMLDMMLDRLAYEITEQIDKKDIENCESLEILLEQNRFEFEENLNEIKRANDSSIKRYKNDTKNICLYTGVSFDKGEYDHILPQSKEVYNSKANMIYCSSEGNREKSNKIYKLENLNIKHLKEVFHLDDLEKIKEFISLHLKTINEKDFKNFDNLKLNQQKAFRYALFMPNNSPEYKKALNLVKIDKLKTFSNGTQKRLARFIYEKLVNKYPREFENKQINVDSKTVDSMLVSATRKSLASSNKELDKEKYQESHSHCIDAMIVFYLANAKIEGRADRKKDNLTTLIPKYNFDDIYLEESGINNLSKNVTFINSSKKEVGSYKLFDDTIYAENYKHITKESLKEDEFECLIYHSILFKNQKSKKVFLNNVEELEDGIIYKIDVQKISNLIYKLFNQRDKSTLLKLKFLDKLQYFTSRKEIEGIFFDEKRTKLKKFNEIKNIPYFSIKLYKAVYKKLLNKNDLFFVEKDKYTLNNKVLNDLLIEIFESKQKDEYKEKRKRSKKRHKFTLPILGSPKFKIKRGSSWQVLGNKDIATKNYIIDGDIKPIAFFAKNTYPVKIKDLFDCLLVNDDAKSVYDISVNTDHLDKYIIDLKYLVTEAKRCTLIVTFKKSDFLDINFNKIKLFDGAKDEIFKALIKNYIDNKELEISKYIGSIRNGLKAKAILIDNNLTTITLQYKAAINVNKKKIILDNLKGNI

SEQ ID NO: 1407 - protein, 1414 aa, unidentified
  REGION 1..1414: note = Description of Unknown: Cas Enzyme sequence
MIKLSIAIDMGAKNNGIFIVKSDENKIIDKKATNIIVDNINFSKKSRRENRHKDRNYKRRKLSKRLLKELIDFDKFDEHQQELILGLLNNRGYTFLSTSSEFESLDDITVEFNKQYLINISKYKTKENFEEFFTDGFDDEKEIIEFLESCIKNITTIMSDLSNYTNKKNILIDLKLLSENKLVKFKAFTYIKFLFSKYGYNNIGKNQAQITKNIIDENIDLSNIDFESEINHINSLCFDEQSIKKENNKIIIDDLKELKSLFINIQKEINTGSKPRKKYLTEIKDEITSYDFIEDQQSFYNLVGNISNLQLRVLRKFYNNNSSHKNKYKILKTYFISHHYKTDKEKKDRKKLFVELNKYDDLKEFLESCEPNLTIPPYEDMNNRDTYKCNSMLIKPEIITDDIKDAIDFLLSKPDFEALIRDENGELKKEEFIKTKVESGNKLVKDDFTYSKYLQRILDATQEQTTKELNPRNVFKHKAKFEKGTIDSIEYFKKVFTLKVYNTLKPIAEAYYEEEEKIYNGIYEKSTSILTKCNTNTPYKNNAKHILLKPIYSYNFTQIESDNFLETIKATKGLQTALARISDEAKKYQNSFYHIVEACYNDEKCVDDKDIKLIIKNIEKNFLEIKAILENNLDINNSYFSTVTSVDSENLKRVLNIFKQTYEILFKELGGFNKTCKHCTKENSIRSDETLTIGKRLLSDVAKPIDGMLDMMLDRLAFEISENIDDEDIKDIKSLEILLEQNRFEFEENLNAIKRANNSSIKKYKREYKDRLNIDICPYSGKKFEKGDYDHILPQSKGAYNSKANMIYCSVEGNQKIKGSRDYTLEMIDKVHLKTIFKTDDLNEIKSIIKTGLDSIKKENFTNFDNLKLHQQIAVRYGLFMRGADEFNKAFEIVKIDKLKTITNGTQKRLARFVYEKIVEKKELKKYFEAKKDDGSLKIKVDSKTIDNQLVRTTRNFLASDKKELEKQEIQNSHSHCIDAMIVFYLANSKIKGRKDRQKENVNSIEPIYNFDDIYLEESGINNIHKNKTFINSPDKELGSYKLFDDTIYSENYKHITKENTPQKDLEILIKYQLLFINQKGKKIYFDEITKLENKTIYKIDVQKTSNLIYKLFNDKNKAELSSLKFLDKLQYCTSRKEIQAIFFDEKQTKLLEFDTIKNIPPFSTKLYRAVYKKLKEQKGIFNISDDGKSTLNSTVLENILKDMFSSKQKEEHKEQRKRDKKRHKFTLPMLGSPSFRIKRDSSWQILGNKDIASKNYIIDGNIKPISYFSKNTIPLKIVKLLDCLLIDKNTESIYDVPIKNIDEINNYVSSLKYLVSEAKRCTIQVTLIKKSFSDIEFSNILAFDGVKDKVFKLLLENYIENKESLLNKYIGSIRDGLKGKAILLDNNSHTIILQYKAGINNDKKQIILDNIKN

SEQ ID NO: 1408 - protein, 1266 aa, unidentified
  REGION 1..1266: note = Description of Unknown: Cas Enzyme sequence
MKLSIAIDMGAKNNGVFIAKSNDGNIVEKKATTVVIDKGALNFSKKSRRENRHRVRNYKRRKLAKRLLWEFYDKTKYTKEQQELIQGLFNNRGYTYLSIEDDFEEISLRTIEFLETFFKELRECKIKEEFLKILVLFENEEEVIEFCENITKKLDIEYKKSKSEAIKDFQDDWSQIKKDLKNIKELYQNVINEIKTGSKPRKTYLKEIKKEIEKFDFIDDKITLYNIVANISNLQLRILRKLFNSTNRYQKLKNYFLTFHYEDKLLRKELFKELNKHNDLTKFLNNTNPLLTIPPYEDMNNRNTYKCNSILIKQEAITPQIKKSIEILQKQPEFEVLKLNNLSDSQKLQRILDINSKIIDKTKHPREVFLYQKEDYLYYKNLLKENYEEFKSFAKKYYENERFITNGIFNANDIFKICKTNTPYKNNIKHILLKPIFSYDFSPLQVDELIEHIKNTRGLKSYLEKISKNAKEYQNSFYSVVKSCYEDKKCVADKEIKSIVTNLDKKLKEFQNILDELNIDSNLKDVELSSDNITKILNIFKQTYELLFKDINGFSKTCKSCSIENSIRSDENNPIAKRLLSDVAKPIDGMLDMLLDRLAFEIVEEVNSINDANEIEILLEQNRFEFEENLSEIKGKKNKRENKDALNSEYCAYTGEKFVKGDWDHIIPQSKDLRNSKANMIYVSIKGNRRKSNRYYTLQDLSRQHLNDIFKTDDLDKIREFIKQNLPKKEKFKNFDALKLKEQIALRYALFMRGSEEFNKAYEIVKQDKLKTITNGTQKRLARLIQEKLNKKLNKTLNMKAKVLDNKLVSATRKELAVDSITGEINHLWKEEKQDSHSHCIDAMVVFYLANQDISFEKIYLNNSDIKNITKRQTFIKAKDISSYKLFQDTIYSENYKHITKTSLKEKELTTLIKHNLLYFNEKNKKIYLLNINELQENFIYKIDTFRLSNLLFQLFRDKDKKSLQELKFLDNLRYNTTRVEIESIFFDEKRTKLLEFEKISKKIPPYSKSLYQAVYKKLQKSDIFDINENKTTLNEEKLESILKELFTSKQKIPLQRKRGKKRHKYTLAILGQNAKYRIYRDGIYQVVAAENIATKNYIINNSIKPIPYFTKNTLPLKISDLIDCLLVDKNTPSIYEVNIDISEIKEYISNLKYIISEAKRCKIIVSFNKNAFKDINFDYMDEFDCSKNNIYFNKFVDKYIENDTLPYTKYINLMRNNKLDKKNNGINRELKAKATLIGKNSETITLQYVAEVNSDKKEIILKNLK

SEQ ID NO: 1409 - protein, 1131 aa, unidentified
  REGION 1..1131: note = Description of Unknown: Cas Enzyme sequence
MAEKSSYSPKKYSLGLDIGTSSVGWAVLDLDKERIHDLGVRIFERPEDPQNGDSLAKPRRDARSARHRLKRRRQRLNHLKQFFVDQNILTKNQVEEVLDYKSDFNKLDVYGLRSKALTEELLPEELLKVLYQIAKRRGFKSNRKVVEESDKEGGRVTSALKTNEKFIADNNYTTVGEALSRDKKFASHKRNKRDDYINSFARDDFLHELEAIIKTQRNYALKNVPEQAINELIYGIDDGQVTNVSAIMYQRPFITKELIEKMVGDCTFEKNEKRAPKASYSFEVFRLASDLSHLVFIPRDASKRQAKRENLEVRLSSEQISKVIDLAKNQKSLTYKKVRSTTGISEDYVPKDVRGKKKEGDEFGEDNIFSGLKAYNDIRLAMKDLPEDWAKIDNESVINQIAYILTTQKADEGIRAELDSLPLSDKAKEAIIKIKPTNFKAFGHLSIKALRKITPHILEGVTYDKACEAAGYDFKKQSASLEQITNPVVKRAITQTLKVVRAIERKYGKPYFIKVETARDLAKNFKDRKAIENDNKENQARNQSIIQTLNENGVVTPTGQQIIKVKLYREQNGVCLYSGKPIDFETMLRDDNAYQVDHIVPFSRSNNDGITNKVLVLTEENQKKGNQTPFEYFGVDEKRWKEYVARIESTYKTRDIKTSDKATNAINYKYNGYAMKKKQNLLLQDYKNDSWNVRALNDTRYITRFIQNYLRQNVDFAEGEEKQRVIAPNGTTTAYLRKRWGLAKDRAEDVLHHAKDAAVVAAIDNSIVRQANLFAKRGEIAALLSAVKTMEEKTDKLTGEIIDEDEFDKAQRRKDAAIVLSSKYFPQPWDNFDKEVMKRTLNTDVTTLQNELRGLNNYDEDFRLSVKPIFVSREIRHKIRGEAHESKLRSNRSRNGQNLIRIPLTELSLKRLENSLAKEEFDSQKNKNGSSLYEKLLTRLNECSGDAKKAFNPPFKLYKGPKQDKNGNPISPVAAVKVYDKKGVVSVGRKANAPVALAGMVRIRVYKKDNQIYMIPDYRINILENKETMELLKPLKKVSKIDNSFNFIGYLYKGDLITIQKDSQTFVGYFVQFEGDNRITIKSHLAADSSRSSKSTVKRESLSGINYLKIHKVDVLGDVNFSEGIVWPGAS

SEQ ID NO: 1410 - protein, 999 aa, unidentified
  REGION 1..999: note = Description of Unknown: Cas Enzyme sequence
MVVKLSICIDMGAKNNGVFIAKTDNNEIVDKKATTIIVEKGAINFSKKSRRENRHRVRNYKRRKLSKRLLWEILNQNDFGKNQIELINGLLNNRGYTFLSVENEFETLQDRTREFIDKYLEDLKGLYTKEDFEKEFDKYESEKELLKFLEDSINKIDNEYKKKKQEFYKEFQADFTNTIKKDLKLLKDFLQNITKEIQTGSKPRKQYLKEIQAEIQEFDFIDDKKSFFNLVGNVSNLQLRVLRKFFNHNSSHKPRYEILKRYFLSHHYKTDDEKQRRKELFEVLNNYDDLEVFLQKCNPLLIIPPYEDMNNRDTYKCNSMLIKPEVITDELKVAIDKILENEYFSNLLISSIGEFKKENLTKTKPSKNNQFIKKDYTYSKYLQRILDATPEITTKELNPRNVFKHKAIFNKGKTSSITEFKKTFGKDVYNTLKEIASKYYQEEQQIHSGIYVETTSIFEICQTNTPYKNNAKHLLLKPLYSYNFTPEEADKFLDGIKNIRGLKTQLELISNEAKKYQNGFYSVVLSCFENKSCVDDKELKKLIKNLPNTLQNIKSILKEIDIQNSYLDEVEQIDSKNISRVINICKQTYEILFKDLSGFSKTCKVCSIENGIRSDEKIPIAKRLLSDVAKPIDGMLDFMLDKIAYEITQNITKGDIADIDTLEINLEQNRFEFELNLNEIKRANNSEIKKLKLEHKDKLNINICPYTGEKFDKGDWDHILPQSKGVYNSKANMIYCSTEGNRQKDATIYKLDNLHENHLQAIFKTTDRDEIINQIKKGLVTINVDDFTNFNNLKLNQQIVLRYALFLDNSSDEFKKAFEIVKLDKIKTITNGTQKRLSKLIYEKLSQKYPNEFKNIKVYSKTIDGTLVSATRKSLAVDENTGEINHLFKEDIQDSHSHAIDAMVVFYLSNAKIKHQNSFKKETIIEPIFEFDDIYMESKIDYLSKKQTFIKAKDIGSYKLFDDTIYSEHYKHIDKDFNKLDVLMEFGLVYQNNKGKKSL

SEQ ID NO: 1411 - protein, 1067 aa, unidentified
  REGION 1..1067: note = Description of Unknown: Cas Enzyme sequence
MVAKHKDYVLGLQINASSIGWAAVQLSDKDDKNPVALMHPGVHLFDPGVEGSLLEIKRGKDISRAVAYRQVKQSQRIRERRLERETELFALLQMQGLLPASTNGSPKQRLDTLNNLERELEKALADRHPHNKLPYILRADALDRRLKLFELGRIFYHLVQRRGYQSNRRKPEKEGQEGAVKQGISELAQEMQKLKARTLGEYFSKIDPQKVKIRRRWTSRQMYLDEFEQIWTKQHKYYPDLLTPQLKSQIHRLLFFQRPLASAKHLVGFCEFEPKQRRAPMCSMEAQRFRMRQRINDLRICPIGQAEGSPLTKEEKEALYRLLEVNPQLTYTAVKKHFGFPKSSEFNFQRAGEKQILGNRTYAHHYKVFGDAWLKMTPEQQAETINIWNAAETEKQLVTAGMRHYLLTEEQGKLWASELPESGYCSLSKKAIARLMPHLNEGIGYTTAVEREYGEGVHFKPIHEEIPPVREVFRALANPAVERSLTQTRKIVNALVRRYGKPYRIHIELGNELRRSRKERQNIHIGNKQREASRDKLRERVSEATGIAKQNVSGSDIEKVQLWDECDGFCPYTGHKIPFDALFRGDDWMVTNILPFNRHPDNSFSNKTLIYAPELASVKRNFTPYEAYGKNEDLFDDILRRVDLFKGDLAIEKLHRFEVRSREDLEIYTQRAMNDNRFATKWAMELVGTLYGGRDVLLPQGVTRRAVCGRPSALTALVRRKWALSDLYRELPDDWRAQTLDPIAIACLDDEIFHRMTRYSKDSNAIESPWPDFIDSIRSQVDSIVPSIRVEKKLNGALHQETHYSKPVIDEQGRSWVTVRKPVTAMSKRDIEAIVSKPVREAVLRHFLALEEDLSTCAAANNWPTIQVGKRPAVPIRRARIRKALTVTKVGKEGFERYVANDRNHHMEVFEIDDANGPRYVSRTVSLLEAKTRCNRKQPVIDERLTSLNGVSGRLPKGAKYKHLFVCALMIGDLILLHRDCEHENDVCIPGIYRIRGIAANGQVTVMPLNETRSAVELDKAHEGWSPKVDALRKMGMAPVKVDLLGELHPNGGKIDLFQPRKVATHQ

SEQ ID NO: 1412 - protein, 1062 aa, unidentified
  REGION 1..1062: note = Description of Unknown: Cas Enzyme sequence
MRQKKDYILGLDIGIASVGYGIIDYNSRDIISAGTNVFKEANVENNEGRRAKRGSRRLKRRRIHRLDRIKHLLEEYHLIDKDNIPTSTNPYEIRVKGLSEELSKDGLAISLLHLAKRRGIHNVEAVDESDDKGNELSTKEQLRKNAEQLETKYICELQLERLESNEKIRGEKNRFRTVDYIKEAEKLLSTQKGFHKIDEQFIEKYIELLSTRREYYEGPGEGSEYGWGQDPKKWYEMLMGYCTYFPDELRSVKYTHSADLFNALNDLNNLVINRDENHKLEYHEKFHIIENVFKQRKKPTLKQIANEIDVKEEDIKGYRISTKEKPVFTELKIFHEIKGIVSDKETLEDVSLLDKIAEILTINQTPSEVINDLQELDTEFSMDELDAISKLSGYTGTHRLSDKCIQLVLDELWHTENNQMQVFANLGLKPKKYKLENKNVIPVESINEFVLSPVVKRSMTQAIRMINRSIELYGHPKDIIIELARESNSQEKQKFINKRQKNAENLNKRINEIIGEYGLENAKRLREKIRLLDSQEGKCLYSLEAIPLEDLLRNPLYYEVDHIIPRSVSFDNSLNNKVLVKQVENSKKGNNTPYQYLNSGDAKISYKQFKQHVLNISKSGGLISKKKRNYLLEERDISKFEIQKEFINRNLVDTRYATREMVTLLKAYFSANDIPVNIKSINGSFTNHLRHVWQFPKHRDHGYKHHAEDALIIANADFLFKEKSLLSKANKIMNKPTTEDDQLEMNVKSENDYEEVLEIPLKVKNIKEYKKFKYNHMVDKKPNRQLINDTIYSTRKNEKGDDVLVNTIKDLYSNDNKDISKLRDMIFDKPEKILMYKNDPKTFSKMKQAFEQYSEAKNPLAKRLEEEGEYLTKYAKKNNGPVVKSIKVLGKKVGIHRDVSNKYSAVSNKVVQLSLKPFRMDLYKDSDGYKFLTVRYSDVIKKESHYCIDKSKYIEKLEMKKIEKGAEFINSFYSGDLIKIEKDLFRLVGVNDDYKNKIEVNLIDIPYSQYIEMNNLKVSSKQKRITIKKRTSSIEKYTSDVLGNLYNSTSNKNPQMIIKRGL

SEQ ID NO: 1413 - protein, 1078 aa, unidentified
  REGION 1..1078: note = Description of Unknown: Cas Enzyme sequence
LRYVLGLDIGIASCGWAVINQEKERIEDLGVRIFDKAENPKDGKSLAAPRRDARSTRRTLRRKKHRMQRIKVLLVKHGLLSKTELDHLYESATEVDVWNLRLDALERKLYPKEFARILIHLAKRRGFKSNRKETTLSENGQILESISENQQIMEKQNYRTVGEMILKDKKFENHKRNKNGTYVGTVTRQQLQDEIQMIFHAQRLYKNDYATEEFESSYLEIWASQRPYASKDQIEKMIGYCTLEPKEKRAPKASWSFQYFVALQTINNLRLISKDRIEELSFEEKKQIMNLALEKSIVKYIDIRKLLSVPNEFQFNSLSYSADTVDTAVESRKCIELKEYHSINKVYKQIYGENALNLLPKYYDTIAYGLTIFKDDKDILEYLQNKYVNAKGKPISNFANKTYDDTFIQALLNLNFTKMGHLSFKALKNIIPFLEEGLSYDKACEKAGYNFKGTSYTEQTKYLPVIPQNTNPVVHRALSQTRKVINAIIKKYGSPNAIHIETARELSKTFQERKEIDSMYQDNSKKNEHAIHKLKELGNINPSGINIVKFKLWNEQDGRCMYSGKYIEPHRLFEEGYTEVDHILPYSRSLDDSYNNKTLTLGTENQRKGNKIPYEYMGNTSIWNDFETRVQSNKKINKKKQQKLLLQHFSYAREQEFIERNLNDTRYATIYLSSLIQQHLIFSESSRKKKVHTVSGIITSHLRSRWGFNKDRKEGHIHHALDAVIVAVTSDHMIQRVTKYYKLKELNRNLQAKRMPFPEPWEGFRLELEARISPNTQQYLKGLRFKNYADVNLSEIKSIFVSRMPKHSITGELHQETIRKFIGYNEKGKVLTAIKTKLEDIPFDANGDFPMYGKESDLYTYNAIKERYLSHKKDKRKSFQEPLYKPTKSGGIGPLIKSIKIMDTRTIVNPVNQGKGVVYNSKIARTDVFKKEEKYYLIPIYTIDLMKNILPQKAITAGKGYEDWTTIDPSFTFLFSLFPNDLIQIVPSKNKTIKARTTVSKKEVLLPSLTGYFKGVHSGTAGITVETHDGSVIANVGSKQLLLIEKYQVDVLGNYTKIKEEKRIGLTTYNDNKKIAAC

SEQ ID NO: 1414 - protein, 1532 aa, unidentified
  REGION 1..1532: note = Description of Unknown: Cas Enzyme sequence
MKKILGLDLGTNSIGWALTKLDFDNKVGEIIDIGSRIIPKSQDELGKFESGQSVSQTAERTGFRGVRRLRERHLLRRERLHRVLNILGFLPEHYTNCIDFDKYLGQFIEESEPKIAYRTNTDGKSEFVFMESFLEMLGDFKTHQPLILVNKKGENALIPYDWTIYYLRKKALTKKIEKEELAWLLLNFNQKRGYYQLRGEEEEGKLERLVEFHTLKVIDVIDTNEINAKKQFLYKIVLENGWEFIKPSNLPVGWKDKLKDFIVTTDLDEEGRIKLDKYGKEKRSFRAPSEDDWTLLKKKTEFEIDKSNKTVGCFIYDILLQKPSQKINGKLVRTIERKFYKEELELILNKQREFHPELTNFELLNDCISELYENNEAHRSTLEKKNFTHLFVNDIIFYQRPLKSKKSLISNCRYEKRYFKDKEGNSKIEPVKCIAKSNPLFQEFRLWQFIQNLKIYERDKKVDGIQKVDYDITAEFLKTEDDYTKLFEWLNERKEIDQKAFLKYFKLKEDNYRWNNIEEKLYPCNETHNQIVNRLSKVQKIPENFLTSEIEESLWHILYSVEDKKELEKALNSFALKHTLSIDFVEHFKKFPPFKKEYGSYSTKAIKKLLPLMRMGKLWDESFILKETKDRINSIIERLKSVNYDKKKIEEISDDYIPKQVLKSFVDCRNPIQGLNTFQACYAVYGRHSEENDSNKWRNPEDIDQFLLDFKQHSLRNPIVEQVITETLRVVRDIWSTHGKGEENFFDEIHIELGREMKNPAEDRKQMTKTISENENTNLRIKSLLIELLNHSDVENVRPYSPAQQEILKIYEDGILKSNIEIPEDILKISKNVQPSKSELIRYILWLEQKYRSPYTGDIIPLGKLFTPAYEIEHIIPQSRYFDDSLSNKIICESDVNKDKDNATALEYIKNNSGKKIELSGGKEVTLFTIDHYEKFVKEHYSSSRSKMKKLLMDDIPDSFIQRQLNDTRYISKMVKNLLSNIVREEGELETTSKNVSASNGSITSTLKQDWGLNDIWNDIISPRFERLNELTHSNQFGEWTNKDGKSVFQTQIPLELSKGFTKKRIDHRHHALDALVIACATKNHINYLNNVYAKTENERFDLRKKLKKIDERTIEKVVNGEKKAKRIFVAKEFYKPWGTFTQDAKEALLTTIVSFKQNLRVINKTSNKYQRWRKDENGNLKKIMVKQEKGENWAIRKPLHKDTVSGHVSLKFSKMVQLSSALDNWKMIVDKRFKEYIKGMVNSGLDKNKIIKHLKELENKWENKDISKVEIYYFDPENAATRVNLGESFDSKTIESITDTGIQKILMNHLQKFDEIDSNGKVKEHPELAFSSDGLDELNKNIKELNKGKNHQPIYKVRKFEPIGNKFNIGEKGNKKDKYVETAKGTNLFFVIYSDEVGKRSFETIPLNIVIDNLKNGLKPLPEQDSHGNKLRFYLSPNDLVYLPSTEEIDNHELVDFNCLSSDQIKRIYKTVSSSGYQCFFVRNEIAVPIVNKLEFSALNKTEKSIEGDMIKEFCWKLEINRLGKIKRVFR

SEQ ID NO: 1415 - protein, 1124 aa, unidentified
  REGION 1..1124: note = Description of Unknown: Cas Enzyme sequence
METRYTLGLDIGIASVGWCLLGEDRIVDLGVRAFDKAETAKEGDPLNLTRRQARLARHRLAQRAWRLQKLARELKRHGLIADKQLFRPENPAVVSPWQLRVEGLDRLLAPVELARVIYHLCKHRGFHWISRAEEKQAEGDAKSEGGKVKQGLAGTKRLMEEKGYRSIAEMVLAEFVKQSMNADGTPLFDRKSQPIPAGSARNKRGEYTKALSRVLLGDELKKLFAEQRRLGNPFANESLEAAILGSGDRKSGLFWMQKPPLSGAALLKMLGKCTFEKGEYRAPKASFTAERHVWLTRLNNLRIVVDGETRPLNEQERAVALPLPYRQSKDPLTFKQLHSTLVKNGLLPEAFEFAGLRPSKDGKDPKAEKLIKLPAWQELRTTLKAARLETEWEGLAGAACRGQPQILDEIARVLSIYKDDDEARAELNKLSLPNREAMVDALLDIRFDKFHALSLKALYKIVPHMEAGLRYDEACIEAGYHHSQLHKPGEGTSRTLPPLYAGRDPDGRMRFAEGEDIPRNPVVLRALNQARKVVNAIVRRYGSPMAVNIEMARDLSRPLDERNKIRKKQEEYRTRNEKDKTFFTEEFGQPPKGGEFEKFRLYREQLGKCAYSVEAIDLARLLEPGYVEIDHALPYSRSFDDSKNNKVLVFAKENRDKGNLTPYEYLGGAENSPRWLHFVESTKSYRLAKRSRLLRKEFGTKEAEEFKERNLNDTRYICKFFKNYVERHLKLADGSEAKRCVVLSGQMTAFLRARWGINKIRSESDRHHALDAAVVAACTHGMVKRLADYSRTRELAQVHTGFVDTTTGEIVDPAKFRQLKQHFPEPWLHFRHELEARLKFDNPALLREEMTHLGTYDDAALDELRPLFVSRAPQRRNGGAAHKDTIYGQPEMMREKGSVTQKVPLASLTLKDPDKLIDPHRNAKLYDAIRERLEAHGGKGDKAFPADNPLRKPDRDGNPTGPVVRTVTMVIDKLSGIPVRGGIARNDSLLRLDVFTKTKKFYLVPSYAHHRVAKALPNCTADGETQIDDSFQFQFSIYPNDLIRVALGGGESIMGYFKSYGGPPNPSNITLQVHDRNRNGHRRANDKGEIPSIGVRTALALEKFHVDVLGNIYPAPPEKRHGLA

SEQ ID NO: 1416 - protein, 1524 aa, unidentified
  REGION 1..1524: note = Description of Unknown: Cas Enzyme sequence
MAKILGLDLGTNSIGWAVVDDEKNKILDTGVRIYPEGVTAKTIGLGDKEVSRNATRRDARQLRRQFYRKRLRKIKLLELLIEQDMCPLKRAELFEWKNWDKTKKSEGRVFPNSPEFVDWIKLNPYQLRAKAINKQVSKYELGRIFYHLIQRRGFLSSRKGGADPQTLFERGKPEENILPIKETKEKIKGTSLGYYLNSIANKENEAYKFQELRLRGRYTIREMYIEEFDKIWTEQNKFYDLDSKTTIFTKIRETKGSINNKKNTTRLNYLKEKYGEANVEVVEITDKNNLSNNDETQSVKKETRHKIITKEEISLKYVLAGDIEYITDDDGERKVKFKSNESILYWQRPLRSQKGLLANCRFEDELPVINKNGEFSKDENGEIIKRSKKPCPLSHPEFEEFRAWQFINNIYFGKRNPLSDEQKQIVLDLINKKKKNFNFTEIIKALKLNYEKFNYDEKFTVTANTTISQLSELFEPEVWKEKYDEIWHCFYFYEDDDKLYEKLKKSYAYSGNLETVSKIKLKDGYCNVSLKAIRNILPFLKQGYLYDKAVILGGVKNAFGKRWEYFQDYHYDIINKVVAVLKEDNKEGEAILKIKEVLSSKTNRYGFSVDDPRFFHLYHHSQSVEQKKDLNDRLPVVENLRNPIVQQGVNEMRRLVNALMKKYQIEFGDYFRFDKIKVEMGRDLRNTKSARQDMTIRIRENEKKNDEARSRLQEYGLQPSRNNVQKYLMWKEIADVSGTPRCPYTGKTIAISDLLGSSNTVQIEHIIPYSISLDDSFGNKTICESHFNNLKGELTPYQFYQKNPDVKLWGVSSWDAVADRAFQILPYAKAKKFTIKSELKLDDFIERQLNDTRYIAKKSVELLSNICSDVRVMPGQLTAELRHLWGLNNILQDNIPNLQEELGKVKNIENNNCFLVLNEDNEIIEIVPKQNSRPKTNSDEILLPIIVKGKKLVSDSFNLDIDLENYPDGKYWAKLKVDNDFLIIPRYVQKPLVSEDRIVFRGKIEKQTFKNDTSGNIKVTNKEDGVYWVDIAIKNKEFKNAQTQKSRPDVKPKSKIVLFGNVKDEKFSCYIYNCKTNLPDGKYWLILELDINDVNFTKAVNDKPDLDANNQICLNATVNDLQELVLDIDNLSNFKVNEAAGKYFTKIKIKEINPNLNLIENNPPILKEKTHKILEGVIWADKYSGEIKFDPKKKRDDHRHHAVDAIVIALTEQGFLQKLSTWHASDDIKYKERLDDSEKFPMPWDEFYTDTKKAVNSILVSHKKQNKTLTRNKKGFSVRGQLHKETVFGLRQAPKQEQAHHFRVKVTSIEDEKKYKKIVDEGIKEIIRNYLLAKYGKDIKYAENFKIPKDAFYENNEWTLFLPNKRGDKVPIKKVRIKENLSNTVQLKSDLNQYVNPRNNHHVIIYKDLEGKLQEDVVQFWTAVERKQKGESAYQLPEDGLEIIEILEINDMFLLGLSEEEYEDNKNNKEFLSKYLYRVQKVTSKFYTFRKHNASTLDNSEYEFRIQSMSAWEKANPIRYKISL

SEQ ID NO: 1417 - protein, 1076 aa, unidentified
  REGION 1..1076: note = Description of Unknown: Cas Enzyme sequence
MSSLTTNELILGLDLGTSSIGWSIINEEKQNIVKMGVRIFDEGVNRDQFGTESSKNAQRREARLSRRARDRRMMRMNKLFKILQESSLLPNFSKSQLEKINSPFEENISNQAKKKEMRRRKLEVRQEIIRDLDIDLLKKWSLALPHKPHLYKIYNKTLPNVFPYFLRKVALDEKLEPFEIGRALFHLGQRRGFLSNRKSGKSAETGNVLGGIKKLYDNMEESEFRTLGELFSTFEPDKIRIRKKYTSRKMYEEEYEKIISSQISLGNNHFFENNEVKKNLYKSIFYQRPLKSVKKFIGFCTLEKDKRRMKIAFLNAQEFRAKQTINNFRIINSFSTSTERSLTPHEREIIFNEFLKKDKIKVTYLQKILNLEKDEKFKYDENEVKGNTTSSKIYSAYSEFFSHSKIDQEKIVNALISFDSQTALEKHFKEKWKLDSETATKLSQINLEEGYLAYSSTAVEKILPFLREGKVLYEAKINAGYKDENDKSIFSLLPSYGKIDPSLRNPIVSRTLSELRKIVNSIVKKYGKPKQIRIELARELKKGKEFRENILKANKSRASERVEAENKILEYSPSLKVSKADIEKYLLYVECNYQCPYTGKIISMEDLFGKNPQFDVEHIVPLSRCLDDSFLNKTLCHYFENRHVKKNQTPYEAYGIGSPEKYSEILKRVEKFKGNGKYKKIQLFKQKDSTSEQDFASQMLNDTRYATKLAKNYLGLLYGGEVDENHYLRVRASTGQITAYLRNMWKLNSILSEENIKSRNDHRHHAVDALVIALTSEKSINLLNRAAKNAEKESKSKFGKLDKIWENLIEQAQEQVSKIQISFRVDRKINGSLHKETFYGKSNKDILGENYIPIRKPLDSLTDRELGNIIDPYIKDSVMRKLAEFGTKIPKKAFKLDDEKTLPFLIVKHNEQLKRPFAKQKGEKIYIKSVRVKARTASPLQIGIGLQERNVQPDENHHIAYYEITKGKKVTWEAIVVSRLEAMTRKKNNLPVINKEALKEKGGYFKFSLMKGDIIEITDKNGELKLRSVKSITSDSRIYHSPSHDARPQCDRIKTSDFPNVSPNSLYALKCKKIIV

SEQ ID NO: 1418 - protein, 1212 aa, unidentified
  REGION 1..1212: note = Description of Unknown: Cas Enzyme sequence
MLMSKHVLGLDLGVGSIGWCLIALDAQGDPAEILGMGSRVVPLNNATKAIEAFNAGAAFTANQERTARRTMRRGFARYQLRRYRLRRELEKVGMLPDAALIQLPLLELWELRERAATAGRRLTLPELGRVLCHINQKRGYRHVKSDAAAIVGDEGEKKKDSNSAYLAGIRANDEKLQDEHKTVGQYFAEQLRQNQSESPTGGISYRIKDQIFSRQRYIDEYDQIMAAQRVHYPDILTDAFIRMLRDEVIFMQRPLKSCKHLVSLCEFEKQEKVMRIQQDDGKGGRQLVERKVKFGPKVAPKSSPLFQLCRIYEAVNNIRLTRPDGSPRDITPEERDKIVAYLQTYEAPKPPKRKPAKAKPVKLAHPKLDLDKLKELLCIEEELFADKLLEEGLKGDATRIALSIILQPYPQYHHLLDMELETRMMTVQLTDEETGEVTEREVAVVTDSYVRQPLYRLWHILYSIEERDAMRRALITQLGMKEEDLDGGLLDQLYRLDFVKPGYGNKSAKFICKLLPQLQQGLGYSEACVAVGYRHSNSPTSEEITERTLLEKIPLLQRNELRQPLVEKILNQMINLVNALKAEYGIDEVRVELARELKMSRKERERMARNNKDREERNKEVAAKIRECGLYPTKPRIQKYMLWEEAGKVCLYCGRSIEEEQCLNGDDMEVEHIIPKSVLYDDSYGNKTCACHECNQTKGNRTALEYIRAKGWEAEYMKRINDLLKEKKISYSKHQRLRWLKEDIPSDFLERQLRLTQYISRQAMAILQQGIRRVSASEGGVTARLRSLWGYGKILHTLNLDRYDSMGETERVSREGETTEELHITNWSKRMDHRHHAIDALVVASTRQGYIQRLNRVSSESEREAMSGEIEMQKATKTDKLSLLERWLTQRPHFSVRTVSDKVAEILISYRPGQRVVTRGRNIYRKKTADGREVTCVQRGVLVPRGELMEASLYGKILSQGRERIVKRYPLHDLKGEVVDPRLRELITTYNQELKSREKGAPIPPLCLDKDKKQEVRSVRCYAKTLSLDKAIPMCFDENGEPTAFVKSASNHHLALYRTPKGKLVESIVTFWDAVDRARYGIPLVITHPREVMEQVLQRGDIPESVLRSLPPSDWVFVESLQLNEMVIIGLSDEELQRALEVQDYRKLSEHLYRVQKLSAGKYFIRYHLDTDVDEDNRSGRIPKFYQLSLDAYKKNNVRKVRVDLLGRISLL

(The sequence listing continues in the following parts.)
